United States Patent Application Publication US 2025/0122569 A1 - sequence listing, part 3

SEQ ID NO: 311 - DNA, 11470 bp, unidentified
  source 1..11470: mol_type = unassigned DNA
  misc_difference 7634: note = a, c, g, or t
  misc_difference 7635: note = a, c, g, or t
  misc_difference 7636: note = a, c, g, or t
  misc_difference 7637: note = a, c, g, or t
  misc_difference 7638: note = a, c, g, or t
  misc_difference 7639: note = a, c, g, or t
  misc_difference 7640: note = a, c, g, or t
  misc_difference 7641: note = a, c, g, or t
  misc_difference 7642: note = a, c, g, or t
  misc_difference 7643: note = a, c, g, or t
cgtttttattccaccagcaaagctggtggttgtcgctcgctcaagctacccaaaataaaagatcccgtacacataacttcagtgtacgggatcttcgggttattttttagaaaaagctgtcggcagcttacgcctttgccagcagctcggcagcttccagcgctgccgcctcgctgccgcagaccagcagcccacggcgggtgttggcgtgcgccagctgcaccgcctcgtccagactggtgcagagctgggcgtcaaagtgatactttgccttctcggtcagacgccgggtcagctgctcctccacaccggcgggcgtgacgagatacaccttatcaaaggggctctcgctcatgccgggcatggtggatttatcctttttctgttcctcagggctcaggccggtctccagcgcggagaagaaggcttcggcgccctcctcctcggtcaggccgatgatagcgctcatgtggcgcaccttggccatgttcaacacgcgcagcagcgcggcagcctgctgcggggtgcggcaggcatccagaatgaccagcgggcgctgggaaagcacccggatgctgcagcggttgtccacggcggcaatgccatccagaatcgcttcatcggagatgtccacccccttgcggcagagcgccagtgccagctccaccgccatggcggcattgcctgcggcgtgacgccccagaaaggccagcggcaccgtatagccgccgtagtctacccggcttgcgaactgctccgcctccaaaaaggtgatatcctccgggtcgggcactaccagctcacagccacacttgcccgcagccacaaccagctcactgagcaccgccttgggctgctccggcgcggtgacgcagatgctttccttgcgcatcacgccgcctgccaatgcagccagacgttccaccgagcggctcacgccgtccggtcccaccgctgtgacggcgcacaccggcatttttggcagcaccgcagccagacctgcgtccggcagctctactaccgccagcgtgcagccggcttcgccaaagcagtacgcagcggcaacaagctctgccgcctgcaaaggcagctcctcatgggcagcaagggcatcggcggcgcggcacagcagtgcttcgtccaccggcttgccatccacacggatgcgggcagcaagcggctcgcacccggcatggtagacaccggcacggatcccctgcgcgtgcagaatggctgccagcagacgcgccaccgccgttttaccggcagtgcctgccacacccacgaactgcacctgctgcaccgaggcgggcagcagcgcacccagctgcgccgggtcggcaaagccgtccggcagagctgcaaaatactgatttgcctgttggatggtcattcgtatctcctttttatgtgataatacagtccctcgcaggccagcagcagtacaatggcaacaaggatgccggccagaacaccggcagagtccagccacacatcggtgacctgactgctgcgtccttccgaaaagagctgaatggtctcatcggtcagcgccgtcagcacaccacccagcatgggcacggtgatatgccgcagcgggtgacggctgtacacccgcatacagagcatgagcagaaagccctccagcgtatactcgcaaaagtgtgccagcttgcgcacgatgtgcatggtcagatgctctgccagccccggctgccccaagcggcgcaggatgatgcgcatccacgccagcacccggccgctggagtcggtggagaccgttgccaccgccatggagttggaaaagatgaaccagatacaggcgatgagtgcaacggtaaagaccacacgtcccgcaatgacccacagcgaggtgcgttccgtatcgttatagcgttccacagtctcaacccagagccttgatgctctgctcaatgttggccagcttgtcctgactcttggcgaactttgtgcggatttcctccaccagagccgccggggcacgctccacgaacttgggattgttcagctggttgccgaacatggccatttccttttcagccttagccttttccttgttcaggcgagccaattctttctctcggtcgatgagctccatcatggggatgaagccgcgggcagcgtgggtggacacctgtaccatgccatcggtgctgccctcgtacttttcggtaaaggtcacatcggtggcaaaggcgaacttggccagatagacctgtgcgttctggaagggggctgcatcggcagtttcgatgatcatgctggtcttttttgcgggatgcacattcatctcggtgcgcatggtacgcacagccttgatataatccatcaccttttcaaaggcttcctcttcagcggcccagttgtgagcggcgtcaaaggtgggccaagcctgcgtcatgatggtctcggcagagccgggcagagcctgatacagttcctcggtgatgaagggcatgaagggatgcagcagcttgagtgccttatccagcacatacaccagcacacggcgggcggtatcggcctgctgtgcatcgccggagttcagacggggctttgcgatctcgatgaaccagtcgcagtagacatcccagataaagctgttgatcttggcagcagccagacccatctcatagtgttccagattgtcggtcatggcaccggccacctgattcagcttggtcagcacccacttgtcgctcatgtccagcagctcttcacagggcagacccggctcaaagtcctcaggcaggttcatcagcacaaagcgggtggcgttccacagcttattggcaaagttgcgggcagcctccaccttcttttcgatatagcgcatatcgttgcccggggtggaaccgtccaccagcataaagcgcagagcgtctgcaccgtactgggcaatgacctccaacggatcgatgccgttgccaaggctcttggacatcttgcgcccctgactgtcgcggacgatgccgtggatgcagaccgtgtcaaaaggagccttgccggtgtaagccagaccggagaagatcatgcggctgacccagaagccgatgatgtcgtagccggtgaccaaggtgttggtggggtagaaatacttgaggtcggcgctgtcctcgttgggccagcccagcgtgctgaagggccacagtgcagaggagaaccaggtatccagcgtgtcggggtcccgcgtcagctttgcgctgccgcacttggggcagctgcagggagcagactttgccaccacggtctcgccgcagtcgtcgcagtaccaagccgggatctgatgaccccaccacagctgacggctgatgcaccagtcgcgggtgttcttcatccagttcatatagttcttggtaaagcgctcgggcacgaacttgatctcgcccttctccacgctctcgatggcaggctttgccagcggctccatcttaacgaaccactgcttggagaccatgggctcgatggtggagtggcagcggtagcaggtgcccacctcgtgcttgagcggctcaatctccttcaggaagccgccctccttcaggtcggccagaatggccttgcgtgcctccagcgtagtcatgccggcatacttgccgcagtccagcacctcaggctcgttgacggtgttcttgccggcggcaaacagggcatcggcggcagccttgtcggcagcgccggtcatgtggccgtcgtaagtgaacacgcgtacgatgggcagatcgtggcgcagaccgacctcaaagtcgttggggtcgtgggcgggggtgatcttcacgacaccggtgcccttggtcatatcggcgtgctcatcgcagacgatggggatttccttgttcagcaggggcagcaccacatggcagccgtgcagatgggcgtagcggggatcctcgccgttgatggccacggcggtatcgcccagcatggtctcggggcgggtggtggccagttccagcatctcgccggtctccttgaccgggtacagcagatgccagaagctgccgtccttctcctcgtactccacctcggcgtcggaaatggaggtgttgcagtgggggcaccagttgaccatgcggttgccgcggtagatcagccccttgtcgtacaggcgcacgaacacttccttgacagcctcagagcagccctcgtccatggtaaagcgctcgcgctcccagtcgcagctgctgcccagctttttcagctggctgacgatgcggttgccgtacttggttttccatgcccaagcgcgctccagaaaaccatcgcggccgaccatctccttggtcagaccctcggcgcgcatggcctccaccaccttggcctcggtagcaatggaggcgtggtcggtgccgggcacccacagggcggcgtagccctgcatccgcttggtgcggatgaggatatcctgcatggtgttatccaccgcatgacccatgtgcagctgaccggtaacgttcggtggcggcatcacgatggtataaggtttcttgtccggatcggccttcgtgtggaagtagccgccgtccagccagaactggtagatacgatcttccacctgactgggatcgtactgctttgcaagctctttcatagtgtcctcccaaaaatttgatgaagtgggacgcaaaaagccgccccacggagcgttccatgggacggctgtaaatacatgaccgcggtaccacccaaattgcgcggaaggttccgcgccccttgatgcccctgtaacgtagggcagacccgaaagcggcttaccggcaaggctcaccgctcctgctccaaagtgacagtgccccgccggtatcccgccgggttttcagctgcccccggctctctgtgcggtcccagacgatgcacactctttttcaacgcatttataaaaagaatataacgttttttgtgggatttgtcaatcagtttttcaaacctttcacccaccgcaccagcttccatgcctttgcgcccagatgcgggcagtagcttaccatcagcgcctgcagcttctggctttgatttcccggcggaatctcccacgcagcatgacggtgcagctttgctgttttcagcaccattttttccttctcggaatcccgctccggctggttgaccagccggaaatatacctcggcgcaggacatgacgcagcgctgttccgtagtgctgcggaaggggtccggctgcccctttaccagctgccagatctgttcccacgccagtgccgccgtgtaaaagcgcaggctcggctcctgccgcacggcagagcttggacgttcaaggtaagcatacagcgggcagttcaaaaatgccagactgcctgccttgaggaattccgttacaaagaacagggcatcctccccgtagaacagcgccgggtcaaagcggacatcctgcagcacctcccggtgggtcagcatccgccagcagtgcccgccgctccattcctgcatccacgagtagttttccgtcgtgattttctgcggtgccgggcactccgtcaccgtccacagagtctcgttttcccgtatgctgcggtagcggcacatggcaatgcgggtaccgcagctgcacaaagcatcgtacagccattccagatactgcggcagcacaaggtcgtcggaatccacaaagcagatatactcgccccttgcctgctccagcccaaaattgcgtgccgaggacaccccgccgttttccttgcggaaaatacacacccgggcatcctgtgccgcatactgctgcaaaatttcccagcatttatccggcgaaccgtcatccacaaggagcagttcaaaattctgatacgtctgcgccaacaagctgtccagacatgcaggcagatacttttccaccttataaactggcacgatcaccgagatcaagggctgctcctttgcgttcattccgctctccttttcaatatcttcagtccgcgctgcttcagcgtatcatattcttcgctgccacggtagaacagtacgatcactcctgcgaacacagctgtgtaaagcagcccatccagaataaaaataccgaaattgcccaccgggaaccgctgcacccacagcaccgctgccgcagagaccgctgctgtaaggagtgtgcgcttcagatactctgcaaaataatcccgaagtttcttctgccatgcatcctgaacgccatacttcaaaaagatgtagggttctacccaggcacaggtacacagcgtgctgatgatggtgccccagatactgccggtcacgccgtactgccgcaccagtacaagcgaggccaccagattgatgatggattccgccaccgctttgtagcggtcgttccagaacagccccatggcctcccggaacagcagattcgtctgccgcattcgtgtaatgtaaaactctgccacaatgaccatcacggtggtcatcggaaaacagtatcttccgccaaacaacagcgtgataaaggggttaaacagcatcatcagcccgccggtcaggtaagcggacatgacaaagaacataaaatccatttccttgtagattttatacagccggtccgaattttccattactgcaaaattgccgatactgccggaaaaagccacagcaaattttcccatcaggttgttcagtgcattgatcaccaaccggtaattggagtaaaggcccaccgtcgcaaggccaataaaggaggacatcagcagactgtccgtattgcgcacgatgatggttgacagcttgtgcatactcatggcaccgatatttttcaggatgccgttccgttcctccctttctggcagctcatggcattccttcaggtatggaaactccttgtccaccatgcgggaaaccataatgttgggtaaaaactgtatcgcctgctgaaccgccagatacaggatgaagttccgggtcaacagcagcaccgtgatctgcgaaacagtcttgatgcactcgcacgccatactccatcctgcgcagatatagcctttctggtaggcctgatagatggaatttttataactcagcagataggaacttgctgaaccgagcacatatatcatatagatcagggtgatatgttcaatgccctcgccgcccttgatgaggtagggcagaaacggcagcagcaccaacccgaacagcaacaccgagactgccaccgcccggtacatccacttgtacaggttcatcagccgcgccagtttctgctcgtcatcccgggctgccggttcatacatgctgaacaccatagccgtaccgatgcccagctccgcaaaattaaggatgctgagcacatcggtaaacaggccgttgacccccagatattccgctgaaaggcagcggatgaacaccatccggttgatgaaggacagcagcatcgtcaaaaactgcccgccgatgttaaacagcatattgatgatcgaataacgtgttctcatgcgatttttaattctcccctgcctttgatgttccgcagccacatatattcccgcggaaatagccgcaacagcaggctttgcagccagagtcccgccggaacggtacaatactgccgcgtccggtccaccacatcaaactgcatccgcagcatttcctggctgcggggtgccttgcgcagtgccgtgnnnnnnnnnncagctgccggtacacccggctcacgctgcccatcgtaaactttgccgcatttgccagcgcatcgtatacctcgttttccacgaggcagttccaataccgctgtgcggcctcggcagcatcaaaatggcgcagcgttttacttccgttcataatgctgctgccgcgctgcacataataatacagctcctttggcaccaccacggcctttttggtgttcagacagatttctgggagcacaaaaatatcctcgttcagcttaccctccgggtagcgcagctgcgcaaagatagcgcggcggtacagcttgttccacgcaggctgcgccatcgtattcgtggctcttttcagcagttcccgcccggtaaagatccgctgtgcaagcccggtgtacggcggcaggcagggtatgcctgcctcgtccaccgcagcgtaatcgcacagggcaaggtctgccccggtgctttgcacggccttgtacagtgtttcgtacatttccggtgcaatatagtcgtcggaatccacaaagccgatccactcgccccttgccacatccagcccggcattgcgggcagcagaaagcccgccgtttttctggtgaagcacccggatgcgggcatctttcgcggcagcggcatcgcacagcgcagggcaaccgtccggcgaaccgtcctccacaaggatcagctcaaagtccgtaaaggtctgtgccagaatggaatcgatgcatttttgcagatagttttccaccttgtacaccggcacaatgatgctgagcaatggtttttcgcagggcacagcgtgttcctcccgttttatcttttcagcccgtcacctcggtgcgcaggcgggcaatgagccgttccatcagcgccacccggttgaagggggtcatcaggtaaaagccgtctgcatagggcgcagccgctttggcagcctgcactgagacttccaatcccagctcctcgcctgcggcgcggtccagcccttcaaacttctggatgatggcatcatccacatggatgccgttgacctcgttttccataaagatggcattgcgctggctgaccaccggcaggatgcccgccagaatttttgcgcgctcacccagcgtctcccgggcttttttcaggttttccaccgcctgtgccgacagcaccggctgggtaaggaagccgctcatgccgttttccagcttttctgcggcgcggcgcagctctacctcaaaattgcgggcgttcaggttcagcgcaccaaaaaccgtgatgggtgcgggcatctcccgcccctctccggccagcgacacgatatactgtgccagcttgcgggagttgaactggtacacatttttcacctcgtcccgctcggcggtgggaatggggtcgccggtaatagccagtacctcccgcacaccctcggcgtacagtcccagcagcagcgccttggtggcattcaggttgcggtccctgcaggtcatgtggggcagcacgttcatgcccagctcccggtgcacccggcaggccaccagcgaggaatccatccgcgcccgggcaatggggcagtctgcaatggtcagcaggtcggcaccggcggcctgcaggcggcgggcaccctcgagataggcggtcaggtcggcgtccttgggggagtccagctccaccgcgatgacccgctgtccggtgcgcagcttgcgcaagaaggcatcgtccgtttccactgcaggctttgccgctgcagcgggctttgccgccggggcggcgggcagcgcttccggcagagcatccagcgcggcgcgcagggcagcaatgtgctgcggcgttgtaccgcagcagccgcccagaatgcgcacgccctcggcggcaaggcggctcagctcccgggcaaaatactccggcttgccctgatagcgcacctgtgcccgcgccaccaccgggtagcctgcattgggcatgaccgaaaggggcagtcccgcatcccccagctgctgcaccagtgcccgcatcgcacccggggcagatacgcagttcaggcctacggcatccaccacgccgctctgcgccacgcggcgcacaagttcggcgcagtaacggccctcgcgggtgtagccgtccggcagcaccgcaaaggataccagtacaaaggcctccggcacggtctgcttcagcgcacgaatcgcttccagcacaccgtcctcggcgctcagggtctcgaacagaaaattccgtgctcccagcagggcaaagcgctttgccacagcaagatacacctgctccgccgggagattttcggtgtccggcgcagggccaaggtcggcaaacactgccgcgccggtctccccggcggcctttgctgccaactgccagcctgcatccgccagctgctcccagcccggctgctgtgccgctaccagacgcggcaggctgaaggtattggtcttgatggcgtccgctccggcggcaagatacgcccggtgcaccgccagaatgccctcggggtcagtcaggtttgcctgctcgcactcctgccccggctttgctttataataggtacccataccgccatcgaacagcagcggccgctgggctaacagtttgcgcacatctaacatcgatactttccctttcctataaaaagacttcatctttcagtttatcgtagttcacccatccggtcaagcggttttcttgatttcgcttgcagcgtggccgtttttgtgctatcttagggataacttttgagaaaagggagaggatggatcatgcgccacaccggcacacctgaactggagaccgaccgtctgctgctgcgccgtctgctgccgcaggacgccccgcagatgtacgaaaactgggcaaatgacccggctgtgacccggtttttgcgctgggaaccgcacaaaagccccgccgagacccgggaactgctttcggcgtgggcagagttatatccgaacccggattattaccagtgggccatggtagaaaaggccaccggacaggtgtttggctccatctccgtatacaacgccctgctgggtgagccgcagcaaaaggccaagtgggcggagttggatctctccggcggcatctgggagccgggctactgcatcgggcagaagtggtggggcaagggccttaccaccgaagcactgcaagctgtggtggatttctggttcaatcaggtgggcggtgccttcctcacctgctgccatgcggtgcagaaccccgccagcggccgggtgatggaaaaggccggctttgtgtaccatcacaacgacgtttaccacaaatttgacggcaccccggtggaatgccggtgctatctgctgacaaaagaacgctacgataacagaaaggacttactttgagcgagctttatgatattctgaccgagacccctcccacaaaggtagtgctgctggcactagatcaggggctgtgggactgcgagcgcagtctggcagaactttctgccctgtgcgaagccaaccacatggaggccgtggcgcagatcacccagaagcgccagaccccggagaccggcatcgtgctgggcagcggcaagctggaagaggcttcccttgccgcccagacactgggcgcggaatgcgccgtgtttgacggtgaactgaccggcagccagatccgcaacatctccaacgcgctaggtgggctggaagtcatcgaccgcaccatgctgatcttggaaattttccgcagccgcgccgtgaccaacgagggcaagctgcagaccgaactggcgctgctgcgctaccgtctgccccgcctgcagggcatgggcgaggcgttgagccgtcagggcggcggcgg

SEQ ID NO: 312 - DNA, 26539 bp, unidentified
  source 1..26539: mol_type = unassigned DNA
aaggaatggcatattgttgaaaacgctcatgaagcaatcattctaaaatcggattttgaaaaagtgcaggcacggcgggagcagaataaggaaagacgggaaagggcgatggctcgttccaaagcaaccagagagaagtgttataaccatctatcgggaatggtttactgtggctgctgcagacgcaacatgacgtttgaacggcgtgtgcatggtacggtgaaagaaacgcactatggagtgttcatttgcaaaagaaagaagaacacgactccctgtgcctatcatgcggtgccggagaaaatgctgatgatggtggcgatggatcagattcatcatctggtgtctaccatgtgtgaagaagaaaagctggtaaaagacatgatgcgcggcagcaatctggattctgcccgttccatcaagatgaaagaaaactctatcctgtttcggattcaggaagccgaagaacggcggttgcgtttatatgaggactataaagctgaaattctggacgaagatgaatacagtcagctaaaggaacactacatagcagaaaagcagcggttggaacatgaactgcaaaagcagcgtcagtgcgcattggaactggaaaagagaatcaaaatctgcgatgcgcagatggagcggatgcgcgggattctgaatcaaaatgaatttgatgaagaactggtgcatgaacttatcaagagaatctatgtgggaatggacaattctgtggaggtcgaatttaagtgcagcgacccctatcaggaagtgcttgcaatcatgtcggaggttcagaatgaatgataaaattgcaatctatctccgcttatcattggcagacggagatttgaaaaagggcagcaaggatgaaagtaacagcattgagaaccaacggatgctgctccacgattacattgggaagcaggaagatttatttggcgagattgtagaatatgtagatgatggctatactggaacaaattttaatcgtccggcttttcagaaaatgattgtggatttgaagcagggcgatataaaagtcatcatggtaaaggatttgtcccgccttggtcgtgactatatcggtgttggcgattacattgaacagatttttccgttgatgggagttcggtttattgctgtgaataattcctttgacagcatgaaactgaacaacggaacgccgggaatcgaagtggcggtcagcaatctggtgaataatatgtatagccgggatattgcgaaaaagattcgggctgctctggaaacgaactggaagaacgggaaagccacctgcacgaatgttccttttggatatgtgtggaacaagaaaggtgggcggcggtgggagattgacccggaggctgcagtctgcgtgaaaaaagtatttgaattagcattgtccggccgcaatacaacgcagatcgcctacggcatgaacgaattaaatcttcctacgccgggattgtatgcgaaacgaaagaatctgctgatgggcagcaatcctattattgccccggacagtgaaatgttatggaacgcggcaatcgtgtggagaatccttagaaggtatgaatacactggtgcgttggttatggggagaagaaagaaaattgatgtgaatactacctctgttcggacgctcccggaggataagtggatcatcgcagaaaacgctcatgaggccatcgtgacaaaagatgaatactaccaggcacagaaagcaatccgtaacgtaactccaattcaatataaggtgggtgatgattttgcgttaaaaggaaaaatctgctgcggaaactgtaatcggcagcttcgccacgaaaggcaatatggggaaatggttttctattgcggctataaacggtcagccggaaagttctctaaatgctacggcggctattacagagaatattcggtgaatgcaaaagtggctcgtgcgataaaaacagtattctatgcgctggatgtggtaaatcagggaatgcaggaaaagcagtctatcacggtgcgctgcatggacattgaggacttggaaaagcaagcggaagccattcgggtagagcaaatcaaactatatgaatcgtatgcggacggtgtgctgcggcgagatgtgtacatagaaaagaaaaagatcctttcggaaaaactggctgcattgcaggatagcatacagacagaaaaggaagaacaggagtgcgccgatgaactggatgaagaaatccgtgctctgacaaaacaggccagtgagaaaacgtatataggcgggctgacaaaagaatgtgtggatgcctttgtgagcatggtctatctgtacgacgaccagacgatgaagatagagttcaactgtgaggatgtgattcggagagcgttggaaaagtatggcgcataattggatggaagaagtggcataagaaaaagaatacccgtctgggtgagaggattcggaaaatcttctcgaccaggcgggtatttcattccgcaggaatgtgtctattagaggctgagggtttctacccatgcggacaagtcggctttgctggagtaggcattgaataccttgccgtgcaggagtttggcaccggggcagctcgacgcaagtttttcattggtcttacccatgtcgctaccgccagatgtggcaaaggggatgattgttttacccttcaaatcatagctttccagaaatgtattgatgatcgtcggagcaatataccaccagatagggaatccgacaaagatagtgtcgtattcgtccatgttatcgcgcttggtggcgatggcagggcgagaggtagaatcgctcatttcgatggtgctgcgggatttcttgtccatccagttcagatcggccttggtgtacggaacctccggctgaatctcaaaaatgtctgcaccgatagcatcggccagattttcagcaacctttgcggtaacgccgctggcggagaagtaagcaacaagtcgtttgctcatgacaaatgcacttcctttgattgattttcatagtttaagtatagcacgttgaatagggcgcatcaagtaaggatgaacggatgaatgtgctaatattacaaatgaaataagcacaaaagaaaatttgcgttgactttcgtgcttatttggaatacaatataagcacgaaggtgaggtgacgcgtataatgaacatgaacaatttggctcagacacatgagattttaacaccgcagcttgcaacaaaagtaggtttaacgaaatttgagttttataaatatgtaaaggccaatgaatacgaacaagtcggacatggcgtatacgcagcaaaagatacttggattgacgaattagaaatgctgcaccgccgctgcccgatgggagtgttttctcatgatgaagcgttctattattatgggctgacagatcgggaaccgcttgttcatacgctcacgatttatagtggatataatgctcaccgcttaaaagaggatggctataaggtttatacagtaaaaaaagaactccttgatgttggcaagcgcacggtaaaaagcaatcaaggaaatgaaattcctatgtacgatttggaacggacaatttgcgacttggtgcggagtagaagttctatagaaatacaggatttcaatgcagtattaaaagcgtatgtcgggagaaaagataaggaccttaataaactgatgaagtatgcaaagctatttcgagtggataagatcatccgaaattatatggaggtactactgtaaatgggatttacacctgaacagataaaagggcgtatcaagagcgttgcaaaacagaacaatgcagacgcaaggacactcatgcgaatctatatgatggagcgttttctggaaagactggcacaatcagaatatcgggataacttcattatcaaaggcggaatactggttacggcaatgattggtgttgcgcaccgttccacgatggacatagacaccagcatgaagaatctaaatctgtctgcggaggatgccttgcgagttgtcaatcaggtcaaagatattgaccttgacgatggtgtttcttttgaggttaaagatgtttccaatatcatggatgaaatggagtatccgggaatccgcgttaccatgaacgccaatgtgggaagattgattacgcctttgaaaattgacatttccacgggcgacgtgattaccccacgagcaatcgagttcaattatgatctcttgctggaagatcgttctatcagtctatggtcgtataatttggaaactatattagccgagaagttgcagacggttttggcgaggggtatcttaaacacccgaatgagggatttttacgatatacggatgctgctggatacatacgaagataaagtcaataaggctgtgttaaaagatgcttttgcggcaacttgcaaaaagagagggacggatcatctgcaggagcaggccgaggagattatcaaaattatagaagcagatgaacagcttcaagtgctatggagagcatatcagaagaaatactcgtatgcagcagatattgattatgccagtgtaataagcggtgtaagaaaattaatggagataagtagctattgaaaatttgaaaatagaatagcgagtaaagccctacaaggctcaggtcggttcagaactgactgaaagccttgtagggcttatttttttgcgatttttttttctaaaaaattttcgcccctatcttgacatcagggggttatgttggtttgtcgattgccacattgctttctcagcaccatcaggtgactgctgtggatatcatttcagagaaggtggacatgatcaacaaccgaaagtctccgattcaggatgactatatcgagaagtatcttgcagagaaagaactgaatttgaccgcaacgctggacgctaagaccgcatacgccgatgctgattttgttgtcattgcggcccctaccaactacgatagccatacccagcactttgacacatctgcagttgaagctgtgatcaagctggtcatggaatataacccgaacgccatcatggtcattaagtccaccattcctgtgggctacaccgcatccgtgcgtgagaagttcaatagcaagaacatcatcttcagcccggaatttttaagagagagcaaggctctttatgacaatctttatccttctcgtatcatcgttggcactgatctgagtgacgagcggttggtagaagcagcgcacgagtttgctggtctgctgcaggaaggcgctatcaaggagaacatcgacactctgttcatgggctttactgaggcagaggctgttaagctgttcgccaatacatatctggccctgcgtgtggcttatttcaatgaactggacacctatgcagagagcaaggggctgaacaccaagcagattatcgacggggtatgccttgaccctcgtattggcagtcactacaacaatccgtcctttggctacggcggatactgcctgccgaaggataccaagcagttgctggctaactatgcagatgtgccggagaacctgatcgaggctattgtcgagagtaacagaactcgtaaagatttcatcgctgaccgcgtcctaaagctggctggttactacggctatgatgcagaaaacgagtttgatgaagacaaggagaaaaaggtaacgattggtgtttatcgtctgacgatgaagagcaacagcgacaacttccgtcagagttctattcagggtgtcatgaagcgtatcaaggccaagggtgcaacggttgtgatttatgagccgactctgaaagatggcgagacattcttcggatcggtagtggttaatgatctggataagttcaaggaaatgagtcacgccatcatcgcaaaccgctatgacaagtgtctggatgatgtgaaggataaggtttacaccagagatattttccagcgggactaagaagtaaagtacagccgatgaggagattattatggatattaaaaaggaatacgagcgctggctggcaaatgccaccgccgacgccgatgttgtggcagaactgaaaacgctggacgatgccaaaatcgaggacgcattctaccgtgaccttgcctttggtacgggcggtctgcgcggcgtcatcggcgcgggcaccaaccgcatgaacatctataccgttgcaaaggcatctcagggtctggcggattatctgaaaaagaattttgccgagccgtctgtggccattggttacgacagccgcatcaagagcgatgtgtttgcaaaggtggctgcgggtgtgttcgcggccaatggcgtcaaggtgaatatctggcctgtcctgatgccggttcctaccgtgtcctttgcgacccgttatctgcatacctctgccggcgtcatggtgaccgcttctcacaatcccagtaagtacaatggctataaggtctacggtgcagacggttgccagattacgaccgaggccgcagcggagattcttgccgagattgagaagctggatatctttgccgacgtcaagaccagcgattttgaagcaggtgtggcagagggcagcatccagtacatcccggatgaggtctacaccgcattcgtggaacaggtcaagagccagtctgttctgtttggcgaagaagtcaataagaacgtggctatcgtgtacagcccgctgaatggcaccggtctgaagcccgtgacccgcaccctgaaggagatgggctacaccaacatcacggtagtcaaagagcaggagcagccggacggaaacttcccgacctgcccgtaccccaacccggagatcaaggaagccatggcgctgggtatggagtatgccaagaagtgcaacgccgacctgctgctggcaactgaccccgactgtgaccgtgtgggcatcgccgtcaagaacaaggcaggggagtacgagttgctgaccggcaaccagacgggtatgctacttctggattacatttgcagccagcgtgtgaagcacggcaagatgcccgccaacccggtcatggtcaagaccatcgtcactatggacatgggcgagcagatcgctacccattacggcctgcgtaccatcaatgtgctgaccggcttcaagttcatcggtgagcagatcggcaagctggaaaagcagggcaaggcagacagctatgtgttcggttttgaagaaagctacggctatttgaccggttcctacgtccgcgacaaggacggtgtggacggtgcttatatgatctgcgagatgttcagctactatgccaccaagggcatcagcctgctggacaagctggacgaactgtacaagacctatggctactgcctgaacaccctgcacagttatgagttcgacggcagcgctggttttgctaagatgcagagcatcatgcaggcattccggggcggcatcagggaatttggcggcaagaaagttgtgaagctgctggattatgcaccggggctggatggtctgccgaagtctgatgtgctcaagttcctgctggaagataactgctccatcgtggtacgcccctccggtaccgagccgaagctgaagacctatatctccgtcagtacggaaaataaggaagctgctgaaaaggtagaggcagagatttgcaagagtgcagaagagtacctgaagtaatagaaaatctatagatggttgtataggagaagaatatgaatgttattttactttctggcggttccggtaagcgtctctggcctctttcgaatgacgtgcgcagcaagcagctgatcaagctgtttaagaataatgatgagtacgagtccatggtgcagcgtgtctatcgccaaatcaccacggtagatgctgatgcaaagattaccattgcaaccagcaaatcgcaggcaagtgctatcaagaatcagctgggcgaaaaggcatctatctgtgtagagccttgccgccgtgataccttcccggccatcgtactggctgctgcctatctgcacgacgaactgggtgtggcagaaaatgaagctgttgttgtctgcccggtcgacccctatgtggataacacttattacgaagccgtcaaaaacctgcaggaactggcagagcagggcagagcaaatctgaccctgatgggcattgaaccgacttatcccagcgaaaagtatggttacattattcctgaaaacggcgaaaacgtcagcaaggtcaaggagttcaaggaaaagccggatgtggaaactgccaagaagtatctggcacagagcgcactgtggaatgcaggcatctttgcattcaaacttggctatctgctggacaaggcacacagcatgattgacttcgaggactaccgtgacctgttcaataagtatgaaattctgacaaaaatcagctttgactatgctgtggtcgagaaagagtccagcattcaggctctgcgttatagcggagactggaaggacgttggtacatggaatatgatggctgaggttatggcagacaagaccaagggcaaggctgttctggatgaaacctgcgaaaataccaatgtagtgaatgaactgaatatcccgattctttgcatgggctgcaaggacatgattattgcgtccagcggtgatggcattttgattgctgacaaagagcgcagcggttacatgaagccctatgtggagaaaatcgagaccgaggcaatgtatgctgagaagtcttggggtagttatacggtcatcgatgtgcagcccggctctatgacagttaagatttccatgagagcgggtgagcacatgacttaccacatgcataactaccgtgaggaagtctggactgtcgtttctggtaagggcaaggcagtcgtagacggcatggagcaggtgctgcgtaccggtgatgtaatcaccattgcggcaggctgcaagcacacggttgaggctatcactgcattggacatgatcgaagttcagcttggtgatgaaattagcgttgctgataagatcaaattccccatggtgtaagaacgaaggggtgatggctatggaaatcatgaaattgattccgactggaaaggactatctgtgggggggcacccgactccgggaagaatacggaaagcaaatcgatttgaccccgttggcggagacatgggaatgctctgtacatccggatggtcccagttatgtggcgaatggaatctataagggacaaacgctggcagaggtgctgagtgctcacccagaatatcttggtacaaaggtggaaaacggagaactgcctgtattggtgaaattcatcgatgcaaagaaagatctgtctgttcaggttcatcccgatgatgcatatgcacgagagcacgaaggcgacaacggtaagaccgagatgtggtacgttgtggacgctgacgaaggtgcacacttgatttatggctttcaacacaaggtgaccgaggaaattcttcggaaagctgttgaaactggaacattggataagcacctgcaaaaagttgaagttcacaagggcgatacttattttgtcccggcggggaccgtacacggtattggaaaaggtattctggtggctgaaatccaggaaagctctaatgtgacctaccgtgtctatgactatgaccgtgtggataagaacggaaaaaagcgtgaactgcactttgataaggctgttcaggttatggatatgaatgttgagccggatgtgagccagaaaccgagaattgtgaaatactattctggttgttctcgtgagctgctctgccgctgcaaatattttgaaacggaacggattcaagtcacaaagggctttgccttttctgtaatggatacctcttttcaggtgctaatgtgcctaaatggatacggtgaagtacagacaatggatgcagagcagaagccgatgcgattcagcaagggagaaacattgtttttgccggctggaatgggcagatgtttggttgttggtgatgcagagttgattaaagttcggtgctaaaagcagaacgatagtggagaaattatgaagaaaatcttacatatttcaaaatactattacccattttctggaggaacagaacaaatcgcacgtgattgtgttctggcgttaaaaggggggtatagtcaaaaagtaattgcgtttaatgatggtaaagaagacaaggtagatattgttgatggagttgaagtgataaaatgtggctgctttacaaagattgcagcacagtcgctgtctacttcgtatgggaagcaattacatagagtaatgaaggaatttgatccagatattgttgttttccattacccgaacccatttgttgcgtccctactgttaagggaaatgaaaaacacaaaagcaaaacttgtggtgtactggcatcttgatattgttcgccagaaatacctgaagctcttatttaatcctcaaaatagaagcctgcttgcacgtgcagataaagttatcgcaacatctccaaattacatagaaggaagcaaatggcttcaatctgtaaaagacaagtgtgttgtagtgccgaattgcatcaatgtggagcgaatgactatcacaccagatatagaaaaacgtgcaacaaaaattcgagaagaaaacaaggacaagacaatatgtgttgcagtaggtcggcacactgaatataagggattcacctatttgatacaggccagtaagttaatagatgatcgattccgaatttatattacgggtacaggagaactgactgaaaaacttcacgaagaagcaagaggagacaataaaattacatttacaggccgtattgatgatacagagctgaaagcattgattctcgcctcggatgtgttctgcttcccttcaatttcaaaaaatgaagcatttggattggcactggcagaaggtatgtactacgaaaaacctgcagtaacatttacaattcctggctccggtgtcaattatgtcagtttgaatagagtcacagggattgaagttgaaaaccgtaatgttgaaaagtatgcagatgcaatgcagacgctcgctcagaataaagaattgtgccttaaatatggtaaggcaggaaaagagcgagttaaaaacaattttttgtcaacacagtttagtataaatataaatacagtaataaatagcctttgagaatggtatggattaatgagaccaattattataaatggcagatttttacttcatcgaacaacaggagtggaaagatatgccagagaaattattgcggaactggataaagctattccggcgggatctataacgatggctgtccctccagaaatagaaaatgtgccagtctatcagaatatcaaagtaataaaaacaggaaaattcaaaaatcggctatgggaacatatttcttttccgtggtatgtgcataaacaaaaaggaatctccctaaatctgtgcaatgttgctccattgccgtcaccgggcatagtttgcatccatgatgtgaagattaaggcaacgccacagtattttagtaaaaaatttcgtctatggtacgaaattttgtttggaaatgctacgaaaagagcaaagaaaatcattacagtatcggagttttctaaatccgaaattgtgaagtatttcaaagttgatccggataatattacggtgattccaaatgcatggcaacattatgaaagaatcggatatgatgaaagtgcacttagtacatatggtttggaaaagaacaattactatttttcaatgtgtagtttagaaccaaacaaaaattttaaatggatagcagaagaagcgagaaaaaatgcagatatgaccttcgcggttgcaggttccattaacagaaatgttttctccgaagggcttggctttgaactgccacctaatatgaaacttcttggttttgtcagtgatgaagaagccaaaaccttaatgagagattgcagtgcattcctttttccgactttctatgagggatttggtatccctccgctggaagctattagcgcaggagcaaagcaagtggtggtttcggacacacaagttatgcatgaaatatttggtgatggtgtgatttacgtggacccgagtaactacaatattgaactgtcagattttccggaaatatcggagacacggatttctgagctgctgaaaaagtacagctggaaaaaatcggcagaaactttgttgaagctgctgcaaaatattgatcaggggttagataaatgaagataggcataaatgtttcggtgctgaaagcaggagaaaacatatctgggatagggtattatacatataggatcgtcaaagaattgttagataacgatacagaaaatgaatactacttattcagcaactgtgagatttccgttcattttccggagaacagtagagtgcataatatattgtatccctgcaagaatcgcctgctttggtcaaggtatcttctaggatggcaaattcggaagttgaacctggatatattttggtcgcctacccataatctgccatttgtaaagcaaaaaaaaacaaaatactatatgacagtgcatgacattgcaaatcatattctggaaaatatttcgcagagcaaaagtagccagcaaaagtatctgagactcattcttgaccattcctgcaaaattgctgacagaatcattgttccgtcaatcgcaacaaaaaatgatcttgtagagcattttgacgttgaccctcgaaaaatttctgtcatttacgagggcggagataaggaaatcaacgtaaagccagcaggtgaacaggaacttaaagaaaaatatcagataaaaaagccatattttctgtatgttggaacactccagcctagaaaaaatattgaaacgatcgtcaacgcatttttgtgccttgccaaagaaaagttaacatcgcagcttgtgctggcaggtggaacaggctggggcatggataaagttcttgaaaaaatacaaaagagcgaatccaaagaccgtattgttctgacaggatacgtctcagaagaggaaaaggccggactttacaaaaatgcggaagcatttcttttcccatcgctgtatgagggctttggaattccgattttggaaagttttagctatggtataccggttattactgccaaaaattcttcgctgccggaagttggcggggatgcggctatctatattgaaaatgtcatgtcatctgaggaactggaagaacgtatgaaaatggttcttggtttaagcgaggccgaccggatttcattgtcggaaaaaggagttcgtcagtttaacagatttacgtggaaaaaatgtgcgagagaaatttctaagcttttttgcggaaaaacggtttgaccggcaaaggaaatccgacagtgcttgaatacataaaacgatagggcaattataatgattgaaacagctactctaacttggttctcaggaaattacggatcaataatgcaggcattcgcactgcaaagaacggtaatggaattgggatatggcaaccatatcatcaattatgtacccaataagtgggaaaaacttgcgtttttttgtaaaagctcagccagatttgtgacgcttaaagcgaaaattgaaaacaggaaaattgaatccaaatttctaaacagagaagaaattgatttcaaaaataagaagtttgaagaattttataaaaaatcgcttgctctcacagaaatgattccgacacagaaacagatgcagagtttgaacggtcagtatcgtatatttttgtgtggaagcgatcaaatatggaatccgaattatttcaagaagtgtaatttcttggattttgtttcagattcaaatcaaaaaatcgcgtatgcaccaagcgttggcacgacacagcttgcagaaaatgaaaaaagtcaaatgaagccatatctgaatcggtttgataaaatttctgtaagagaagaatctagcaaaagtctgatagaaagtgttgtagacaaaccagttcaagtggtttgcgatccggtgtttttgctgcccagagaaaaatggattgaagatatgcaattaaaatcgccggaagaaaaatacatcttgtgctattttctgggcgataatcctgaatatcagaagacggtcgagaagctgagggacatcttgaatataaaagtcaaagttattccaacaaatacatttggctatactcttggctttgaaacgcaaaaaactgttggaccgaaggactggctcagtttgctttatggtgcggaatttgtgctgacagattcttttcatgcaacggcattttccattatttttaataagagcttttatgttctgaagcgtttttcggataccagtcctaaatcacagaattcgagaatatatcacctcttgaacatgacgggacttgaggatcgtatctggcagaatacaacgaatgtaagctacatcgaaaatgatacatggaagactgttaacgagaaaatgcggacggaaagagaaacttctacattgtggctaaaaaatgcactagaggataagtaaatacagaaaacaatctttcaggaaatgggataaatgaaattatttatgaataaaaaggattgctgcggttgtgcagcatgtgtgaatatatgccctaaatttgcaataacaatggaaaaggatgaaataggacagtattaccctcgtatcaatgatacattatgcgttgactgtggggcatataagcgcgtatgcgattttcagagaaaagatgaaaaccggtttggacatcaggtgctgtcggcttatggtgctgcatccaagaatgaaagtctgataaaaaaatctgcttccggcggcatgtttgcgcagttggcagagttttttctggaaaagggtggtgttgtctatggagctgcaatgttgcaggaagacaaattgcgggtaaagcacattcgtgtggaggatcagacacagctttatctgattcaaggttcaaaatatatccagagcgatatcgacgatacatatcagaaggtaaaacaggacttggtaaaaggaaggcaggtcctgttttctggcactccgtgtcaggcagcagcgttgagaagttttttgaagcgagattacgaaaatcttattgttgtagatattgtctgtcatggagtttccacagcgcagatctttcaggattacataagttttcttgaaaaaaagaaaaatataaaaattacaaattttgcatttcgggataaatctgttggctggggcttggatgcaaaatatgaatacttaaaaaagagtaaactcaagacacaacggctgtattataaactgtcttcattttacaattactatttgaaagcttcaacttatagagaaaattgctaccactgcaaatatgcttgtccgtcccggattggagacatcacattaggggatttttggggtgttgagaaaaatcagccggattgcctgcgagaaaatggcggaatatttgatgagaaaaaaggcatctctttctgtctggtaaactctcagcgcggtgctgaattatttgagaagatttcgtctaagataaattatgttgatagtgattttgaaacggtctctatgcagaatgggaatctgttaaaaccgacaactatgccgccaagcagaaatgagctcatggatctttataagcaaaatggctatgaggcagtagaccggctatactggaaaaaaatcggttataaaaagatatattactttattctggcaaaggcaccaagagatttgaaaaagaaaattagattattagtgaagaaataaggaatgcagatatgaaaattttattggttaatacttattattatccagagatatatggtggcgcggagtacagtgtaaagaaattggctgaggaattaaagcagcagggacatactgttaaggtcttgtgtacgggcagtgaagcgaaacgtgaagtaattgacgggatagatgtaataagggttgtatccaaaaatttatgccggggatgtgaagcagcaaagtatcctttgtataaaagggtaataaggcggaccttggacatttggaatccgtttaataaggcggaaattgataaagtattggaagaatataagcctgatgttatccatacaaacggattatatgacctttctacaattgtctgggaagctgcgtataaaaagaagattaagatcgtgcatacattgcgtgattatcacctgctctgcccattcacctctctccattgcagcaaagtggaggatgagtgtccttatgtgccgcctaaaggattttgtcggatgcacagagcaataaatagggtaaaagctaagtatgttgatgttgttacagctccgtccagtgttacgctgaatctgttgataaagaaccaattttttacttcgagcgaaaaaaaggtggttccgaatgcaacggaatttgatgcttcagaaattaataaactgttagcaagaagaaaaaatgcagaagctcacaccctgaaatttgtttatctgggaacattaagcaaaccaaaagggattcagtggatgatttcatcttttaacgatttgtcacaaaatgctgaattgtatatcgctggaaaaggaaaattacgtgattatgtggaagaacaggcgaagaacaataaaaaaattcattttgtcggttttttgaacgagacacaggtcgatgaattgctaaaagagtgtgatgttttactttgcccatctcaatggcaggagccttttggccgagtggtgttggatgcgtataaacatgcaatgcctgtaatctgtagtgatcagggagcacttccctcacttgtggatgatggaaaaacggggtttgttatagaatctggaaatcaaccggctttgacagctgcaatgcagcattatatagaagcagtagacgacatttgcaaacatgccgcaatgggagttgaaaaactaaatttgtattcgctggaaaatcaggcaagggccttttgcgaaatttacgaatgatgtaaagtaaagtttcgtatctttacacacaacacaatcgatttttgtcactcttgaacgcagaactagcaagttgaggagaccagctattaaaagaaaggaaacgtgtgataattaacgctttaattatcatgcaagataaaacatgagtattattgctgtaatactggcttcaagtttggcagtattatcttataaaattgaaaaaagactctataatccagtgacgctcttttgcgggatttgggctctggtcatattatttgcggctttacatttatatggaatgaaggaagcttcagattatgcgtattcgattatgactctgggcatcgtttgtttttcatttgggagttatatagcattgtcaattcgaaaacgattcagaataagtctgattcgaaaaaggcagtcaagcaatgcatctggaaattataatattaattatccggttgtatatgtggtaggtaccattgtacttgtttatcttgttgtcgaaagtattgttgctttttttgcatatcgcagtggtattcagatgaacgaattgcgttcatctatgatgggatattctacgacgggttacgcaagtggaatggctttgctacggcaaggtccgcttgcgttgatctattcttttgtatttttgccgggcttctattcgcttcttctagtaacaagtgtggatgtcattattgggcaaaagcgcaaactccttattgtaatgagtgtagttgctgttgtactgaaaaattacgcagaaggatcaagaatgtgtttgacgcatcttgtactgtattttacccttcttctgttgatttataagaaaggagctctgtccccaaaggcaaaaaaatggattaagagaacagttataataatcattattggatttctggttgtgtcaaatattcgattttctgaatcagaaaaaacaatggcgcaacagttatatatgtattttacttgtacggtgccgctgtttgattattggctggaatttgaaaaagcaacaggagctcatacgtatggagtggtgtcgttgcttggacttttaaggctcccatgtaatatcctgaaaatgattggaatcacatttccaacggtgatattgaatagtgcaaatgaaattgcagtcaactgggactcgtttgtaaatataggacccgaattgaactataactcttatgttactttgtttttgtatttttataaagacgcaggtattattggcgtgattataggatcgcttttatttggatttgtatgtggtagagcgtataaaaacttaaagcaagaggtagcaaagggaaaaacgccacttcgtttaacatatgtctatgtgttgcttggctgctttataatacagtcgtatataagatttttcttttcacgaaccgactatgcaatgatcttatattatgcacttattttcttcaagaaaaataaagaacaatcgttggagacagtagaaaatgaaaagtatttatcgtaaagagagaaagataaaatgaaaagtcaaaccagtattaaaaagaattttatctatcagatgatctatcagatcctgattattatacttccttttgtaacatcaccttatattgcaagaacaattggtgctgaaggacttggaacatattcatacagctattcaattgcatattattttgtgcttttttccatgcttggccttgcaaactatgggaatcgggcagttgcacaatgcagagataatcagaaaaacctgaacgaaacattttctaatattgtgacattacatatagctttttctttcatttgctgtgtggtgtatattttgtatgtgttttttctggccaacgaaaaactgtatgccggaattcagtttgcttatgtgctaagcggcttatttgatgtgagctggttctattttggaatagaaaaatttaaattgacagtaacaagaaatatcattataaaaatattgaatgttgtttgcgtatttgtttttgttagaaatgcgaatgacctatggaagtattgtgcaattatggctgccggtatgctgataagccaaatttctttatggttccctttaaataaattcgttgcatttcaaaagccgacgtggaaaaaaatgaaaccgcatatcgaaccgcttctgatcttatttattccagctattgcagttagtttatataaatatatggataaaatcatgattggtgcgatgagtaataaggttcagcttgggttttatgaaaatgcggaaaaagtaattaatatcccacttacaatcattacgtcatttgggacggtaatgcttcccaaaatgtcaaatctggtggcttctcacaatagggaaaagacaaatcagtatatatcgctgtcaatgaaatatgtgatgtgtttgtcctttgcactggcatttggcttggctggaattggaaaggtttttgcccctgttttctggggtcaggaattcatgctttcgggtgtgttgattatgggcctttcgattacgattccttttatgtcgtttgcaaatatcattcggacacagtttttgattccatcagaaaaggataaagaatatctttcttctgttattggtggggcagtagttaatctaattgcgaatacgctactgatttcaaaaattggagcagttggagcaacgattggtacaatacttgccgagatttttgtttgtgtgattcagacgttgagcgttagaaagaaactcccggtactacgttatataaaaagtatatggatgtttgttgtttttggagtggctatgtttgtaggggtgttctatatcggaaatgctctggaaaacaaagtgtcaacattgttcctgcagatcatctgtggaatgctgatatatggaacagcttgcgtgatatattttgttcacacaaaagatgagatgattttaaaaatgctaagggggataaaaggaaaaatcagataatatctggaacggacttatatctgaggttcgttgagacgttcaaaggtatggaaagaagaaataaatgaaaacaacattacttatcatgacggccggaatcggcagccgatttggaacaggaataaaacagttggagccggtcgatgatgctaaccatatcatcatggactactcgatccatgatgcgattgaagcaggcttcaaccatgtagtatttattatccgtaatgatatcgaaaaggagttcaaagaagtgatcggcgatcgtattgcttctatttgctcttctcataatgtaactgtagactatgctttccaggatatcaatgatatcccgggaactctgccagaaggccggacaaagccgtggggaaccggtcaggctgtgcttgcggcaaagaaggtcatcaagactccgtttatcgtcatcaatgcagacgattactatggaaaggaaggcttcaaagccgtccatgagtatttggtgaatggtggcaagtcttgcatggcaggctttgtgctgaaaaacacactgtccgataacggcggcgtgactcgcggtatctgcaagatggatgaggaagacaacctgactgaggttgtggagaccaagaacatcgtaaagactgcagatggagcagaggcagacggtgtggttgttgatgtgaattctttggtttccatgaatatgtgggggctgactcctgatttcctggatgtgctggaagaaggtttcaaagagttcttcgagaaagaagtcccgggcaatcctctgaaagccgagtatctgatccctatctttatcggtgaattgttggagcagggaaagatgtctgtcaaagtattgaaaacaaacgatatctggtacggcatgacctatcacgaggatgtagcagcagtaaaggatagctttaaaaagatgctggagaacggtgtgtacaaggctgacctgttcagtgatctgtaaacagtgatgaaagaaacgattgatttactcggaaagatcctcacaaatatcctaaccgctctctatgagccgtttggattctcgcttcttctttccttcctggccatgtttttctatctttatgtttatgaatctattggagcaggaaaaggctggaagattgccataatgacatggtatcagaaattcaaggagagtgtgttctttcgggaactattcttcctggcctttgtgacttcacttattctgttccgaaccctgttaaaccgtcagctgtggatgaatcctttatccgatgtcatgggcggctggggcatctgggagacagtgaacggcgagcagaaactgaccaccgagtgcatcgagaacgtgatcatgatggtgccgttctcagcagtagtgatgtggacattcgaagaaaagattggaaacagcttgaagaagatactgtggcaaagcgggaagatagcattttgcttttcggtaagcattgagatgctacaattatcgcttcgtttgggaacgttccagctatcagacatcttctataacacagtcggcggagtgctaggcggattgatgtattgtgcggtgatgaaggcaagaaaacgtctgtaaaaagggttgaaattgtgatatactgggagcggtagctccctacgctgctctgataatcacacacctcttcgtggtgagcagcaggcaacgatcttatggtcggctgagatgtgagaataatttgtcgcttattgttttatttggaacttggctgagttgcttaaagttaaagttcgaaaccaaaggatttgtcaaaaacattgagattgatggaggcgctgtgatgaacagtctgatggtaacttatatgtgggttcagatgggatatcctacgggtgtatgtggggttcgtagccaacatttacatgaaacaaaatagccgagtgaagagtaagacgtaaataaacgaaactacacctagaggccgtacctctggaccccgctattagattattacgaaagtgtttacatatacaggagaacattaatggcagatgattttaaatttggaaattcacttactccagacatgattgctaaaattaatgcaagtatacaaccacaaagaatgtttgcagaaagtattgcagcagaacaggatcgtatgatgcgtcaggctcaagaagttggagagcagatatatcagaataggcaaaaaatgcaagaagcgatggagcgtacagcacataatacagatgtggctaatgatcgtttagaaaagataatcgaccaacaatcatcacatattgaattgctggaaaaaacaaatgaaacattgcaaaaacaattggaaaccgaccaaaaacagttggaaatactgcagaatatttttgcttctggagaagatggagttcaggtcgagaaagaactgatgaacttgataaagaaagaaatagacgagacacatcctctttgggaatatgtcaaagataagggcggagatattgcggtggctggtgcgacagctggaattcctatattgtatggtgcttttaaggcatatcttctgtctaaaggaattatgttgccgtaataattgccctcatacccacactcaccatgcccagaacgaaaggcagcaaaaaccgtcccaaaaccaatatcaccaaagactacgcatcccagatcgcggagaagcaggagactattgcgtctctgaatacggagattgcctccgtcactgccaacattgacactttgaaggttgatctgaaagagaagaagactgctctgaagaaggccgaaaaagaagtggcatccctggaagcgaagaaggcaaaggcagatgctaaggctgctgaagaagctaagaagaccgaggcagaggctgtgctgaggaaactgctggctagcggcatgagtgcggatgaaatcctcgaaaaactgaaataagatcggccgtgtggacaaactgaactccagaagttcacacggtgtttttgaaggtcattgtatagtttataacggaaataaaagaaatagagcgtgaaaaaaatgaacttatcaaaaatacaccacatcgcgatcatcgtatccgactacgaagccgcaagggagttctatgtgaacaagctgggctttgttgtcatccgggaaaactaccgcccggagcgtaaggactggaaactggatcttcgtgtcaatgaacacacggagctggagattttcgctgaggaaaatcctccgaagcgtgtgagccgcccggaggcctgtgggctgcgtcaccttgcgttctgcgttgagagcgtggagcagacagtgaatgaactggcggaggtaggcattgaatgtgagccgattcgagttgacgattataccggaaagaagatgactttcttccatgatccggatggtctaccgctggagctgcacgaataagcatgggaaagaaaagagcgtataaatctcggaagcccggtggaggccggaagaagttgaagccagagtacgatgccgggaagaatctgaaagagcagctggatgctgctgtggcattttatgattctgagatgtccttgcaggccatcggagatgagttgggattaaatcccatcaaggtacggaagctgctcatcacggccggtgtgtatgaatcggaagtggcgcagaaggtacaggatacttttgaagaatatagagaaatacaagactacaaaacgtccatactctcaaccgcaaatgcgcttcaactctccaaagcctccgtcacctcgtacctgccatatcggaaaggtgtgtacttcccaagcacagcagaaaaagggaagatcagtgtcggagcagagcggcagcggagatatagagcgatgaagcggtggagggctgatccgacagaaaaaaacttctggggcatggttgtgtcctatgccggggtaggatttaaaacctactctggattgccattctcttacgaaattaaaaaaggcaggaacggtgagtacacaaaagagctgtggatcgaccgccgggagaagagtaaaagtctagcgtggagttcagtgctgctggcgctgaagaatattaaaggagaagtggttgaccgtccaaaagcgttgggcgatatccggggcgtgacctacatctacggaatgttctatcggttcggactgatcgatgtgcctgacgatgcaaagtgtaaaatgaataggtgcaggtgtgtttccaagggctgatatacggttgcttataggtgcaactgtcgggtcataaggcagatatattttatatcgaacaaaaatagccctgtttctcactccatccctcaaaatcacttccggtgaaattttagcaaaacaggtatcaggggagcgcatctgggcagggcgaacgccccggcggaagccccggatcccggacgctccgaggagtggcatgctaaagcacataaaaataaatgcgcataaaagtgatagagtgaatatgataattctaaaacacaaaattgcgaaagaacttgaaaacaacgcctaaatgtggtataattttggtacgaacaagtcggttttggtacgacaacggtatgctgtggtactgtaactgttgtttcgaaattatgaacgattacaaaaaaatcgtgaaaatttagcgtagctacgacgacacctatcaggttcaggtcgtgtcttggtacgacaacgagaactcctacacctctcagatggtccgtaccattaagtacttcgctgagaactgctaattgcgttcctacgctcaaaagtgcttgaggtgctgtgccgaatgacggctgatagcggctttgccggtacgaatatgctgtgatcggcgcgacaacagaatattgcgctcaaatacccttcctcttgcgggattccgtgagaggaagggcgttttttatctgcttgcagggagaaaatccaaagaaaggatgatttgctctgagaattgtgctatactgaacttacagcgtcccggagccgatgtaccatgcagatgatattgcttctctttgcagggagcatcaggcaacagggaaaagcatatacactataaaaagttcacttttgggaacgaggtaagcaagaatgggaaagtattttggaaccgatggcttccgtggggaagcgggcattgatctgaccgctgaccatgcctacaaggttggccgttttctgggctggtattataacgctctgcgcgagcgcaacggcaacaacgagcctgcccgcatcgtcattggcaaggacacccgccgtagctcttatatgttcgagtatagtctggtcgcaggcctgactgcttccggcgcagacgcctacctgctacacgtcaccactaccccgtctgtggcctacattgcccgcgtggatgacttcgactgcggcattatgatctctgccagccacaatccgttctatgataacggcatcaagctcatcgactgctacggtgagaagatgcccgaggagaccctgctgttggtggaggactaccttgacggcaaactccatgtgtttgacaaggactggccggagctgccctttgcacaccgggagcacatcggctgcaccgtggactatgtggcaggccgtaaccgctacatgggctacctgatctctctgggcatctactccttcaaggggatcaaggtcggtctggactgcgccaatggctccagctggaatatcgctaagtccgtgtttgacgctctgggcgctgacacctacgtcatcaacaacaagccgaacggcctgaacatcaacaataatgccggttctacccatatcgagggcttgcagaagttcgtggtagagaacggtctggacgttggctttgcctttgatggtgatgctgaccgctgcctgtgcgtggacgagaagggcaacgtcattaccggcgaccacatcctgtacatctacggctgctacatgaaggagcacggcgagctgatgaacaacaccgtggtcaccacggtcatgtccaactttggcctgtacaaggcctttgacgagcagggcatcgactatgcaaagaccgccgtgggcgacaagtacgtctacgaatacatggctaagaacagctgccggatcggcggcgagcagagcggccacatcatcttcagcaagtacgccagcaccggtgacggcatcctgaccagcctgaagatgatggaagttatgctggcgaagaagatgcccatgagcaagctggctgagccgctgaagatctacccgcaggtgctggaaaatgtccgcgtgaccgataaaaaggccgcacagaacgacccggcggtgcaggaggcagtcaaggctgtggctgaggcactgggcgataccggtcgtattctggtgcgcgagtctggcactgagccggtagtccgcgtgatggtggaagctcccgaccacgatacctgccagaagtacgtttctcaggtggtggaggtcatcaagggcaagggctacgccgtctgagacggagcactgcggcagatgttgcccgtgcaccaaaatgcgggcggcagatgctctgtgtggcgtgatcctgcatctttttgttgacaaacccgcactttttgcgtatgataaagataacactgaaaattgtgtcaaattggctgtgaagagaagagtacgcaccgtctgc

SEQ ID NO: 313 - DNA, 24625 bp, unidentified
  source 1..24625: mol_type = unassigned DNA
ttatacaaccgtcacaacacctatttcaacttgattattgattctggggatgaatacggtgttgctcagacctgcgcagacaatcatttttgtgccgtcaaggtcaaattcgcctttgtcatatttcggaaaaagtccctgattcggagcgattactccgccgatgaacggtaattgaatctgtcctccgtgggtgtgaccgcagacgattaagtctatgtcggttttctttgcgtcctcggcaatgtattcgggctggtggtgcagaagaattgtgaaattgttctttgctttttcggcaaattcttcccacagcgttcttgacggaacatcgtcatcgggagtgtagaactcataataagggtagtcgctcattccgccgataagcacacttttgccgtttttggtgaattttatgtattcattatcgagcaatacagcgcctgttgaatttgtttcgcttttaaaatccgttccgaatttggcggcattgtcacgctcatggttgccgagacagcagtatgtgggtgcaatttttgaaagcttttcaagcacatctttcatctttgttgtgtcgggatcgccacggttgaccatatctccgcaaactgcaataaaatcgggattttgttcctttacaagctctgcaaggtctgcgttcttttctccgtattccttgttgtgcaaatccgtgatgacaacaaatttcagctttgcgtcgttcttagcattgtttacacagtaatttgtgattgcaattgtgttgtcacagtaaacgccccatattacgagagtcacaaacagcataagtattattgctccgaggattatcgaaaattttttcattcaatttaccgcccatattaagtatggtattattttaggctcgttttgtgtggttgtcaacaaatgtgtgtcgaacaagtctgattattactgttccttgtgctttgattgtcggattttaagttgatttaggaattgctttgtttgacattccttttgcactgttgtataataaatcataattgtatttatatgttactcgggaaatttacacaaagttaaacagaagaggtatgggttatgaagaagattaatttgcgtaagatgttgctggctctcgcagatgtgtttattatcgttgtcagcggtattcttgcaaattatattctcttgcttgtcggctacataggtgctgcttcaagcaaaggcttgttgagctatattgttattgatcttgtcatgtgtctgtttacgctttatataagcggaacatattcaaaattgtggcgatactttaacgcaaaggactatatggtgtgcggaattgccgtcttttcggggtttacgctcggctttgtaatctcgttgtttttgcagattccgcagagaaagattttttgtatagtacatttcgcaatagcccttgtcggaattcttgcattccgttttgttttcagaagggcttttcttgaccttaccgaggcaggaagggcagagggcggagagcgcacccttattgtgggcgcaggcaatgccggcagaatgattgttcgtgaaattcacaatgcgaaagagcagggtgatgttaataatccttcaaaaagcatcattccggtatgctttgtcgatgatgatttgaaaaagctgaatcagaagatcgaaggaatccccgttgtcggaacctgtcccgaaattgttaaaatatgtgatgaataccgcatagacaatatcattgttgcacttccgtcatgtgaggaagatgagaagaggaagattcttgactactgttccgcaacagagtgcaaaatcaagattatcccttatctcggtgagcttttgtttgatgacgggcatacacagcttatttcacaggcaaaggaaatcaagattgaggatcttctcggcagaaaacccattgagtttgaccgaaaggagattcatgaccttatcaacggaaagatttgtcttgttacaggcggcggcggttcaatcggcagtgagcttgtaagacagattgcaaagaatgatccgaaacaaatcatcattgttgatatctacgaaaacaacgcatatgacattcagcaggagcttgtgcttgaatacggcacaaagcttaaccttgtaacgcttatttcatcggttcgtgattacgacaaaatggagcttatcttcaagacatatcgccccgaactcgtattccacgctgccgctcacaagcatgttccgcttatggaaaccgttcccgaggaggctgtaaagaacaacatcttcggcacattcaatgttgcaacccttgcagaaaagtacaaggcaaagaagtttgttatgatttcaaccgacaaggctgttaatccgacaaatgttatgggcgcaacaaagcgtgcgtgcgagatgattattcagtacaaggcgcagcacagcaccgataccgaatttgtaacaacaagattcggtaatgttctcggctcaaacggctcggttattccgctgtttcgccgtgagattgaaaacggtgctcccgttactgtaacacatcccgatattatcagatattttatgactattcccgaggctgtttcgcttgttcttgaggcaggtgcaatggcaaagggcggtgagatttttgttcttgatatgggtgctcccgtcaagattacaacccttgccgagaaccttatcagaatgtacggtaaggttccgtacaaagatgttccgattattttcacgggacttcgtccgggtgaaaagctttttgaggagcttcttatggacgaagaaggtcttaagtcaacacagaacaagaaaattttcataggaaatcaaattaaaatagacgaaacagatatgctgtcaaagcttgaggttctcaaaaaaaccgcagaaaacaatgacagtgaaaagacagttgaacttttggcagaacttgtacctactttttgccacaaggtcaatgattaaccgaaaaggagaaattttatgtgcggtattgtaggttatgtaggacctaaggattgcagtgaggtgcttgttaatgctctcacaaagcttgaatacagaggctatgactcggcaggtattgcggtttttgataacggggaaatcaagaccgtaaagaccaagggtaagcttcaggacttaaaggataagcttgcagaggtcggcactccgaaaggtcatgtcggcataggtcacacccgttgggcaacccacggcgagccttcggatgtaaactcacatccacacagcggtacaagggttacaatcgttcacaacggtattattgaaaactatatggaacttaaagacttcctcatctcaaagggaagaacttttttaagcgacacagatacagaggttgttgctcagctcctcgactataaatacaacggaaatcctcttgaaacaattgacagtgtaatggctgagcttaagggttcgtttgcactcggaattatgttcaaggatttccccgacagagtttttgcggttcgccgtgaaagtcctcttatcgtaggcgttgcagagggcgagtgctttattgcgtccgatgttcctgcaattcttcagtacacaagggattattatcttcttgaccatgatgaaatcgtaacactttcacctgacggtgtttcgttcgttgacgaacaccttgatccgattgaaaaggagcttcagacagccgactgggatatggaggctgccgaaaagggcggttatccgcactttatgattaaggaaatcaacgaacagcccgaggctatcagaacaacgattatgccgagaatcaaagagggacttccgttccttgaggagtgcggcatcacaacggaaacaatcaagaatttcaaaaatatcacaatcgttgcctgcggtactgccatgcatgcaggtatggtcggcaagtatgttattgaggatctcgcaagagttcccgtaaatgttgacattgcgtccgagttccgttacagaaatccgattgtaggcgagggcgaccttgtaatcattatttcacagtcgggcgaaacagccgacagccttgccgcaatgcgtcttgcaaagcagaagggtgcaaaaactcttgcaatcgtaaacgcaaagggcagttcaattgcccgtgaggcggatatgctcatctacacacttgcaggtcccgaaatttccgttccgtcaacaaaggcatacatcacacagctttccgttatgtatctctttgcctttgagcttgctcttgcaaaggaaacaatcagcacagccgagtgcaagcgacttgtttcggctcttacaaaaatgcctgaggcagttcagtatgtaattgacaactgcgaggatatctgcaagttcgttgccacaaagcttgttgcaaccgacagcttgctttacataggcagaggtcttgactatgccctttcaatggagggttcgctcaagctcaaagaggtttcgtacattcactcagaaagctacgccgcaggcgagttaaagcacggcacaatttcgcttattgacgaggatgttcccgttatcgccgttgcaactcagacaggtattatccccaagacaatcagcaatgttgttgaggttaagtcaagaggtgcaaaagttattcttgtttgtacagacgcctgtgcaagagaactcaaggacggtgttgcggattatgttatcgaaattccgcatacagacgagcttcttatgccgattacagcggttgttccgctccagattcttgcttattacacatcaatcaacagaggtattgatcccgataagccaaagaaccttgctaagtcggttactgtagaataaacggcagtcttgtttttaattgaaaattgaaaattgaaaatgtaaaatttcggttggcggtgtgccaccgcagtcaattcgagaagatagtcagataaagaaattgcattgatgcccgatacggcattgatgcaatttttgttttatatgaaagtgaatgtttatttatataattttaatttgtacaaatctttgcgtggttatctgcaggcggataatatccgtacatacagttttgcaacaacttccgtatataacaaaaatatacaaaaacagtcgggcgacaatgttttgcattcttgcgaattgtcttcccgaccataattttccattttccattttcaattttcaattttatgcacgctcaggcgtaatatgttctttaatatcataccgcattcacgaatagggtactcttgttttcaaatttaagcggtaaaaaccttgtatttttttgacagattatgtataattaattagatatacattctaaaaagcagtattgatgaatctaatttagtttcgggggaatatacggacatgatgaaaactgtttttaaaagagctgtaacgcttgcaatttgtgccgtaacggtattttgcggtatttttgcctgttcgggcgcaacaaaagattacgagattccgcagattgacgatatgacgctttcaatgcctgacggtatgagcgctgttacaagggacagtaaaagcacagataaatatttttccgttttcggtcttgattatgacacaacaatgaaaacctttcagaacggaaatatctatcttcagggtatggataatatgtcatcggttattctgaccgtgacaatgacaaaaaatgagagcagcgagaatgttggcaactatgctcagctttcttcaagcgagctttcaaatatacgcaacaattttcttaattccgacgagtatcggagctgtactcccgaccaaaaagaaaaagctgtgtggcttgtgtttgacgcaactgctcagagcagtaagggcgatgtgaaaacctttgttgccaacacggtttatgacggtatgaacattaatatcacaatgcaaagaacagagggtgatgttacaaccgttgactacgatactttttccaaagttgtatcttcggtaaaattcagcgacctgccgttttcaaagggatttattccgtacataatcatcggcggcggtgttgttatccttattttgattgtactcatcataatttttgccgtgagaatcagaaagcataaaaaggctaagaagaataacgctattcttgaggagcttgcagtcaagtataaactcggtgaaaagggtacggactacgacattgacaattttgacgattctcccgaaaagcccgataaacgctcaaagaaaaagcagaaatatgcggaagaggttgaagaagaaccggctttgtcgggcagaagatatgctcctgagccgataatcgaaaatatggaagaaccggaagaaattacaagtgagtattcaaactttggttatgacacggatgacgccaaggaaaaagaaattgacgagataatcaactccgcaaaggcttacaagagtgagcttgagcgtgaggcatataaaaacaactacggttacgaggaaaacagcacggaggacgaaaaaaaaaaggagcctaccgcagcagatacctcagagactgaacccgaaaaaattgacgaaaacgaaaaagataacgcagaaacacctgaaaaacacgaggacataagctcttcgtcaggtcctacactcgttatccccgaacccgaacacgatctttttgaaacaagcgagcctgacgatatcgaccgtgaggacgatgccgatgttgaagaaaccgaggaggtttccgaacaaaagcatccgcttgaaaaaaaggttgacaagtacgcaaacatcattttcggcagtgacgatcccgaggagaaaaccggggaagaggttgatgatgaggagcttgtaagggcaaaggctaagaaaaacaagtttgacagcggttatgacttttttgacgaagctcccaaaaagtcaatgggggttatcaaaagctcagacctcagagatgccgaggacgttgatgttatcggcgaggttgaaagaaaagcagaaaccgtaaagcagaacgctcttgaaaaagagaataataaagaaaccgagggcgaaccgaccgataaacggtcaacggaagaggttcttgccaatgtaggcaaaaacatcggtaacgctctcaggggctttgcaggcggagttaagaattttggcattcactgcggatatttctgcaagaatgtttcaataatgataaagcgtaagcgtgcgattgccaaacgcaaaaaggcagaggaagagagaagagagagagaaagacaaaaggcagagcgtgcaagaatgcgtgccgaaagaggcgagagtgacggacttgttcaggttcacagcagaaccgaccgccgcccccagcagaatcgccaccctgcaaacagaaacaagagaagataatttcttttcttaacggaggaaaaacatggaaatgctaattaaaaacgcagtggttgtttcccctgccgacaagcttaacgaaaaaacagatattctcataaaggacggtgtgattgccgaaatcggcagcggcattacatcagacggagagattattgacgcagacggtctttgtgccgttccgggatttgttgatatgcatgtgcatcttcgtgatcccggtcagactcacaaagaggatattatcacgggatgcaaggcggctgccgcaggcggtgttacaagcctgcttgcaatgcctaacaccaatcccacaaccgacagccccgaaattgtaaagtatattcttgacaaggctaaagatgccgacagccgtgtttatgttgcggcaagcgttaccaaggggcttaaaagcgaagaacccacagacattgacgctgtgaaaagtgcaggtgcaatagcacttaccgatgatggcagacctgttgaaaacacaaagtatttgagtgacgcaatgaaaaaagctccaaagctcggcatgacaattgtcgcacattgcgaggacttgttccttgccgacggcggtaaaattaacgagggcgaggtttcggaaaagctcggagtcaagggaatccctgccggtgccgaggactgcggaactgcaagagaaattgcacttgccgccgctcttaatgagcctattcatatctgccatgtcagcaccaaaacaagcgttgcacttatccgtgatgccaaaaggagaggtgttaaggtgaccgccgaaaccgctccgcattatgtttcgctcacggacagggagcttttaagaggtgacgctgattacagaatgaatccgcctctcagaactcaggctgatgttgacgagattatcaacgggctttgtgacggtacgcttgatgccatagcaaccgaccacgcaccgcacacacccgaggaaaaggctgattttgtaaaagcccccaacggttcaatcggcatggaaacctcgtttgcggtctgcaacacatacctggttaagacaggcagaatgacgctttcacagcttgttgagaagatgagtgttaatcctgcaaggattttgaaaatcaacgcaggcacactttcagtcggtgcaaatgccgatgttgttcttataaatcccgatgaagaatggacagttgatgccggtaaacttcacggcaaaagcaaaaacaccccgtttaaaggcagaaccctcacaggtaaagtcaaaaagacaatcctcggcggtaaggtagtttttgaagattgagtttgttttaattgtagatgttgatacgattaaaattgtgcaaacggtagctgtactacgctcgggcataaatgttttttatttgtcaaactgtctgcacgaattggggacggcggctcgccgtgttcgctcaccaaataaatttaatttaatataaactttaacataaaggagtaaaattatggcacagaaaggcgacctcctgtcggtaagacaggacatcagagtagtagacgcaacaatccgtgacggcggtctttgtaacgatttcagatttgacgacaaatttatcaaggctctttacaatgcaaatgttaaagccggtgttgattatatggaattcggctacaaggcatcaaaggaaatctttaacgaagaagatttcggtaagtggaaattctgtaacgatgcagatatcagaaaaattgtaggcgacaacaaggctcctcttaaaatcgctgttatggctgatgtcggcagaacagattttaagaaggatattatcgcaaagaaggacagcccgattgacctcatcagaattgcaacatacatcaacgcaattcctgcggctgttgaaatgattgaggacgctgcaaagaagggctacgaaacaacaatcaatattatggctgtttcaaaggcaagaaccgaggatattacagcggctcttgaaactctcggcaaaactcccgtaaacgctttctacattgttgacagctacggcgcactctatcccgaggagtcaagacgacttgcagacctttactgctcaattgctgacaagtatggcaagtcggtcggtattcacgctcacaacaaccagcagcttgcttttgccaacacaattgaggctatgactcagggcgtcagctaccttgacgcaaccgttgacggcatgggcagaggcgcaggcaactgtgcgcttgaacttcttctcggtttcctcaagaacccgaagtatcaggttgctcctattctcaaaatcattgaggagtacacccacaagtttaaggctgagggcgttaagtggggttacgatattccgtaccttctcacaggtcagtacaacacacatccccgtcctgcaattcagttcgtaaaagaggacagacaggattattacaagttctcaaatgaactttatgatattatcaacagctaattaaatttgtagcggcgttcattgaacgccaatcgaaccgattgcaaaatcggttcgaccatacaaacgatttgaattaaagtaattaaccacgatataacaatacatttgttgtttattcgttttggtttcacaaccaaaacgattggcggtcattgaccgccgctacggttaagcaatgacattgtttaaatcaaaatatgaacgaacaaattgtttttacattacaaaaaatgaggagaatcactatggcatttgacagacttatcgaaaatattgtaaaaatgcagaatcctacggttgcaggtcttgatccaaagcttgactatgttcctgaatcaatcaaaacaaaatgctttgaaaagtacggcaagacgcttgagggtgcggctgctgcactttttgaattcaacaaggcgcttattgacgcactttatgatattgttcctgccgtaaagccacaggctgcatattatgaaatgtacggctggcagggcgttaaggctctttgtgacacaatcgcttatgcaaagtcaaagggtatgttcgttatcacagacggcaagcgtaacgatatcggcacaactatggaggcatatgctacggcacacctcggccatacagatgttgcaggcgaaagtattgacgcattcggtgcagacgcactcactgtaaacggttacctcggaacagacggtatcaagccgcttgcaaaaatttgcgattcggacgacaagggcatttttgttcttgtaaaaacttcaaacccaagctcgggcgaacttcaggatatgaagcttgaaacaaatgagagcgtttatgagcatatgggcaagatgtgcgaaggctggggcgaagaccttatgggtaagtacggctattcggcagtaggcgcagttgtgggtgcaacatatcccgaacagctcggtgaaatgagagcaaaacttccgcacacatttttccttgttcccggttacggtgctcagggcggcggtgccgatgatgttaaaaacgcatttgacgaaaacggtctcggtgcaattatcaactcaagccgcggcattatgtgtgcatggaaaaagcaggggcttacagaagacgactttgccgttgccgctcgtaaagaggctgagcgtatgagggatgaaatcgttggctgtatcggcaaaattaagcttggctgattaatttgcacaacagaatcacgaaatttttcgttttttatgctttagtgctatgaatttattgactttagcgtgctaaaagcgtataattaaaacgtatttatttttacaactatatttttaaattttttttaaaaagggagatatcagaaatggcaagagtatataatttttcggcaggtccttcaatgctgcctgagtctgtgcttaaaaaagcagcggcagaaatgctcgattatgagggcagcggtcagagcgttatggaaatgtcacaccgctcaaaaatttacggtacaatcattgagggtgccgaggctcttttgagagaggttatgaacattcctgacaactacaaggttcttttccttcagggcggtgcgtcaacacagtttgcggctatccctatgaaccttatgacaaagagcggtaaggctgattatgttattacaggtcagtgggctaaaaaggctcatgcagaggctgcccgttacggtcaggctaatgttgttgcttcatcggctgacaagaccttcacatacattccaaagcttgatccttcaacattcacaaaggacgctgactatttctacatttgcatgaacaacacaatttacggtactgtttatcatgagcttcccgacacaggtgatgttccgctcgttgcagatatttcttcctgtattctttcaagaccgattgatgtttcaaaattcggcgttctctatgcaggcgcacagaagaacatggctccggcaggtcttacggttgttatcgttcgtgaggatcttatcggtcacgctatggatatcactcctacaatgcttaactggaaaactcacgctgacaacggttcaatgttcaacacaccgccttgctacacaatctacattgcaaagcttgttcttgagtggattaagaacgaggttggcggtcttgataagatgtatgaaatcaacaagaagaaggctgaccttctctacggtttcctcgattcttcagagcttttcaagggtactgttgttcccgaggatcgttcgcttatgaatgttccgttcgttacaggtgacgctgaccttgacgctaaattcgttaaagaggctactgaaaacggtcttgttaatatcaagggtcatcgcacagtcggcggtatgagagcttcaatttacaacgctatgccttatgagggcgttgaaaaactcgttgagtttatgaagaagttcgaggctgaaaacaagtaattattgaatattataattattgaatattatgatataacgggcgaacgctgttcgcctgttattgtaaattcttaaaataaaaaattaaaaaggattgattttgatgtataacattcttacattaaacaaaatcgccgctatcggcacaagccgtctcggtgataactataaatacggtgacgatgttcagaaccctgacgcagttcttgtaagaagtgccgcaatgcacgatatggaatttgccgataaccttcttgcaattgcaagagcaggcgcaggcacaaacaatattccgaaggataagtgcagcgagcagggcattgttgttttcaatactccgggtgctaacgcaaacgctgttaaggagcttgttatcgcaggacttcttctttcaaatcgtaaggttattgagggttatgaatgggcaaagactctcaagggcaacggtgcagctgtcggtaagatggttgaaaagggcaagagtcagttcgtcggtcccgaaatcaagggcaagaccctcggtgttatcggtcttggagcaatcggtattcttgttgcaaatgccgctgttgctctcggtatgaatgtaatcggctttgacccgtttatgtctgtgggcaacgctctcaagcttgctcctactgttaagctcatgaagagcgcagaagatgttatggtaaattgcgactacctcacaatccatgttccgcttactgacgacacaagagatatggttgatgccgatatgattgccaagatgaaagacggtgttcgtattctcaatttcagccgtgacggtcttgttaattcaacagcagttcttgaggctgttaagagcggcaaggttgccaagtatgttacagacttcggaacagacgatatcctcggtgaagagaatattatttgcctcccacacctcggtgcatcaactcccgaaagtgaagaaaattgtgctgttatggcttgtgatcaggttaaggagtacctcgagaacggtaacatcatcaactctgtaaactatcctgcaatttcacttgcaagaacaaatgctgacgatacccgtttctgcgttgctcacaagaatgttcccgagcttctcaagaaggttctcacacagatcagcggcaatgttgaaaatatgctttcaaagagccgtggcgactatgcttacacaattattgatgtagcaggcgcaggtgcagatgaccttgcaaaaatcgcagcagttgacggcgtaatcagagttcgtgcaatctgatttcgattaaaatttaatcgttgaaaatttaatctatgaaaaaagtccgaacacgcaaaatgttcggactttttgtttgtgtgaatccaaatatgtagcggcgttcagtgaacgccaatcgaaacaattgcaaaatcggttcgactgtatttcaaaatattggtgtatggttgatttggctttgcagccaaatcaaatggcgatcactgatcgccgctacgtatcgctatatattaaacttttaccagatggtatttttttgcattggcaattataaatgttacggaaattgcaacggcacacaattctgcaacgggcaatgccgaccacacaccgtttatgcctataaacatcggcaaaatcagcattgcggcacactcgaaaacaagcgttcttgcaactgaaatcacggctgaaatcttgccgttgttgagtgcggtgaaaagtcccgatgcgaaaatattcattccgcacaacagataatttattgcaaaaattctgaatccgctgagtgcaatctgctgaattttttcgtcgcctgccgagaaaattccgacaagcggttctgcaaaaaattcagatgccgtaatcattgcaaccgaaattatcagcgtgatttttatgcataatttgaacagcttttgcagtttttcgtgattttgtgcgccgtagttaaagctgatgacgggtgaaactcccgaagtgaatccaaacgaaaccgcagtgaaaataaagtgaatgtacaaaatagcacttatagccgcaacgccttttgcgcctgcaaagtgcatcatctgaatgttgaacagcgctgttgtcacggctgttgaaagatttgtcacagcctctgacgagccgtttgccattgcaaagaggatttcactgaccttgaattcaggcttgccaaagtgcagcgtctgctttttgttgaaaaagagcaaaagcggaattgcacccacagccattccgataatggtgccgagtcctgcaccgattattccaaaatcccacactgccataaaaagaatgtcaagcacaatgtttgtgcaacccgacagtatcgagaaaacaagcatgatatgtggcttgtctgctgttacaaggtacgattggttgagcatttgccagcacattacaaagccgtacggaatcataacgctgccgtagtcaatgcagtaggggagaatcttttcgtttgagccgaacatcatgtacataggttcggcaaaaattgtgaacagcacagcaatgataacagaaatgaccgttgccgtgattgcaacaccggacataagtcggtttgcttcctcctgtttgccttctcccattttctttgcgattatagcatttgagcctgttgaaaacattaagcccacagccataaatacgagcgtgaacggatatacaatattgattgcggataatgcgtcacttccgacacagttcgcaacaacgattccgtcaacaaccgtgtaaagtgacataaaaaccatcataagaacggttggcaaagtgaatttcagaatcgtttttgctttgataggttttgcataaattgatgttgccataaaatttccttaccctcaaatttatatttttcacagaccattcaaatgattgtatcataactttgtcgcaattacaaccgatttgtctttttttgtaaaatatgctattatatacagacttaaaagcgaaaaaaggggcggttttatgtttaagggcgcagtttttgatatggacgggcttatgattgacagcgaaaggcttgtttattcaatctggcgggaaatgcttgatgaggacggcaaagagtttaatctcgacattttcaaaaagacaatcggacttcgcagtgaggattcctacgaatattacaagtcggtttacggcgatgattttgactatcctgcttacaaggcggagtcgagaatccgctattttaagcgtattgaaaagaacggtgtgcctgtaaaaaaaggcttgtacgaaatttttgattatttaaaatcagtcggttgtaaaatttcgcttgcaacttcaacctcgtcacaaacggctttgaagattatgaagaaaatcaatctctatgataaatttgacgcattcgtgtgcggtgatgatgttaaaaacggcaagcccgatcccgaggtttttctgattgccgcaaagaagctcggtcttgagccggtggactgcgttgcatttgaggacagcattaacggcataaaatctgcacattccgcaggtatgaccacggttatgatacccgatttgtcagagccgacagacgaaattaagccgatgatagattttttgtgtacggatttaagcgaagcgataaagcatttataaattgaaaattacggcgagccgccgtacccaatttgtgcaaatttgaatacacaatttatgttatatcaaaacatatgtgtatggacataatatttcatcaaggcgggcgtccaatgaacgcccctacagagaaaattacaaataattacaaatggttacattttacaaaaatacaattgaacagagctgattattatacacattttccacatagttttcaacaattgttgaaaaagaacggcaatgcctgttgggcgttgctacggttactgcggaaaatggtaaaatgaaaaataattattgaataacagcacgataatatgttatactttggtaaacaacaatctttacggaggacaaaatgaagaaaattataaataaaaagtcactcaagggtacgcttgctgttatgttgtgtgccgttatggcattttctgtctgtgcctgtgactttgattctgacacagaaccaaccaaaacggatgcacaaattcagtttgataaatattgtgacgatttgttttcggaagaacttgaggatgacgctcttactgcacattttgacatttcaaatccgtcggactacggtttgaaatatgacgaggaggactataccctcggtcatgtgtccgatgaagaaacaaaagaatcctttgatgaactgaaagaggcaaaaacggatttggaggagtttgaccgttcgggacttacttcttctcaaaagcagacatatgacacccttgaaagctactttgaaattcagctttcatatgagggtacaacagaattgcagagtatatttgcaccgcagtcgggaattattgcaaacctctttaccaccctgtccgaattcactttctatgaaaaggatgataccgacctttaccttgctgttttgaaggacacaaaacgctatatggacgagtgcattgcgttcacaagaaaacaggctgaggacggttactttatggctgaagatattgcacagcagtcaattgacgagtgcgaaaagcatattaagaatgacaagtccgtgcttgttgacgagtttgagtcgagaataaagtcactcggtcttagcgattccgagaaaaagactgttgtcgaaaccaataaaaagtattttgaagaatactacattcctgctctgaaatcagcaaattcagcacttgaaagtctcaaaaaatcaggcaaaaacgaagaaggtctttgcggttacggcaaaatcggcaaaaagtattattcggcaatcgtcaaagacaaaacaagcagcagcatgactcccgaggagcttaagtcataccttacaaacagctttacaaaggttggaatgagcatgagcaatgtttcgcaggatgacttgagcaaatttcaggactacaaacccgactttaaggacgccgatgaggtgcttgaatttttgattgagaatatcgaggaggactttccgactcccgttacaacctcttacacggcagattatatgagcgattccgcaaagagcgacaatgtgggagcgtactatgttcagggacgaattgacgatacaagcgttaatatcatcaaaatcaaccccgactttgcaaataagggtatgactcagatgtacacaactcttgcccacgaaggctatccgggtcatctttatcagtttaccgcatcaaatgcaaacacagatatcccgaatgtacgcaagattttaagctttatgggcgcaaccgagggttgggcgcagtatgcctcgaaatgtacgcttgattaccttgatacaagcgaaggcattaagaagcttatctacgcaaacgatatcctcggctatattctctattccatggtcgatgtcggtgtgaactacaacggctgggattatgaaaaagtcaaggagtatatgtcaacggcactcggttcggctgacagcgagagcgttacagccgcaacaaaagaggcgtatgaccttgcccgttcaaatccgggttattttctcccatataccgtaggctacctcaagatgattgatatgcgtgaaacagccgaaagcgagcttggctcaagctttgacgcaaaggagtatcacacattcattatgaatctcggaatcacaagcattgatgtctacgaaaaagcccttgatatgtggcttgaaagcaaaaagtaaatttttggtgataatcttgaatattttttacaggtatgatataattaacttattgatatgataaatataaattggtatggatttttctaagatgtgattcttattttcgccatacactcattatgggtgtatggcgatttttattttacgcaaggggtgttaatatgggcgttaaaacggaaaacaaaatggcttatgaacctgtcaacaaacttataattcaaatgtcggcaccgccgctgatttcaatgttttttcagtattcatacaaccttgttgacagtatgtttgttgcggggataaatgaacaggcacttgcggcagtatcgcttgcattcccgattacaacgcttatgaatgcgttgtccgtgtggataggtgtgggtgttaatgttttgattgcaggttatttgggacagaaaaatcagcaaaaggcaaattctgcagcggctctcggagtggtaatttcggtagttgtcggagtgctgataaatttcctttcgcttttcataataaatccctattattcggcttttacgcaaaacaaagagatttttgaatacggaattgcgtatatgagcgtctgcgtttttatgcagataccaaatatggtgcatattgtaattcaaaaaatacttcaggcaacaggcaatatgattgctccgatgtggtttcaaattgcaggtgttgtattcaattttgtgtttgaccctttgctcattttcggcataggtccgtttccgaaaatgggtgtggtcggagctgcagttgccacggttttaggctatgttgtttcaacaatcattgcgttgatacagctgtttcttacaaaacaaaaggttaagccggtgtttaaaaactgccttgaaccgcagatgataaagctgatattttcctacggattgccctcgtttgttatgaatgcgttgggagcattcaccgtgaattttgcaaatatgtttttggtgcgatattcggacacggcggttgcatttttcggagcatatttcaaggttcagcagttgatttttatgacggtgaacggactaattcaaggctgtttgcctataatgcggtttaattacagagcaaaagagtatggtcgccttaaacaagcaaataagagcggaacaattatcgcgactgttatgatgattgtcggtatgctcttggtgctgattttcccaaaagaaatattgtttttgttttcggcatcggaagaaatgtgtgcttttggagtgccggcaatgagaattatgtcactcggatttgtgttcagcggcttttctgcaatgattgcaacctatgaacaggcaacagacagtattatgcccggcgttgtagttcaactgttgcgacagggcgtgctgttagtccccgtaatttggcttttaaacagcgctgttcaaatgacaggcatatggcttgcgttcccaattacagaatttgttacatttcttgttgctgttgtatttgcaaaaattaaaaatcattgaataaataaaaataacaaccgccaaaatccgatataatggattttggcggttgtttgttatttaaaatatgtttaattttaaattgtttttgcaaaaatattatcagatgattttgctctgaaaattgtttttacgagcaagaatgttatataaacataaagtgcggtgtagatgattgccgtaaatttaaggctaataagctcgtaggagaacagatagtagcaatagcctctcaggcttataagcgttgacacaatcggaatccacaaatgctttgcacttactgccgcatagacaattaaaataatgtcaagcagataaccgtagcgttcgtgcattgacgaaaggaacatgatacaggtgaacacagtccacgctgttgtcagaagaaaagtttcaaggtttttcaaatcaacctttttatagatgataatgcacatcataattccgagtacggcaattgtcagaaagaccgaaaactgcttgaacagataataatatgtaatatcgtttccgtcacatatgagtgcataaaagttcggacagttcatctgaataagctttccgtagtcggtctgttccgcatatattgtgatgatatctataaacggtctacccataataattgcaggcaggcacattatcacatcaagtgcagggattataaagaaatgcagaatcgaaattttctttgtcgaaatccagtaataaagcataacgggaatgatgaatacggtttgcagcttgaatgcaaacgcaatgccgatgaacacaaacgatgcgatcggcttgtctttgtgcaaaaacaggattgcaaggattataaacgaggtgtaaattgaatcgcattgcgcccaaaacgatgagttaaaaatcaccgttgccgaaagaagtacggctgagtaggtgagtatcgctttgagccgtcggttattctttgcaaacgaataaacaagcattgcggttgaaattgcaagtacaaaatcgaatattattgatacgattttgtacgcatacagagcatttagcggcaaaagagtcataagatagattatgacttgatacggaatgttgtagttacccacctgagttgcaagccccgtaaaatcattcagcttgattatgctccaccacgaatttaaaaagctgttgaaatcatcgctttgaaaatccattccgcagactctgaggaaaattgcaataatcgttaccgcaacgagtaaaaataaaagaatgtgtttttttataaagtcaatgactttgctttctgcttttgtcatatagaaaattcctgttcgggtttaaataaaaccgattttcttcataaccttgcccattgtgcggctgctgattttaagggcaatttcatcggcttttctgtaacagctttcaagatatgccttgtctgcaacaagcttttcgtagcgttcacgaatcggacgaagttcttcaacaactgcctcgcctacagctgtcttgaagtcgccgtagcccttgccgtcaaaatccttttcaatctgctcatatgaaagacctgtaactgcgctgtaaattgccataaggttatttacgccgtctttgccctccgcatagcgaacctttgcctcgctgtccgtaacggctctcttgaacttcttcattataacctcgggtgcatcaagaagatgtacacagccgttgacattttcatcggacttgctcatctttcttgtcgggtcctgaagactcataacccttgcaccgttctttggaatgaaaccgtccggaatcttgaacacattgccgtaaataccgttaaaacgctctgcaatgtttcttgtaatctcaatgtgctgtttctggtctgcaccgacaggcactttgtcagcctgatagagaagaatgtcggcagccatgagtacgggatatgtgaaaagaccggcgttgatgttgtcggcgtgctttgcagacttgtccttgaactgcgtcattcttgaaagctcgccgaactgtgtgtaacagctgagcgcccatgcaagctctgcgtgagtgtgaacatgactctgaatgaagaaaagacttttttcaacatcaataccgcaagccataattgaagcataagcgtcaattatattcttacgcataacggcaggagtctgtcttaccgtgattgtgtgcaaatctgcaagagcgtaaatgcagtcgtattcgttctgcattgtaacccagttgcgaaccgcaccgagatagtttccgagtgtaattgttccgctgggctgtattgcgctgaatacaacctctttttttgtctgattttccattattcccctccgtgattaaagactgtttgcatactcgccgagaattttgattcctctttcaagctgttcgtcagtcggtgttgaaaagtttattctgaaactgtgacaggtttcgttttcgtcagttaaaaatgcgttgcccggaactacgcaaacctttttgagaacgagttctttgcagaaattcggcatatcaatatcctcgggcaagtcacaccaaatgaaaagaccgccgtcaattttatgatatgtgattttaggtgcgcagtatttgtcaagaagctccatgcagaagttcgctttctttgtgtagatttcacgaagctttgcaaggtgagcgttgaagtcatactttgtgatgaattcatcgcatacatattgtgcccagatatttgtatgtacatcgttgccctgtttgcacacaacaagcttttgaaaaatcggctttggtgcaattgtgtaagcaacacgcatacccggtgaaattacctttgagaatgaaccggcatagattacaattccgtccgtatcaaagctttttatgttcggaacatattcaccgctgtaacgcaggtcgccgtacgggttgtcctcaatgatgagaacaccgtattttttggcaagctcataaactttcttacgcttttcaaggctcattgtaatacccgaaggattttgaaaattcggaattgtgtaaatgagctttgcgttcggattggcttttaaagcctcttcaagcttttctgtgttcataccgtcaggctcaacgggaacacctgcaagctttgcgttgtagcttctgaatgtgttgagcgagccgatgaatgacggtgcctcgcagattacaacatcgccctcgtttacaagagcctttgagcataaatccataatctgctgtgcgcctgttgtgatgagaatgtcgtcattgtcagagcctgtgttatgctcctttttcatatattccgtaaggtgctttctcagcggagtgtaaccctccgaaacgctgtactgtaaaaccgaaatcggatcttctgcaaaaacctttgccgagatttccgcaatctcctttgagggaaatgcatcgggcgacgggtttcctgccgaaagcgatacaacgctcggatcggcggcatatttgaaaatttctctgatagcactcggcttcaggtttgaaaccctgtcggaaaacctgtattccataaaaatatctccttttaagatgataaggattttttaaaattccataccctgtaattctatcacgaattgcatatatgttcaagaaatttgactgtttttactgcgattttattcaaaaaatgtgtaatttattattttgcatttgtaaatgttaattcacggaaattgtattttttgtgctttttgtattgtttttgatgagtttctgttgtataatctaagtgataatgtccttacggtcagagcaaggcttgctttgattcaaacaggagtacactgcgcgtaattaatacacttatataattcattgaattcaaattgaatttaaaaatcttcggtttgggagagtaacactatgagcagaagaaacgattacgattattttgatcttgataatttcgatgacagcattgattcccgtgaatatcgtcgcagacagcaacagcgccgttctgcaagctatgccgcaagaccgtcatcacagcgtccagtcagaagacctgtaaaaagaagaaacaaaagaagaaccagaaacagaattattatcgttgtgagcgcattggtaattctgtttgttattatttttattataacttcaatttttaagggttgttcaaaggaagatgcccttgcaagcgttcccacgggaacagtgggtacaacggcatctcccgacgaaaccgcaaaatcttcgacagctaacaaagcagacgagctttctcctacatactttatgacaccgagcataaaggacgacaatacaaacggaactctttcgtacggcatttatgtgtggaacaaaataggctacgaattgttcagcagtgatgatgcaagagcgcagaactatgctcagacaatcaacggctttgcagacaagttcggcagctccgtaaaggtttatgatatgattgttcctaaccataccgaaatgggacttccgcaaagactcaaagacagcgacgctccgtcaacctcacaggctgacaacatcaaggcggcttatgcggctctttccgataaggtaactccgattaactgctacaaccgtcttgcggaacataatacagattacatctactttaagagcgaccaccattggacaggcctcggcgcttactatgcttacacagcatttgccgatacaaacgatttgccagttctttcgcttgatgattgcaaggaacagaaaattgacggctttacaggctcatttaccaactcggcagacggtcttgacagcgatacggtaagttattggaagttcccttataatgtaacaatggatatcacacaggcagacggttcttccgcaagctataacagtccctactatgaagccgcagagggcggttcaaacacctacggtgtgtttattatgggtgataatgccctcacggttctgaaatcagcttcgaaaaatgcggcggcaggcaagaagattgccgttgtaaaggaaagctacggcaacgcttttgttccgtatcttaccaataactacgaagaagttcatgttatcgatttcagatatttcaaacataatcttgttaattactgcaaaaccaacggaattgacgaggtgctttttatgaacggtgtaatgagtgccaacactcaggttcagcttgacagtatgagcggactttttaactga

SEQ ID NO: 314 - DNA, 28284 bp, unidentified
  source 1..28284: mol_type = unassigned DNA
atatggccttgcgcatctcgctgatacagcgcaccatactgaccaagagaagactttacaggatttccttctgtgtcaaagtatcgttcgccaataacagttccgtctggatcacgctggtacgtcttgatggcataaccagccgtacagctgacaggctgtctatttttatcaagataagtaatagcgcaattttgtccttgctcatcatactcccggtgcaaaccgtaatagccgcctgtgcattggactggctgcatattaaggtcgtagtagaaatcgtccgttgctttaccatccaccagcgttctcacaatggcggaataacctgcgcctagcatcattgggtgcttatctgcaccaagatacctaattacaatgcagccatcattatactcatacgagatgccatagtaatcgccataccggtccactggggttccagcagcgtcgaggtaaaactcttctgtaacctgtccatttgcattccgcgttcgctgtacggttgcatagcccatgtcaatggcatctgtgatggcaccgtcagagttcacataacttgtgttcgttacattttcctctacggtttctttcacctcaagctccgaagacatgaaaccggaatcatgatcaactgtggcatctggcagtaaaaacaagattgaagccaggacaaaggcaagtaacagcgcatgaacacttttctgttttagctttgcactcaaactccgtagcctctgctcttgatggtctccacaacctgagacacatacttctggcaggtatcgtggtcaggggcttccaccatcacacggacaagcggctcggtgccggactcgcgcaccagaatacaaccggtatcacccagtgcttctgccacggccttgactgcttcctgcaccaccggatcgttctgtgcggcctttttatcagtcacacggacattttccagaacctgcggataaatcttcagcggctcagccagcttgctcatgggcatcttcttcgccagcataacttccatcatcttgagactggtcaagatgccatcaccggtgctggcgtacttagagaaaatgatgtggccgctctgctcaccgccgatacgacagccgtttttcgccatgtactcatagacgtacttgtcgcccacagcggtcttagcgtaaccaatgcccttctcatcaaaagccttgtacagaccaaagttggacatgaccgtggtaacgacggtattggtcagcagcttgccacgctccttcatgtagcagccatagatgtacaggatgtggtcgccagtgatgacattacccttttcatccacacacaggcaacggtcagcatcaccgtcgtaggcgaagccaatgtccaggcccttctctaccacgaacttctgcaagccctcgatgtgggtggagcctgcattgttgttgatattcagtccgttgggctgtgcattgatgacataggtatcggcacccagcgcatcaaacacagacttagcaatattccagcttgcaccgttggcgcagtccagaccaaccttgacacccttgaaggagtagataccgagactgatcaggtatcccatgtagcggttacgaccggacacatagtccacagtgcagccgatgtgttcccggtgagcgaaaggcagctccgaccagtccttatcaaacacatggagtttgccgtcgatgtaatcctcgactaacaacaagatctcctccggcatcttctcaccatagcagtcgatcagcttgatgccgttatcgtagtagggattatggctggcagaaatcatgatgccacagtcgaagtcgtccacgcgggcgatgtaggccacactgggcgtagtagtgacgtgcagcagataggcgtctgcgccggaagcagtcagaccagcaaccaagctatactcaaacatataggagctgcggcgagtgtccttaccaatgacgatgcgtgcaggctcgttgttgccgttgcgctcacgcagagcgttgtaataccagccgaggaagcggcccaccttataggcatggtctgcagtcagagtgattccagcttcgccacggaagccatcggttccaaaatactttcccattatagtttttcctcatccaaagagtgatttgacgatcatatgctttagccgagaggaaatctcgttgcctgctgctcaccacagagaggtagcatatttgagcagcacagccatgtgcttggggacaacatggcctattttacatcagtttttcttggctgttttgtatttcttataaagaactatactcaacactgccataagaacaataaccaaataccggataagatagaaattatacaaagctataccaaacaaacacagaaccgttgttacacatgcgagtaatattagttttctatcttcaaaaacagaagatcctgcaataccattctctttgcacaattttctagcccaaattccttggaagagcgccatcagaatataagagaacagcgttgtatatgccgcagccatatatccataagcattgataaagatgtagtttaacacaaggtttgccacagctgcaatcattgccggatacatcacatactgtgttttcttgtagtacacagctatatccgaataaatattggcaaatgccgtgaagaagactcctgcagcaatcggcggcataatatagatagcctcatagtattcttctgttgcgagtattctaacaatttccggtgccatataggtcatcatcactgccatcactgcatacaaaagcataatttgagatgatatcctctttatgccttttacattactctctatattctgaaatagatacggaacaaaagaagcgtgaattgcctgccaaagcatcaaggacagcgaactcactgtatacaaggtactataaattccaactgcactattatttaccatctgactaatcatcattcggtcagatacgcttagaatttgtgcagctattgaatatccaataagcggaatgcttagagacaaagacaacttccaatattctttattgtacagtgtctttcccttccaaaacaggcacacccaaattactgcagccacaccatatacaacgagatagtttgcataaagtcgtacctctgcaatatcctcatgtccaatgctatttgcgccaagcactgcaacaaccgacaatactgatgccaatatcgcagatcctatcgttacgcatcctgataacttatatttatattcgtacctttgacgtgccagccaaaaatcacgagccggggccactaggaatccaatcaacatcaaaaccatcaatccatttggcagtcccagcaatctactccaaaaatcaggagcaataaaatatatgatggcaataataagagcaatcaaagatgtcagtgacagcacagaagattggtactggtctctcttatccggatactccttcattgccactgaatagccacccgatgtcaacgagagcgttgcaacaacacttatcagggaataccatgaattgtacaggttaacctcgccaatttgatctgttgtcatcagtctggtgaagatcggaactgttataatcgccaatcctcttgaaaagactgtagacagtgtatagacaatcgccgacttcgcactctccgacatcttttgaagttttcgtttaatatctaccatataaaatgtactccttcatatcatttcggagaatagagatcagaactttctccacaccatcttattaaccacgttgacatatccctgaatgatgcgaaccaccttcatggacacggtttcgtccacatagtcggggcagggcttgcccagcacgcccttctgcttcatttcgatagccatatcggtggcattgagcagctcccgggtggtgatgccagccagaatgaaatcaccggcttccagtgcctcggggcgctcggtggaggtacggatgcacacggcagcgatgggatgaccgatggacaggtagaagctgctttcctcgggcagagtaccggagtcggagacgattgccaaagcgttcatttgcagcttgttgtagtcgttgaaacccagcggctcattgacccgaacacgagaatccagctggaagccgctctgttccaggcggtgcttgctgcgaggatggcaagagtacaggattggcatatcgtacttctctgccagtgcgttgatggcggtaaacaggctcaggaagttcttttcagagtcgatgttctcctcccggtgggcggacagcagaatgtatttgtccttttccagccccagacgctccagcacatcgcttttctggatcttctccagattcatgtgcaacacctctgccataggagaacctgtctggtaggtacgctccttgggcagacccgtatccgccaggtacttccgggcgaactcggaatagcacatattcacgtcagaaatcacatccacgatgcggcggttggtctcctcgggcagacactcgtccttgcagcggttgccggcctccatgtgaaacaacggaatgtgcaaccgcttcgcagagatggcagacaggcaggagttggtatcgcccagcaccagatagccctccggctgcaattcggacagaagctcatagctgcgacccagaatgttaccgcaggtcacgcccagattctcaccaaccaccggcaccagaatgtcgggaccgtattccccgaaggtgttcttcagttcaaaatcttcccagaaaacagtggagaggtttctgtcccagttctgattgtaatagaccacgcagcagtcaaaatactcccggcagcgcttgataacggcagccagccgaataatctccgggcgggtaccgcagccaatcatgaccttggtgcgcccatcatttttccatgtaaaattgtgttccataaaaatctcctaacgtcaaccagcagcttctctcacaccggctcgaagaaggtgtccgggtggttcgggttgaagatttcgttacaggtcatcactgtcacaagattctccgtctccgacaggttgatgatgttgtgggtccagccgggaatcatgtggacagcctcgattttatcgccggaaacttcaaactccaccgtttctccggtattgatgttccgttcttggatcaggccgtggccagcgaccacgataaacagttcccacttggagttgtgccagtgctgtcccttggtaatgcccgggcagctgatgttgatagacacctgaccgcaatcggcggtgtgtaccagctcggtaaaggaaccacggttgtccacgttcatcttaagggcgtacttaaacttgtccgtgggaagataggtcaggtacagggagtacagtttcttagcaaaggagccatcgggcatcttgggcatcatgagcgtagtcggctgtgccttgaactcttgcagtagatccacaatttcccccagcgtaaccttgtgggtcacggggacacagcagtaacgaccgtctgctttcagaaccgtttccacaccgtcgaattcacagtgctgctccttgccttccagcagatcgaacattccttctaccaggtcatcgatgtacagcagttccaactcggtactgcggtcgttgacggtgaagggctcatcgttggcaaccgcccagcagaaggtgctgacagcactgttgtacttggggcggctgtgtcccatcaggttcacaaagcgatagaccgccacctttgccccggtctcctgagcatacaggaagaatagttcctcgccagccttcttgctgcgtccgtactcgctgttgccgaaacgaccagccagcgtggcttgaatggaagaagacagcatgatggttgccttgttgttgtgctttttcaggcagttcagcagatcagatgcaaagccgaagtttcccttcatgaagtcttccgggttctccggacgattcacgcctgccagattgaacacaaagtccgccttctggcagtactcgtccagctcctccggcgtggaatccaaatcatattcgtagatttcttcaatatgcaatgccgggcgggtcttgttcttgccgtcccggatgtttttcaggttgttgcacagggcggttcccaccatgcccttggcacctgtgactagaatgttcatcctatcacctctttaatgtactgcggtgcagtccgaaatatctgcgccatccggcacggttgcattattgcagatggtgcagttactgccgatgcgagtaaagtttcccacagtcgcaccggtgcgaacaacgctgtttgtgtaaattagggcgtagtcccctaacgtcgcatcacagtggacctctgttccggcattcagcagaacaccgtcgccaacggacgcaccgttctggacacaggcattttgcaatatcacacaaccgcatcccaacttagcgtatggactgatgtaggcactgggagcaatgatgttggggaacgcatagccaagtgcttttgctttctcatacacctgtgctcggaaccgattattgccgattcccaccaccagcaatccatactccttccgcagctccggcagattagcaagaccgccaaccaccggaatgccacagatgtcagtgcccacaggttgcccatcgtctacaaaggcacagtcatattctatcatcgcttgttcagccaccatgcggccaaagccaccggctccaaccagcagcaacttttctttagacattcgggatgcccttcagtgcattctgaacatactcggtggtgagaatcttcttgactgtgccttccacatccagacgctcggtgttgtggctggtgtaagattcatctgccatggtatgtacttcgcccttgaccacgaacttgtcgtagttcaggtcacggttatcagcagcaacacggaaataatgacccatatcctcactgcgcagacgttcctcacgggtcatcagggtctcgaacagcttctcgccgtgacgagttccaatgatgttggtgccggtatcgccgaagagttgctggacagccttagccagatcgccgatggtagaggcatccgccttttggatgaacaggtcgccgggattggcgtgctggaaggcgaacataaccagatccacagcctcgtccagattcatcaggaagcgggtcatgttgggatcggtgatggtgatgggattgccagccttgatctggtcgatgaacagagggatgacagagccacggctgcacatgacgttgccgtaacgggtgcagcagatggtggtgccgccacgctcagcagccacacgggcattggcgtagatgacgtgctccatcatggccttggagatgcccatagcgttgatggggtaggctgctttatcggtggacaggcagacgacacgcttgacaccggcatcaatggcggcgtgcaacatattatcagtaccgatgatgttggtctggacggcctgcatggggaagaactcgcaggaaggaacctgcttcagagcggcagcgtggaaaatgtagtcaacaccgggcatggcatccttgatagactggggattgcggacatcaccaatgtagaacttgaccttgccagcagtctccgggtgctttgcctgaagctcgtgacgcatgtcatcctgcttcttctcgtcacgagagaaaatgcggatttccttcaggtcagaatccaagaagtgcttcagaacggtagaaccaaaagaaccagtaccaccagtgatcataagggttgcgttatcaaatgcagacattttaaatttcctccgtatttatatttatcaagtcattttcagaccgataaccaacagttgagtacaacagaatgcaattcataaagagcaagttaccgtgtggctctttagtcaggattgttaaaaacataagaagagtcgcaagtcttgtaacaaatttacgactacctgctatttggaataaagctttaatccatatcaaaacaacaggaattccaagcaccccatattcagctaagtatgtcgttatagttgatgttcctgacgattgcaacgtggaattgaacttagccacttcaaaagcatactgagcaattccaacaccaaacggaaaatgattccatgcaatttgcaagtcaacaagaacggcattagttctcataaaattgctgacattagatgtatcatttaattttacaagcaaataatcgttcagccattgatcaattacatctgaacctatctgtccaataataaagatcagaataagaactccgcaaagcagtacattccttcttaacgacagttcctcatcttttctatcagtcagtttaataatcaagatcagtggcatcattgcaatgcccgcacccgattttgtcataatcaaacaaacggtaaatagccccagcgtaatccaataattttttgtattctcctttttcaagaaagcaattgcaatcgccagatatgtcgcaaacaatcccggctcccaaaacagtccgtgcaatctttctgtcaaccccgaatatgtatatttaataaaggagaatagaataccattgacataaactgttccattatagtttaccattgtgggcagcatattaataaccggcgtgtattgtagcgcatatccaatcaatgcaaagcatgatattacagccattaccctaatatattctttcttaaagtcattccaatcgcatacactaacaataagcatcgcacaaaagtacaaaatcacttgctttcccacaatgctggacactccagaagaaaatagcacaattgctattagatatgcagtcaagtagaaagttttcctacctattaacaatcctccctgcagctttcttttcctttggagaactccttcgagaataatcacaagagaacagactgccattgccatgatggtcattgtgcttccaagtgttgtaatagagagaaaatagccgctacaaaagatgattgttagaataataatcaaattcaaacaatcacctcctcatttcttttaatatttgtttccacgactttgctgtatcttgtttcatcagtcttttcatttttgaactaagcaaggatttcaaaacagtcgaatgcgggggacaaataatatcggccaattgatgttcaaccgacttattgattgcaatttcatttgggtgtacaagagggaaatccaactgcttggaaggaatctcgcaaaagcgatccgtcatgatattattttttgaatttccgccatgaatcgaaaactcatcaaccccgatattcgttatctgatttcgtaacggaactactccatataagccattcgatctaaccgaccacagcatttgatagtcccaagaaatgaatcgtcccgttctttcatgtctttcaacttcgttgcgaaccgactggtattgccagtgtgccagccatctgtttgaatagctgctataaaactttcttttatgcgcctcatcacggaatgtacttaactctccatcatagtacttcaaaaatttaccgctccatgatgcccatccacaaggcagcaagtgttgcgtaaaagcatagctttccttgccattcatatcggttacgtagttggttccacatatccagagaacttccggtgctgtttcatatttttccagcatctcgccggcgtacctaaagaaagaagtttccggaagattgtcatcttccagaaagatagctttttcctctctctcgaacacccactttgcgccttcaccaatattgcggtaaacaccacggttttcttcagcgtagttttttaccacctcgcaatcccagttgatgagagcttccactgtttttctgcattcgtgagcctgttctatctctttttcatttctgccttcatcagcaagtatgtatacttttctaggctttacttccgccagtcgctgtatgattcttggcatcgtatcgcatcggcgaaatattataagaaccactgggatatcaaacatcttcatcctccattttttcttattgaagcattcccaccactttatgagcctgcaccttagcgttcttgtactccgtgacccacttttgcgctttcaaaccaaagccgtgcaactcttcgggttccttgcacaaaagctcctgcaagagctgtcccatctgattttcatctgtaatctgataaaaataaggaaggtattctctggggatgcacggcaagtcatacgcaacaagtggcgttccggatgccatatactccatattttttgacgggaaggaatatgccgtccactctccttctgcaggtctcggattgatcagcagtgttgctttcttttcttccgcgacaatttgctgattggtcaattcgccgcagtactttatccgtggatctttttctgcacacgcattgatttcagagactgcacttcccttgccgtaaaaaagtaatcttgcatttgccttatctgttttcataaaggcttttagcagagctgatacgccaaagatatcttccagaagaccagccatcatacatacagcttccggatatttgttttcaaccgtgtttggaatctcaagaaccgcctgatcgaccatgccttcgacaaccacataaggcttgttctttttgttcaggcgctcattcatcttttctgtcaagaagatatatccatcataaacagatatcatatggttcttgattttttgaggaatcgccttgattccctttcgctgatcacctgctctgattccgggcacatccgtgacgattccatagttcttcacagatgagccaaaagaggaaagccatgtagcaatggacagttcccctaaaattatgtcacatataacgactccatcagggtttctctgcttccacttccgaatctcctgccatgcgttccaaatcgtcatcagacggtttttctttttgctggcgtatcgtggcaaatatttatagcggataccattttcctcttcgtcaggtcttgtcaggtcgttttctccgccttttacgataatgcgctgcgtcagtgcatcaacctcgcagccatttgcaatcaaaccatcgaccagcatacgattgaatttctgagaagcatggcttgatgttgaaccatacgtcttaaacatcctctcgtattcctttatagaacacaaagaggataaatagagtactttcatcattgttatcctttcgccattttcttgatcttccgcgtcaccccatctggcagcgcataccacagcttttttaggtaaaaatgcctgcacctcaggtatttcttttcgacaactgcccagccatctgtctggatctgctgataaatcgttttccgcagttccggcacgttctcttcatgtgagtggagaatggccggattttcaaccgccacatcctcccgttttgcgatgtgatatcgggcgttttgttcaaaccgagtcataaactctttgcccttctgcgtgttgacctgaaatgcagaaataccatcatgattatgaagtttctgctggtatccccagaagtcgctgatcgtataatctgtgaacctctccagtcccctgaacttacaagtataacaactataccggttgaaatagccactgataaagccaaacagatatggactcgtcataccatgcgctgtatactttttgccgtttacacagtacgattctgaaatagcccaaccatgtgcactcttatcacgacacttgtactggctcatcttaccgttacgttgtttctcgcaacgctcccgatacgcatcaaaagccatctgtgacggtacaccatggcataagaagtccatagtgagcagattatcataaggctttcgcagaaaattgagcagaccagcgcactggcacggtgtaccggtaaatagaaccattcttcctgcatccagaagtttctttgtctggctataagtatgctctgtgctactggacagatacttgcttccctgcatgggtctaagtccatccaaagaatccgcaatcgtcaacaccggttccattttttcattccagacacagccaacgactgctccaccttgttggataacactgtctgcgaccaaccggaatgctccaccagaagaactttcaaatagttcttccgcatttttactctgcaatgcgtatatatccagcggttcagctttttgcggcggattcatctctgggcagactttctcgcacaatttgcaatcgacacaccgattcgcatcaagggcgggatattggaatccctctttatttggtttcatggaaagcgcttttgtggggcatatctctacgcaggcaccgcaaccgcaacatttgctctcgtcttgtgtagcaagatagttcaacatttataattgcctcaaactttcaatgtactcttttgccttttgacgttcttccgccaaccgagtgttgacatttccgtaatcaataggtttctccgactctgccagcgcagcattttctgttgagaccaaccgctcctgaagattggtaagcgtgagaagactctcgattctggaattaaattcatttctcggaacgaccacaaaatcccgttccagattaatggaaaacgccaagccgtgaaaagaattggtcacgacaaaatctgcgtttgcaaacagcgacaggaaatccgccggagaacgatgggtgaacagctgatcgaccatgggcggtttcttcatttcccacgagattttgatcagcttcagcccctttttatccgcaatcttacgggcatattccgttgcatggttatcttcattgtagaggagcatcagaatgagatacggttgctttaccagtctgggagatgccagccggagccattcgtcttttgtgagctgcaaagtcgggtcaatgagctgaacgccatcatctctgccaagctgatgcaggacatcaagtgcagagtcctcccggacggataactttttgtactccgcaatgagaggcttcgtctcagccacttccttatcgttgagatgcgattttccgaagctggccacaaaggaaaccttagccttatctttcggagcaaaggtcaaaaagaaccctcggtctacgcctccattatattggctgttccatgtctgatcgctgcctgttacatatatatctgcctgtggaggatttttctctaaatcctctgccgtaatatattgttttgtcaggtgcaggttcttttccacgaattttccgaatgtcatttccttcagcaaaacggaaaacaccttaaagaatctatatgcagtgctggacattcctttattacttccagctgcagcagttttcataatttgtttctttgttctttgcgcagttatatagtcaataacttccgcttcatatccagctctctcgaatacagtctgtgtggcatacgcctgcaaggcagagccgtaattatacacgcgatgcaatgtaataatggcaaccttcattgtttattctccctctctatctctacagtcaccaatcagcacacagcaactgccggattttatctgtttctcatataaacatcaagaagtttcgcagtcaggtctacccccactatgcgaacgaccttctgaatcagttttgtttttttcgatgctccatagctcaaaacccacttgtaatcctgtaagaactccttagcggcattcttttcagcggtattcagtctgctgtattcccacaatagaatcgaatactcgtaggctacaaatgccatcgcataccctgttatcctcgtgtgagggtttcgttgtttatccgtaagactgtctgcaaagtttgacacaaatttgctcaatccatggaaggaagaaccgctgattttacttgtcattgaaccttcgcgattctgacggtagtaataaaacggacatggaagtgcatcaaacctttctgccttcaaaaggcagttcaagcagagcgtcaaatcctcagcatgagtcaaatcaatcggaaacttcagatcattctccatcaggaactcacgccggaacagctttgtacatgcactgcccggatatttggggcgtgttgccaaatgctgaaatacttcttcctggcttctgcctaaaatctgtgatctgtcgatctcatctccaaggctctctgtcgtcccatccgagaagagcttgtatccttccataaagcaaatgtctgcatcagtggtcttgatccagttaagaatctcttttacgcagccttgcccgatataatcatccgaatcaataaaggacacatattcacccacagccattttaagcccggcatttcgtgctactgaatgcccgctgtttttctgatggagcaccctgacattggtgttcttctcagagaaatcatcacaaatcaggccggaaccatcggttgatccatcatccacgagaatcacctcgcagtctgctccgctttgctcaagaatgctgttgatgcattttttcaaataggcttccacgttatacactggaataataaaactcagaataggagacatcagcagcaacctccgcaagcaggcaaatagctatttgcaaaaggctgcagggttattgtaaagctactgcactttaccccccccccgattactactgcgtagtctcatataaatatccagaattctcatagtcgtattaactcccaatatctgcatcgtccaacgaactagatgtgttttctttgttcttccgtagcttaaaacccagctatactcatttaacgtcttagcagcttcactcttgaattcttctccaattcggctatactgccaaatcataattgaaaattcatatgccacaaaactcatcgcatatcgctcaatatttccctttggcgttttattttccgtcaggatattgaccgactcctccacaaacgctctcagccctaagaatgatttgtaagtcacattattagtaattgagccttcccgcgcctgtcgatagtagtaataatctattggcagtgcatcgtaggagtctgcattcaagatacattgcaggacaaagcccaaatcctcggatactcttctatcatccgggaatctgaggtgatttctctccagcagtgcgcgacgaaaaagttttgtacaagggcttcccggatatttggaacgttccgacaggtactttattgcggactccttgcttcctttgagctctgcagcattcatctcatcatcaagcagctgctgcttgccatccggaaacaccttcttggctctcataaaacagatatccgcaccgccaagagttatccagtttaaaattttggagacacactgtccgtccaaataatcatcagaatcaacgaatgcaatatactctcctcgagcgcagtcaagccccgtatttcttgcagccgcaagtccaccgtttttctgatgaacaacctttactctcgaatccctatctgcataaccatcacaaataacaccagaacgatccggcgaaccgtcatccaccaaaatgacttcacaagcatcagtgagctggttaagaatgctatctacgcattcatttatatatttttcaaccttgtaaactggtataataaatgaaatcattttgctcactgtttttctcctctttacaccctactaagtttcttctttaagaaattggaaaatttgttctcaatgagataatttgcaatgctcgccaacacaacgcttgatagcatgataatagcaattgcaaacatactttttacagaaaggacttttaagtcaattacttttccaacaatcaaaatcacataatagtgaatcatatagaaagaaaagcttattttaccaagatgattgattgctttgggcattgcctgtttcttaaaagccagtaccaaggaaaataatgccactccagacagaaccgcattcctgtaaatattcaaatcacttagaaacataagtaccaatgcaatcgcagccaatacacctaacaggatttgtcgtctcgtggtaacgttcttgttccaaacggatcgaagcgcataaaatacgcctatgcctactacgaatgaaatccaccacggttgtgccaaaataaacagaaagggatgctccggactaaacctatactgaatcattaacagcatcgtgcaagccacagcagccagtattcctctgaatttatggctaatcttcatgcataagtcaaaaatgaacgtaaagtaaacatcataaaaaagcgtccatgcgggacctaccatcggtcttactacatctgcagatttcagggcgtggcgaacatacggtatgaagaatagcgatttgatgaactcaggcgtacccccccccgttgaaatcgacggaacaacctgcattgctgcaaaagtaaacgccgtcataatccagtagagaggaacaatccgaatcaatctcttcaagatataatggctggatgcccccttctgggttgtatacatcataagaaaggcgctaatacaaaagaacaagctcacgccggcctgtaatgtagcgatatgatcgttgaatgtgccaatatggtataacgcaatgcctaaggctccgacaactcgtaatattgaaatgcactcaatttgcccttcaaacttcatccgattctccacgtatcaattctcctcatacaccataaatcgttttcattgattccattaccttatggatatcaaatacagccgtctcatgtttcacattgctctgctgcagtgtttcaatcgcttttgcaattccatccacatcagtcggctcaaacaaatctccttgctgtaccaaatcactactaccacgaatcctggtagcaactaccggaagtccacttgccattgcctccatcaccgcaacgggaagaccttctctaaacgaagggaacaagaacacgtcagccatcttatagaaatcggcgacatccgttctatacccggtgagaatcactctgtcacccacacccaaactctgtgccaattctttatgtgcctccatcagagggccacgtccacaaattacatagtaggtgttcttgtctctcaatttggcaagagcttcaataccaactttgtggttcttgttcttattgacttcaccaacagaaaggatcacttttgcattcagcggaataccaagttctttacgaattctctgtcccttgtatactccctgcaggacaagatttcttaccccccccccgtaaatttttgacatttcatcttccacactactcaaatcgaattgtttgattttttgtaatgcagccgatgccacacggttacggagagctgtatcactcttcattttgctaatagactgtgcgacttcctccggtgtgttattggcaagcaaacccgtaacgccgtcttcaatcagatccgtgttgcctctgatgttcgagcagacagccggtagtccacaggccatggcctccatcagtgccaccggaagcccttcctgatgggacatgaatacaaacaggtctgcgcagttgcagatttcagaaatatcattgcgataacccagaaaatgaacatgatccgccacatccagtccttctgccagctttctcaaatcagcctcataggaacctcgaccacaaatcacatattcgatatgattcaacttgtccagctgcttcaatactgacagtgcccggatgacaacttcatgattcttacgaggaatcagctcgcctacagaaagcagcacaaaatcgtccgcagatacaccaatttctttacgtttctgttccttattcacataccctgcattgaacttcttcaaatcaattccaacacctggtacatagcacaccttgccagctttgaacgtctttgctcgctcatagtcttccttattgattgtgataagaacatcagtatatcgggaaagccacttctcaaccggataatacagaatccagttgattgctggtgcacctttatagaaatggaagccgtgtgcggtatagaacaccttcgttccctttttgcgtgcctgttttgccgccaaacgggttaacatagcaccaacaggagtatgacaatggatgatatcgtactcgccttcgtcaattatatgcttcaattctttatatgccttcaaattgcccggtttcagcgggttgcgctcaaaaggaatattatagtaggtatcacaataagggattacacaatcagccggattctcataatcgttccgtgctgcgaccgcagtctcccagcccatttctttgaacattttgagatatggaatgtgaaactccataatgtgcgtctttacaacggtcgcaacaaataatacctttttcatctacattcctctctccgcatatcaaagattacagcccagactcattctccaagagtctgagccgtttattccttataaagctctactaatcgtcctcagcagtgtgagtcacactgccgctatgtcttgtaccgccacaataagcgtttctgcggcaaattcacgctacggtaaccgccgtctttagtcctgatgacaccaacactcgttacggtagcccctgcctttattccaggttccactcatctacgctattgtagcgcccctgcttatgccggattaccccacacgaatgagcatctctgcgaccatgtggttatcaccatcacgctcacatccgacttgttatctccaagaccgggataaaatcgcagatgatgttatcatcgcaatctcaccggacaccccgaaaccgctatgtaaaagtcaccatagtgtcggtaatatcatcacagttccatctggcataaacccacgagctaccgtcgcatccataaaagtgctttttcggagcgtaaaagcctcgaattgacctcgttttgctctctctcacgcccatggtctcggcattttgcactatcatgagtgctatattgcccccatgcagggcaattcacccgctttccagcttaacgctactgtaagagctgcatttatgcctgactccactctggaatttcttccaatttttagcagattaaaatgtacaaaatcatcgatatttagttgttttctccactcatagcagtggtttgaccctcagaaactccctcggtactttcaggcataaacaggattttgacggttgccagcatgattttcaaatcctcgatcaggctgggatgtgcaatgtacatcaaatccatttgcagcttatcgtagggggtggtattatatttgccatatacctgtgcataaccagtcagaccagcctttgcctgcaggcgcagcgcaaactccggcatctcctcgcagtactgtgcggcaatctccgggcgctccggacgtgggcccacaacagacaaatcacccttcaggatgttcagcagctgaggcagctcgtccaggcggcaggcgcggataatgtgaccgacctttgtaatacggtcatccttgtcgccggtggagagacgtgccacgccatccttttctgcatccacgcgcatggagcggaacttcaaaatctcaaactgcttgccgtccttggtcagacgcacctgcttatagaaggcggggccaccatcggacttgactgcaatggctgtgatcaggagcagcgggctcaagatgatcagtgccagcagtgagatcacaatgtccatcgcgcgcttgatgaacaagaactccgggcttgccatgtagcgaccgacgcgcagcatcggcagatgaaacatatgcatcggccaagcaccgctcatgataacatcgccaacgcgggggatgacgaacatattgatgcccttccctacgcagtgcttcaggataatatttcgctcatggctgtggacgccgctgacaaaaacagtctccatgccatccagaatgctcaaatctgccaagcactccgacacgctcaaggtgacctgcacatcgtatttctggctcaggccatactcgttgatgagcttttccataccgtgtcgcacatcgtagacaactgctgtcttctgcggcgggaaggtcttgtagtaccatttatgtgcacaagatgcccagatcgcagccatcaccagctgcccggcaatagccgcaatgcccggcagcagattgcagaactttgccgacatcaggcaaatcacgatgtacaaaataccatcggttgccatagcgccaagaatctggccatacaccagttccgagacccgctgcatcgacatccagaacgcatcgtagattttaccgagtgcaatgtacaggataaaaaacaggcctaaaatcgcaaaatgaccctcccatgccagatttgcataggtctggtgcgagtagtacaggaaccagcaagccgcaaacggcagctcgatcatcagaacattcaagatctttacgatccgcaacattacatcatgctgaaactttgacataatcctctccaataactcctttagactttctttttacgacccagattacagcaactgttttgggtcgagctattaactacacaaaccgatatcttcccccgttttgtggttagccgaaacattcagattttcacttttcctcttagattcttgtgccagttctaaccggcgcggcctcgaatccgctttctcccaccgcatcccgatctcattcagctttgcaatacgttcctctgtcagaacagcgcagcttttttcaggattctggcgggtataccgctgccgcttgacccaatttccgaggttgtaaccgcccggtgatacataatcggcagggacgttcaggtcgccgtgggcatcaaagtagcgcttcgcttcctgatacccttcgttccactggcggtcattgcggttgccccagtacattccgattctgttgagccgttcgacctgttcgtctgtcagctttcccttcgggtatgcccattgctggcttgcgacccactgtcccagccgctcaccagccgctgtcacataggaacgcgggatattcaggttgccgttttcctcatagtaggcggcagccagcgcataagccttttcccacttggcatcgaaaatgttccacaccatgccgatctcatcaagctgtgcaatgcgttcttccttcaagcgatcgttcagcttttgctgccgggtcttgatgatccactgtcccagtgggtagccgtctgggtctacatattttccgggcaccatcaggtttccgtaggtgtcatggtatttctttgcgacctcaaatccatgctgccacgcaatttccttccggttgccccagaccatgccgatgctgtctagccgcgcgatctgctgctcggtcagattgccttggatctgtccctcgcgcacacggcgctgggtgaccagccacaccccaaggctcagaccaccgggcgtcgtatacagtttcgggacgtccaaattgccgtgctccgcatagtagatgcttgcttcggagaaatagtgctcccagctagaagaaaggcttgcctgcagctgctcgaacagcacccgacagtcatgcacctgctcgatgacctcgaaccgttcggtcacgatcttatcgccctcgccgttggcatacagacgatggactgcttcctgcatctcgctttgcaggccggaaatactggtcagaccttcaaagttgttgacaacatctaggataagtggtgtcgtattatccccagcggtcagggcgcgtccgatctgctgcttgtagatgatgggcgagatggtaggccggaacaaaatgacgcccgaaataccttccacatggacaccctcgttgagcatatcgatgcagaacagcagcttcagccggttgcttgtgtccgttttgaagtccgcaaaagccttgtccgtgttcggatcatccgagtaagcttcgtataccacaacgtctgggttaaccccggcgaaccactccggcacgtgggataccatctcgtccatgtgctctttgttggcgcagaacacgatgtattttccagatttgtttgtaatatgatgggcaaagaccctgtccagcccgtctgcctgctccagtgcgcggcgcagcgcgtccagatatttctgattcacatcctgaatgcccggtgcccgcaggttatccacccgcgactgatactttgcaagtgctttctggtactggtagaccgtggtcacatatttcggggcaggcaaaatacccctgacgactgcttcgccaagggtcatgttgctcgcaacacggctatcgaaaagctcttcggccatatcgcggttattatccagatatcggatgtttgttgccgtcagccccagaagctttgcatccgggcataactttaataaagccaccgtgctttcgccccaacattcagcaccgacacggtggaattcatcgagtataatataggcaggcttctgcgctgctatttcatccagctgcgcctgcgtgcaacacatcagtttggcataggtataaaagtgaacgtttgccagcggaaaatctgggtcgttccttttcaggctctccagctgggtcttaaagatatattcactgggagaaagccagattacgaccttctctgggttgtcctcgatcagcttgaacgcaatgtagctctttccggtgccggtgggatgaacaatggcagccttgccatactgctccatcatccgaatcaccgcatgatatgctttctcgttgtgctcaaacagacgcaatgccaccttgttcaccccttcccgcataaaggggtatcctctacagtgataatggaggataccaatctttcgacatcgttgtttgaattcttctcttattttatcatggttatatctgggaatcaatagaaatccttacaaatgcatcccacctgaccttagaaaaaaactcgcagaagctaaaagtttgttgcacattgcccagttctgcatgaaaaatccagcaaaaaacgaaggtggacagaataagtggtcagaagggtgtccaagacgcaggaggaaacagaaatggcacgacggggagaaaacattcacaaacgcaaggatggccggtgggaaggccgctacatcaaagcgcgtacaccggaggggaaaatccagtggggctacgtctatggcacggtctatgctgaggtcaaacgtgtgctgattcaaaagaaagcagaggcaggcttctacaatctaaagagaaccgacctggcctttgaagcactggctgaggtatggctgcactcccagcggaatgcagtaaaagaatccacctatgcgcattactcgtacacgctgcacaaatatcttcttccggttttaagcaaagtgcccattgcatctcttgaggaaagctttctggaacaggctatgcagcagatcattgcgccgatagatgccgcacacaagccgctggggaactcctctgcccgggaatgcctctcgatgctgcgccgtatctgcaaatatgccgcgcacttgcgcctgatccgtccgatggagctagaagtagcgctgccaaaagccatcgacaaaatttctgtgcctctctccccggcagagcagcagcggctttatcagtatgtacaggaggaccccacgccccgcaaaattggcttattattaggggtggaattggggctgcgtattggcgagatctgcggcttacagtggggcgatttcgacctgaaactcggaacgctgaaaatcaaccggacggtctgtcgaatttcctgtggaaacggtcatacaaaggtagtcattcaaacgcccaagacccgcacctcccgccgggaaattccaatcccaaagcagctgcttattatgctgaaaaagctgcgcggatgtgtcagcaatgctgcatggtttctgtccggcaacgagtccaagcccaccgagccccgttgctaccgaaaaagcatcaaatcatatctgaaacaggcaactgtccggcaggtacgtccgcacgcgctgcgccatacctttgcaacgacctgtctgcaggcggggtgcgatgtaaagaccctcagcgaattgttaggacacgctaacgccaacatcaccttgcagcgctatgtgcactctgacctgacccgaaagcgccgggagatgaaccgaattttctcccatcaggtgtccatgaggggcaggaacacgctaaatatgacgtaatagtgcatgatttctttcccgttcctccattatcactatggaggatactttttttattaaatatattctttgccattatgcggctgcacattctctgtatcataaaatacttttgcatcatacgcagatgcgtatgcatagctgcacggatttctgtaacatcatagtgaggtgaacttcatcacgactgtaaaagatgccgttgccaaacgctttgaacagttctacgaccagcgggagatacatcccaacaagttggcaacccacgccggtgcatattccaaaatcgatttattgcttcactcatagatatatttttattctacaaaatgcacctcttgcgaacataaaaaacgagtgttatactaaagccatcaaaaaacattggaggtgtcccctatgccccgtcccaaaggaagcaagaacaagaccaagaccgtaaaagcaaccgttgactttgctgcgcagattgccgaaaagcagtccgcaaaggaagccgctgctgccgaaatcgcatccatcactgcgaacatcgatacgctgaaagccgacctgaaaaccaagaaggcagagctgaaatctatcgacaaggaaatcgccagaatcgaagctaaaaaggtcaaagctgaaactaaagcagcggaatccgcaaagaaagctgaagccgaggatgtgctgaaaaaactgctggcgagcggcgtgagcgcagacgatatcctcgcaaagctgaagtgatttaaaaacttctggcgcagtagttaacggaaacatctacgtcgcaagcagtgcaacttggtaccaacttgcgatttttgaatcagatttttcaaaatccaaattcaaaatgcttgttgggctgtgcccaaaccccttgtgttctgcatccggtggatgcaggctgcgcatttttgcaaaatgcttttttaatctgagtgccgatgcctgtggtatcggcactttttgcacagatagattcccggaagcagaaaatagtgctatgcagcacatccggaattgtgctatacttgatttatataaacctgtttgtcctaaaaagctggaggtgttcatggctacacgaaccatttgttttcccatatccggctacccctattgcaaagaacagccggtgacattcacgtggataaaaggtagcaagcggcagaatatccgtgccgtccatgatgccgtccatacaacagacccggatgtttcaattctggaaatcagctctgcatccgttcagccggagggtgaggctgtttcttctctgcggcttctgctgcgtctggattctgttgcgcaggatgtgcccatcagcacggtttttgaagccgccaaggtatttgaacatggcggtccattcgctgaccttctgacctgtgcgccatccaaagtccataaggacactcggctgcgaaccaatggaaagctgctacgctactctttggaaggaagtgagtatccgatagagccgcatccggattcattttttgagtggctctactgccgtgcgttgaagcagttcccggaaaaggctgcgcagctgagcagatataatgccttttctgatattgctgccgcagcggattctaaaaagtattatggcgattccccgcgggcggctgcaatctatgtaggacttgcagccgctggaaaacttccgtgcatcgattcctatgaatcattcattgcggaagtttacacggagccaaagcccttgcccaaatctggaaagtctgagactgcttcaaaaaagacgcccgaggtttctgcaccagcaaaggagattccggcagacgaatcgtcgcagtccgataatgcaaatatcccggatgctgcgcagatggaacatatccttgagctgcccaaagcgacctgtctgctcctctctttggcaaaaaatgctggtctttctgcaaacaattccagtgagctggcgtataagggaaaggaattttttcttgacgcttatcagaaagcactgaaaaacaaaacactccaaatcaatattcataagaacaagttcacatttccgatggaggagcatgacagcggatttcatgcggtcggagtactgacccgttcgcccgcttgggaatacggatggaagttcaactatctggccgagaatacacccggagcagaaaagcccgaagtcaaagcaaaaatccagaagcctttgaccgcattggagcatctggaacgctgtgggtataaaatcgttcagcaggtcgtgccggaaaaactcccaccgattgctgttcagcggatggcatggaaaacaggcgaggctctttgcgacccggtggtggtggatttcttgcagtttatccgaacacatatgcagagcgacggctctttttcgttccgtattccaaagggtgcgtccaaaaaatcgtttgccacactttcagagattgctcagacgtgggacaaaatgggactttttgcagccattgtgatttatccgcagaatatcgtctatgaacttgcgcaaaatgaaaccgtccggcattttttgagcggaaagtggctggagctttttgtagagcatcaggttcagcagatcctgaaccactatcgggaggagcagggcgctgaagtttcggtttgctccaatgtggtcctttcagaaacggcatccgtagggagcacgcatgagctggatgtcgtgttctccatcaatggaaaatttttctgggtagaagccaaatcatccagtcgaagcattgattatggaaaatatgcttctctgtgcgaaaagctgaatgtgacaccagaaagcttgcttttggtcaacagcgatttgtccgtggaagagtgcgaaggtgtttcttatttctggaattaccgtgttgcaaattgtgcaacgatcacgcaggaactggaaagcatgattgccaaacaaattgaaagcaccggaaatgctgttctgagtacagactgagcaataagcaaaaatgatatgtacccccaatactggacacccagtattgggggtacatattaaaaccgaaaagcagaagctgccgcacaaaaatacggtgcggcagcttctgctttttatctgctgcgttccctgcgcgtgccgacagttccgttccgccttattcctcccctgcaaaaggtcgtttttgcccgccgtatttgtacccgtagggccgcccggctttcccgagaatggctgcctgttttgccgaaaagtcgtactctgcccgggaaaaagcaccggaaggctgctccggccatttattccgctgtttcttaccgattttacaatgttttttgcaaaaaaggctttacaaatgaatttcaaaaacatattatataattataggttcaacttctttatgcaaatagtttcgtaccggttcgtatagggcagccgggtctgtgctttttgcactgcttctgccttacgatagatcattggagcccgccggtgcagccccgctgcaccagatcaaatacagaaggaaggttatgcatcatgcctgaaaagaaagtttctactcccgcagccgatgctccggctgccgagggcaagacccgcaaatccaccaaggctcccgcccgccgcggccgcccgccgctggcacccgagctgtatgtagagatgggcggtgagcagtacaacatcaccgacatcattgaccgcgccaaggcagactaccgcaccacccacaaggtcggcgtacagtcctgcaaggtgtacgtcaagcccgaagaaggcgcagcctactacgtcatcaataagttctccggcaagctggaactgtaatttttcacagggtcacaggcagcaccgcactgctgccgcgcccgctattcccgcataaggctccatcaacaaaaaaagacaccgcacagctgtgcggtgtcttttttacataggcagcggctcagaaccccagcatccgccaaagagtcttacgctcttcggccgggtccgggtccgggatctcgaacacatagcgctcggtggcgttgatgacggtggtgttgccgcgggtgcatacccggggcagctttgcatcgtaattcaggtgtacgtgcccgtggatgaaccatttaggctggtactcgtccaaaatctcgttgaagcactcaaagcccctgtgggcacagtcgtccccatcgttcagtcccttggccggggcgtgggtcagcagcaggtcgatgccgccccttttgtgcgcctgatg

SEQ ID NO: 315 - DNA, 47927 bp, unidentified
  source 1..47927: mol_type = unassigned DNA
taggcgatgagacacagctcgatacgacaatcaccggcgcagtcatagacagcagacaggtgaaggagggctatctttttatcccgataaagggagaaagggtggacggacacaaattcattccgactgtgtttgagcagggggcggcaattgtgctctctgagcatgagcttaaggatccggcaggcccatatgtgcttgttgaatcaaccaccgatgccatgaaaaagctcgcggcattttacagaaaaagccttgatatcaaggtggtgggtatcaccggaagtgtcggcaagaccagcaccaaggagatgatatcgtcagttcttgagcagaaatacagcgtccacaagaccgcaggcaatttcaacaatgagataggcctgccactcaccattttcggaatcagggaaagcaatcaggtagcggtgctcgagatgggcatatctgattttggcgagatgcacagactttctattatgtcttgcccggatgtcatggtcatcaccaatatcggctactgccatctggagtttttgggcgacagggatggtgtgcttaaagcaaagacagagtgctttgagcatatgatgccggatgcggtcgcagtgctgaatgcagatgacgataagctggccacagtgcagacggtaaatggaaagcctgccatatactatggcaaggaatcagcttcaggcgttcataaatcagtatataccacaaatattgaaaacctgggcttcgacggcatgaaggctcattttgtcactccggagggtgagtttgatgcacaaatccacatcccgggtgagcacaatgtatacaatgccatggcggcggcagctgtcggattgcagcttggcctcacaatagctgagataaaatcaggaatcgagaaagcagagacaatcgcagggcgtaccaatttcatcaaaacacacggcatgacagtgatagatgactgctacaatgcaaatcctgtatccatgaaatcctctatcgaggtgctttcacatgcaaagggcaggacaatagcagtgcttggcgacatgggtgagcttggaagcgatgagaaaaagctgcaccatgaggtaggcgaagcagttggagagaatcatatccatacactttttgccgcaggagagctggcaaaggaatatgcagccggagccgcagagaaatcgtcagatgtagacatccactatttcgaggatagggaaaccatgacacaggagcttctttcatatgtgaaggagggcgacaccatactggtgaaggcatcgcacttcatggagtttccgaaggtggtagaggctctgagtaagtaaaatcaggtaaaatcaatcgggtagaaattaattcgatatttaataattgcgagggatggatattctccaagcctcataatattataaaagaaagagagaaaaataatggcacagaatccaatcgtaacaatcacaatggaaaacggcgatgtaatcaaggcggagctttatccggaaatcgcaccaaacacagtaaacaactttatcagcttaattaatcacaacttctatgacggagtatgcttccaccgtgtaatcaagggcttcatgctacagggcggagatccggacggaaacggtacaggcggccctggctatgaaatcaagggcgagttcacacacaacggcttcaaaaatgacttaaagcacacagccggtgtactttcaatggcacgtaccatgatacctgattcagcaggcagccagttcttcatcatgcatcaggatgcaccacatctcgatggtgagtatgcggcattcggtaaggtaatcgagggcatggatgtggtaaacaagatcgcagaggtgcgcacagactacatggacaaaccacttgaggctcaggtcatgaagacagttacagttgagaccttcggagtggactatccggagccggagacagtttaatgataataattattgatgaggcaagcgcaaaacttgcctctttttactatcatggagatagcttcaagccacagtggagaaatgtggtaggcaaggtatctatgtcagaagagctgcaagaaaaactgtatgttgcgctaccggctgatgaatcaattaatgacttccaaaaaacaacgatacaagaatctgcagataacaccgcgaaagctaatacgggaaatctaagaataccgaaagctcccgccgactgcatctggatagtatcaaacaggcagcagaagcaaatagctgactcactcggcatagcatcagtaggagaaccgcagtgcggcacgcgctatgcagtcgagagccttgcggagcttgatattgagtatctggagcgggtgcgcaggcggtataatcacatcccgtgggacatcggcgagacagacagatgtctgatacgtgagctgtccctgtcagaccttcctgcgctctatgagctctatgacaagcccggcatgaccgactttgtggaaccgctttacgactacgagacagagcttgaataccagaaagcatatatagagaacatgtatggcttttacgagtatggcatgtggcttgtgttttccaaggaaacaggtaagctgataggacgggcagggcttgagcatgatgaactgggctatatgatagcgccggaattatggaacaaaggctatgccacggaggtatgccgcttcatcatagactacgcgcgcgaaaacacagactttgaagagctttactgccggatagacgaaaaaaatacggcatcggtgcgccttgccaaaaagcttggatttacaaatagcgggcatatggatgatgatataaacgcttctatatatagaaaaaacataaaaaacaatgaaaaacattgaaaaatatgcaattaggcaataaaatataaacatagtttaacgatttggaggacgaaaaaatgaagaaatatgcatatggagtagatataggtggaacaactgtaaagatgggctttttcgagacaacaggaaagcttgtcgatacatgggagattcctacacgcacagagaattccggcgagctcatcctgcctgatatcgcagcatccatcaaggagaataacgagaagcatggtatcgagatgggtgacatcgagggcgtaggtatgggagtgccgggacctgtaaaggatgacggaacagtattaagatgtgtcaacctcggctggggcgtgttcaacgtggcacagtcactctcagtactgtgcggcggcatcaaggtaaaggccggaaacgatgccaacgtagctgcactcggtgagatgtggcagggtggcggaaagggtcatcaggatgtagtcatgatcacactcggcacaggtgtaggcggaggaatcatccgcgagggcaaaatcgtagccggagtaaacggagcaggcggagagataggacatatgcctatggtagatgatgagtcagagtgctgcggctgcggcaagaagggctgcttagagcagtatgcatcagcaaacggtctcgtaagagtggcagagagatacattgcagcacacagggatgtggcaacaaagcttgatttaaatgcaggattcacagccaaggatgtatgcgatgcggcaaaggcaggagatgcagcgggcattgcggcagtagagcagtctatgaagcttctcggcaaggcaatggcagcagtagcatgcgttatggatcctgaggtatttgttgtaggcggaggcctttcaaaggcgggcagcatcatcatcgatacagcagcaaagtactataaagagtatgctttccatgcaagccgcgagacagagatcaagcttgccacactcggcaactcagcaggcatgtatggcggagtaaagatggttatcggctaacaacataagattgcaatttttaaagaaataaaatataatggctactaaagatacactacaatcgaggtgagactattggcagattactcaacagaagaattagaaaaaatagcggacaaatttcgctcagatactagcggtataaggggaacgaaggattttacgagccccgaggagctttatgatgagctgaaaaaggaaatcaaaaagtatcatccgtcggatgacacgagccttgtggacaaagcctacagggtagcttatgatgcccataaggggcaggcgcgtaagtcaggagagccttatatcatacatccgctgtgtgttgccatagtactcgccgagctcgagctggataaggaaaccattgcagcaggactgctccatgatgtgctggaggacaccatcatgaccatggatgagatgcgtgcggagtttggagacgatgtcgcacatctggtggatggcgtcacgaagttaaagcacctgcatctgacagacagcaccaaggatccgaaggacaagaatgcggacaggcttgagatgcaggctgagaatctgcgtaagatgtttctcgccatggcaaaggatatcagggtcatcctcataaagctggcagacagactgcacaatatgcgtacactcaagtaccagtccaaggaggcgcagcagcgtatcgccagagaaacacaggatatctactgccctatcgcacagcggcttggtatcagcaagataaagatagagcttgaggacctttgtatgaagtacctctatccggatgcctactacgatctggtagagaaggtagccctcagaaagacagagcgcgacacttacattcagggcctggtaaacgatgtcaagaagtatgtttcggatgccggcatcaaggctgagatatacggcagggcaaagcatttcttcagtatatataagaagatggtcaatcaggacaagaccatagaccagatatatgacctctttgccatcaggattctggtggatacgataccggactgctatgcagtgcttggtatcatacatgagaagtataagcctataccgggccgtttcaaggactatattgccatgccgaagcagaacatgtaccagtcgcttcacacgacactcataggaccgagcggacagccgtttgagatacagatacgtacctatgagatgcatcgtacagctgagtacggtatcgcagcgcactggaagtacaaggaagcaaacaacggcaatgccactaccaccactgtcacagaggaggagaagctcagctggttgcgccagatactcgagtggcagcaggatatgtcggataataaggagtttatgactttattaaagagtgatttaaatttattctccgacaatgtatttgcattcacaccgtccggcgatgtaaagaacctgccaaagggatccacacctatagactttgcctacagcatacactctgcggtcggcaacaagatggtcggtgccaaggtaaacggcaagctggtgccgatagactatgtcatcaaaaacggtgaccagatagagataatcacctcacagaactccaagggaccaagccgtgactggctcaaggtcgtaaagagcacacaggccaagaacaagatcaaccagtggttcagaagtgagctcaaggaggagaatatacagcacggcaaggatctgatagcagcctatgccaaggcaaagggcatcaactttgctgaaataaacaagcctgagtatcaggagaaaatacgccgcaaatacggcttccacgactggaactcatgccttgcaaccgtcggccacggcggactcaaggagagccagatagtcaacaggatgtacgacgagtacaagaaggatcatgtggtgccggtgacagatgcagatgtgcttggcagcattgcagaaaagcagcaggcggcagcaggcacacagcccgagcacaagtcaaagagcggcattgtggtacacggactctatgatgtggctgtgcacttctcgaagtgttgcaatcctgttccgggagatgaaatagtgggctttgtcacaagaggccgaggcatctccatccacaggacagactgtgtgaatatcatcaatctgtccaagatggaaaaggacaggctcatagaagcagagtggcaggatacagccctcatggacaacggtgccgagtatcaggcagacctaaagatattctgtcatgacaggccgggactgctcgtagatatcacaaagatatttaccgagaaggaaatcaatatcagtggtatccagtccaagaccagcaagcagggcatcgctacaatcgaggtatttttcaatatcaaaggcagggaccagataaaggttctagtggagaagctcagacagatagaaagtgtaatagacgtagagaggaccaccggctaaatcccggtggttcttgcgtgaagcataacatataacagacaaggagtacactcatatggtaaatatgaagatagaccacttcgtagtgggaccggtgcagaccaactgctactttgtcaccaatataaagacaaaggaaatgataataatagacccgggtgcgtgtgcggatcagctcgccaaaaaagtggatgagtcaggcgcaaagccagtagcaatactgctcacacacggacactttgaccatgccacagatgcaaagccgctcgcagaccgctacggcatcaaaatatatatccatgaggcagacaaagccacactcgatgacccgcagctcaatgtcagctacatgatgggccagtcaaagactttttatgcggatgtatttttgaaggataagcaggaaattgacatcgcaggctttcacatagtagtgcttcacacaccggggcatacaccgggtggctgctgctattatttcccgtatgaggacgtgatctttacaggagattcgctgttttgcggctcaatcggacgtacggatttcaagggtggcagcatgtcagacctcgtgcgcacagtgaaggaaaaaatcatgacactgcctgagcatacagaggtgtacccgggccacaacgacacaacaaccatagaaaacgagaggatgtataacccttacttatgatagtagtagtatttaataaaccggattttgaatatgatgtgcactcactgctcaaggagttcttcccgcaggaggatgtgcagatgtactatagctgcccacctgatgaggtggaggggaaaaacctagcctgcacacaccacgagatgacagatgatggcgtaaaggaatttgcggatgcctcacaggtatttaagatagactatgtgggcgatgaaattgcagtggagtggacgcttaatagagccggaaaaagaatctgcacaaaaatatccgtagacagtgcagaccgcaaagagaccaaaaaccgcctcaagctcgccctctattccatgatagaaaagggcacaggaaagagccttccgtggggcacactctcaggcatcagaccgaccaagatagccatgaaatgcatagaggacggcatgagcgataaggaaacctacgactatcttaaggaaacctacctcgcaagcgatgagaaaatcgacctctcaataggtatagcaaagcgcgagaaggcactgctcgatagggtggactatgacaacggctacagcctgtacataggcatacccttctgcccgagcacctgtgcatactgctcgtttacctcatacccgctgggtgtgtggaaaaaccgcgtggacgattacctcgacgcactcgagaaggagatagactacacggcgcagaaattctaccacaaaaagctaaactccatctacataggaggcggcacaccgaccaccctaagccctgcccagcttgacaggcttatcagaaaaatcaaatgcagctttgatttaaaggactgcctggaatttacggtggaggcgggcagaccggattccatcacgagagaaaagctcatggcactaaagaaaaacggcatcagccgtatatcagtaaatccacagaccatgaagcagcagactctcgatataataggaagacaccacacggtagacgatacgataaatagcttcaagcttgcgcgtgagctgggctttgacaacataaacatggatctcatcatgggacttcctgaggagacactcgatgatgtaaggcacacaatggagctggtgaaggagctggcgcctgacaacgtcactatccactcactcgcagtaaagcgagctgcaagactcaccatcttcaaggaccgctacagagatatgcagatggtcaacacccaggagcatatggatctctgcgcagcctactgtaagcagatggggcttgagccatactacctctacaggcagaagggcatggcaggcaacatggaaaacgtgggctatgcggcaaagggcaaggccggagtatacaacatattgataatggaggaaaagcagaccatcgtggcgtgcggagcgggagcaagcaccaagcgcgtctggccaataccgaatccggatggcacacaccgcatcgacagatgcgagaatgtcaaggatgtagggcagtatatcgcaaggattgatgagatgatagagaggaagcagaggctgtttgaggaaaaataagcagtatgatatataataatgtataatattggtgctgtaataccatagtgattagcgaatgtgtcaaaaattataaagaaaacctaatattcattgacaaagaattaaaaatgagtgaaaataaattactgaaaaaacctgattagatacagaaaaagatacaaataaccgaataaaacaaaacaggctaaaataattcgggggaggacaaaggtacctcccccgtagtaggtatagagggaaataaaagataccacaaggagaatttggaaagaatgtacagaaagaaaggcagatgagtggcagaagcaatatcacggactttgaggaagtggtgaagctggatacccagtatattagggagtggagtgttaagaatgatttgaggattatttttaagactgttgtaagtattatgcaaagtgatggggcaatatagaaaaccatcacattgggaaatcctatccatacggatgtgtacataaaaaatcttgggatgaaggagatcagaggacatgaaagtatgtttagttggttcgtcaggaggacacctgacacatttatatatgttaaagccattttggaaggacaaagatcatttttgggtcacttttgataaggaggatgcaagaagccggctcgaaggtgaaaaaatgtatccttgttattatccgacaaaccggagtctaaaggctcttattaagaataccaagattgcatggaatgtgttacataaggaaaagccagacttgattatttcctgcggtgcagcagttgcggtcccgtttttttatattggtaaaatgatgggcgcaaagttggtttacatcgaggtttttgatcgaattgataaaccgacaatgacaggaaagatggtttaccccattgtggacaagtttgttgtgcagtgggaagagcagaaaaaggtttatccaaaggcggttaaccttggaagtatattctaagtagatgacgagaaaatgatttttgtgacggtaggaacacatgagcagccatttaatcggctgattcagaaaatagatgaattaaagaaagacggcattataaacgaagatgtaattatccagactggatttagtacatacgagccgaaatactgtcagtggagtaagttgattccatatcagcagatggtgaaaaatgtggccgacgcccgtattgtaatcactcacggtggtccggcaagttttatcatgccactacaaataggtaagactcctattgttgtgccgcgtcagcaccagttcaacgagcatgtaaataatcaccaggttgagtttgcaaggaatgtggctcagagaatgggaacgattattccagtggaggacattaatacactgggagatatcataacgaactatgatcagattgttgccgacatgggacatggtatgagtagtaataatgccaagtttaatgagaaacttgaaaaactggtagacgatttgtttggtggggaaaactgatgaaagaattactaataatggcaaagtcactaggtggcggcggatctgaagtggctttgatagaattaattaatgcacttcccgaagaactttacaatataacacttgtattgcttgattcggacaatgaatatgcttaccgtctaaaaaagaatgttaatattgttcagttgacttttaatagttcttttgcaaaatcactggtttcaatgtatgcttttccggcaaaggtattgaaaaaattatcggttaactcatttattgcatattatgattttatttcgaattgtgtgacgaacgtttttgaaaagacttatgacattgctattgacttctatggatatggttcatttgtgacagctttcttggcgacgaaaatacaagcaaagaaaaaggcaacatggcttcatgatgaaaaaccatactggatgaaaagcgttcaaaaatacttatgcgaatatgacaagatttatggcgtgtcccaggcagttgttgatgcattttgtagagagtatccgcattataaagataaggctgccgtattttataatgtaattgatattgaagaaatcaagcgaaagtctgaacaagatgagataataccgttcaaggaaagctttaatattgtaactgttggtcgattgacagaacagaaaggctatgacattgctataaaagcagcaagcattttgaagaagaggaaaatcaattttgcatggtatgctattggtggtggcagagatgaaaaaaagctaaagaaattagtagagaagtactgtctggaaaatcaatttgtttttcttggtcgtaaaaaaaatccatacccatatatgaagcactgcgatttatatgttcaaccatctcgccatgaggggtatgtaattactttggtagaggcacgtgcattatgtttgccaattctgtcttcggacattccttcagcaagagagcagatacaagatggtatcaatggatacgttgctgaactgagtgcggaagatctggcagataaaattgagtatttatataacaatccttctcaaaggaaaaagactgttgagtatttgaaagaacatccgattgatttctctacggagttactaaagctagaaattatttgaaaagagattgtttatgagaaaatttaaagtagtaatgataacttcatactttgatagaaatggagtaacatcccaagtaataaattatgctacaaacttggacaaaaataaatttcaggtagcgattgccgctggagagccttatgacatcggctatgaaaaagcatgtcaagagaataacatagaattgtgtaagctgccacaaaaacagaaaaatgcatacatgtattataagactatttattcttttctaaaaaaaaagaaaccagatattgttcatgtacatggtagcagtacattaatcgccgtagaactttttaccgctatgttagcaggtgtacctgtacgaatttctcatagccataatacaacttgctcacatccgttgttacatgagacgctaaaaccgtttttgaaagtggtgtcaaattgttatttagcatgtggcgaacttgcaggaaagtggatgtatggcaacggagcatttaaggttataccgaatgcctttgagaccaaagcatttgctttaaattcagagactagattattaattagaaaaaaactagaggtgggcgataatttagtaattgggcatataggcaaatttaacaaccagaaaaatcaaaattatttaattcgcgcctttgagaagctgtcatatgaagatgataaagcaatactgcttttggtgggaaatgggccagatttggaggagataagaaatcaggcacagcatacagcatgcgcagaccgtattatcttttggggagcaactgagaatccggaatatttatattctgctatggatgtttttgctttaccctctaggtttgaagggttacctgttgtgcttctcgaagcacaaatttcaggattgccttgtatcgtgtcggataaagtaacacgagaggtggattttggggatattatttggaaatcaatagaggatgatccacaaatatgggcagatacaattttatcaatggggcaaaggacagaagtacagagaaagcaatatcgcttgcaacatgtaaagcaaattgcacgttatgatattaaagaatccgcaaaattggttgagaatatttatgagtgtaaattactaaaaaagaaataaaagaaaaattaagaaaaaaaattaacaattaagctacatatagtttatgaaaggggattaatatgccaacatatgaaggattaaggctgaaagtattatgaaaatacttcacaagttttacattggtttagtgagtgcatggaagatgttctgtgccaaagtttgtgctcatgggaagcttcaagtaaaatgggtcaattcgattagaggagctttcaagactgaagttataggtaacggatctattacaattggacggtttttaatgtcaagaggcccattgtatctaaagtctgtaaatgatggaaaactgacgattggcgacgatgtgttttttaatcataattgctctataacctgtgcagagaaggtaacgattggaaatcattgtatgttcgccaataatattgttatcatcgaccatgaccatgtgataggtggtaatggcgtgacaggtgaacttactgcaaggccggtaattattgaagatcacgtttggtgtggagccaatgtaacgataacaaaaggtgttcatattggatctggtgctgttattggtgcgaatgctgtagtagtaaatgacattgaagcccatgcaattgttgcaggtgtcccagctaaaagaattaaataacataaaatagtagaggaaataaaatgatacccaaaatgattcattattgctggtttggcggaaaaccactaccgaaagatgttttagattgtattaaaacatggaaaaaatattgcccggattacgaaatcaaacgatgggatgagtcaaattttgatgtgaatagccatccgtttatgaaagcagcgtatgaagcaaaagcatgggcgtttgtttcggattatgcaagattgaaagtggtatatgataacggcggaatctatttagatactgatgttgaacttctgaaaaaacctgattttctgttagaaaatcagtgttacatagggattcagcaacctgaatccctatgtaccactggacttggttttggtgcccaaaaatcaagtccagtggtacaaaagatgatggaatgctatgattcgatttcttttacagatcagaaaaaaagcacatttgcgtgtccgtggcttaatgataaggtgattcgttcatttggtaaggttagcaatgaagatattacctacctaaaagaagtaacggtatatccgccacgtttttttgatccgctttcgacgggtaatacaaagaatttactttgtgatgaaacagtgtcgattcatcattacgcagcaacatgggcgggtaacaagcagagatggaagagaaagctgattcgtttttttggggaagatagatattttaagttaaagaagttgtttcgacgagtacagtagcatttggggaaaacaagcaaaggaaacgatgaaatggaatggttgacactatttatatatatattgattattttttttaatattttttttgacaaatttattccatatgctaactatacagatgagctgatatgcttgctttttatggctatagctatcgtatatatttgtaaagataaagggaaagtggctgttaataaggaacaaaaaaatagcatattatgcattctgttagtgctttttattggaattgtgggaaatgttatgtatggatatatgccatcagtttccgtaattgggagagatataataggaacgtttaagttctttattatatatttggtcggaataagaattattgtaaaaaataatattcgattgaactcgaaaaaaataataagtacagcaaaaattataataactgttatttttgtttttggaatagttaatttgcttgtaaatactggaatagcagatgaagtaagatatggccttagaagttataagtttatttattctcattatacgtaccttgtttataatgaagtgctcttatacagtattctagcaacagaggataaaagaaatgcagtgtttaagataatgtcgctgctttcaattgcggcaactttccgaacaaagggatttattacgattgcatttatcttagcgtattacctcttgaattttgctaaaaagaaaagaatatcatttaaagatattttcaaaccggtttatattgctccaatcggaattgtatgcttttttatttcaaaaagcaaaattcagcaatatttatcatggggagcgagtcaaagcataagagttggtgtacatagcgttggattaaaaatcgcaaatgatcatttcccttttggaacaggttttgggacatttggaacgaatatctcttataaaaatcagtcacaactatataatatttataattcgttgaattattctcatctaatgaattatggatatgctacaatgtcggacgtgtactggccatcaatttatgttcaatttggttatattggaatgattgtttatgtgatactgattatacaaatttgcaaagatttgttgaataacgcaatgctgaataacaggtgtaaattttcaatattattgattctattttatatggtttctgcaagcttgagtgaagctacatttagcaatgaatctggagcgttttcggctgtggttatattaataatagttgcaatatcaagaaaaaatgcgcttataaagtgtgattgcaaggataacgaggggataaattgtggatgatttaataagcgttattgttccagtatataatgtggaagattatttggaaaaaagtttgtcttcattgttaattcaaacatacagaaagcttcaagttattataattgatgatggctcaacagacaacagtggggaaatatgtgattattatggagcaaacgatgggcggattgaggtttaccatatacaaaatgcgggggtttccaatgcgcgtaatcaggggctgaactacgcaaagggaaaatacatttatttttttgatccggatgattcccttgagccggatgcgctttggacgctctataaacaaataaaaaatggagcggatttagtagagtgttcatattttaaggactttacaaatgtaaaggaggaagtaattcatccggagaaaaaaatttccagtcaagaggctatcagaagtttattactgtgggatggatatctaacatcattttgctgggataaactgtataataaagaaaaaattggagatataaggtttgactcaaaattaaagattggcgaagataatctttttgtgtttgagtatttgctcaagtgcgaaagtgttatagtgctagactgcccactgtataactatctgataagagaaaattctgctattggaaatgtgtacacagaaaaaaagaaagattcagttcgtgcagcaggaacaatatatgaaatatgtagtaagcgaagtatgatgcactatgaagctaaaattcatgttgggttggcatcttttttttcatatgcgaatttattgaatacggttccttatgagaaaataaaagaatttaaaagtgattgcaaattttacattgattctatgaaagtatgttcttgtgggcttctttggaaattggttggaataaaaatgacgattctttataaaacggcgcagtacattccgtttctgtataaggcatcgggcttcatacgaaggaaaagccgttaataaatcagtatcattctttttcgtcaataaagcaactgataaaaaggataatatgtaaagtatactggctagctgtttaaaaagaaaattacatagcgtagtttattaatgtcggtttatgtaaaaattgtggaaggagttgagaaaaaatgagaaatcaaagatctattggtgtcaatgcaggactcaacatgattagaacggcatgtcaggtgatttttccattgattacttttccgtatgtatcacgagtccttcatgttgaaaatataggaatttacaatttttgtcagtcggttatttcgtatttttcattgctggcggctttaggaattagcacctatgctatcagagagggagcaagatatcgagataatgaagaaaagatgtcattatttgcttcggaggtcttttcaattaactttatttcgacagttttttcgtatctaattttaggagtgtgtatccttttggttccaagatttaaccaatatagttcaataatggtagcgttaagcataagcataatgtttacgctgattggaagtgaatggatatttcaaatttatgaggactataaatatatcacaattcgaggcattttgtttcagtttatttcattaatacttatgtttgtactcgttaggaatagcagtgatttgtttgcttatgtatggatcacagttatatcatgcagcggcgcaaatatacttaatgctgtttctagaagaaaatattgtaagataagacttaccattaatgcaaaaattctaacgcatttggctccaatattagttctgtttgcaacatcagtagcgacaacaatatatacgaatgcagatactacaatgcttggtttcttttcaggaaataaatcagttggattgtattctgtttccaccaaaatctacactattgtaaaacaaatgctggctgcaattattattgtttcaattccgagattatctgcttatctgggagagaaaaaaatagactattttaatagaacagccaaccagattttgaatgcacttgttgttattgtcgttccggcaatggttggattgattgcattaagcaaaaacatagtttttattattgcaggacaagaatatgttgatgcaaatatatcgcttaagattctttctgttgcgttgctttttagcatttttagttggttctatacatcgtgcattctaataccttataggtgcgaaaataaggtgttgatggcaacgattgttgcggctcttgttaatataggattaaattttatccttattccaacattccagcagaatgctgcggcatttactactgttattgcggagttactgtcaatggttataacatggtggtatggaagaaaatattttagagtcagttttctaaaaaaggacattctctccgttgctataggatgcctggcaatatggactatatgttctatatcagaaaaatatattagttcagtactgatttctacagttttttcagtgactgcttcggttggtatttatatgattgttctgttaataatgaagaatcaggcggtaaaattagttttagagatacttcatatcaaaaaataattttgtttttttacacacgaaaatacagccggcaacgatcttatggtcggcgaagatgtgaagatgcaatggtgaaaagatgtgaaacatgattagatataatgtaaaagtaaatgaccaaatgcatccctggaagcgaagaaggcaaaggcagctggtgtcggagcctctttaaggagggcatagacagaattctgatgcagtccagatttgaagaaatactgtagttcaacgtgtcgactttatgttcggctgagatgtgataaatattgaaggaaagtgatgtttatgaagcaaagagtaaaacaacttgcaataactgagagatcagtgaaaatgaaaaagattgttgcagtagttattataatgtttattttttcgataataattttgggggtaggaagtaaattagtgttccaaaaaatttgtgaacgaagagaaacagcatggccagatttgggaacagcagatgatgagcaatatgagtggcttaccgaagcatataaaataaagcgaaaaaataatgaaaaaattgttatcttggcttctgatggaacaaaattggaaggtcattattatgagagaaagaagaatgctccattagtaatcttctttcatgggtttagaagtcatagttacgtggatggtgtgccgatttataaaattgcgcagaaagaaaaatggaatgttttacttgttagtatgcgtgcgcatgatgaaagtgaaggaaatattttcacattgggagtgaaggaacgttatgattgtgtagattgggctaattgggctgcaaaacattttggaagagaaacaccgatatttcttatgggaatttcaatgggtggagcagtggtcacaatgagtagtgatttggatttgccagattctgtttgtggaattattgaagatagtggatttacaacatcaacaaaaatgttagagttaaattgtaagagctctttgcctaaaggaatgccagtagaggtattcaaaatttttgcagatgtgggaataaagctttggggaggatttaatttaaaagaggctgatgcttgtaagtcggtatcacagacaaaaattccgattttaattattcatggtgataaggataacttggcaccattatatatggcaaaagaaatttataatagttgtaaaagcagtaaagaaatttatatagttcatggtgcaggacatgcagagaattataaaaaagatccagagggatatgaaaagataataacgacgtttattaaagaaagagtgccataaatgtaagcgcttaatttttaggtatgatagaaaaatccccgactacttttcagtagccggagcaccttgacaattttacatcaaatcgtatataatgcactgtatatactcatgtatatgggttagcaatgattaatttaaagcgataatattgcgtaatatatggtagcacacgatatggtgtagttttggaggaaaaataagcagaatgacatataaataatgtataatattgagctgataatactatagagattggcgaatatgtcaaaaattgtaaagaaaacctaatattcattgacaatgaataaaaaaaaggtgaaaataagtcattgaaaaaccaattagatacaacaaaagatacgctaatctgaataaacatacaaaaaacaaaacagactaaaaatattcgggggggggtacaaaggtacccccctcggagtgggtataggggaaataaagatacataaggagaatttggaaagaatgtacagaaagaaaggcagagaatggacaaagcatatagactttatgtttatagatatcgcatgcattgttatagcattttttatttcatatgtgatacgcttcggctttaataacccatatgtggacaaggactaccgtatactgggtgtagcattccttctgatagatttctgtgtggagataatggaagactcatttaagaatgtcctaaaacgcggatatctggatgaatttatatcgacctgtaagcatgcagtgcttgtatttctggcgacagcactgtttctgttcaccacacagatggctgatatatactcgcgattatcattttatatcatgtttccaatctatgtgataataacatatgtagcaagactggcgctcaagagcttccttaagaaaaaggactttgcagcatctcagaaatcactgtttgtcatagcacctgatgcaatacttcgtgatacactgcgcacagtggagaaaagctgtataggctatacaaagatagtagcagcttcactggatacagacatgaagggtaagactatatgcggcataccgatagttgtgaatcacgatggcatagtagactatgcgtgcgaggaatgggtggatgaggtgctcattccgccttgcagcgaggatgaatatcctgaaaaaatggcagatatattcctagagatgggaattgcagtacatacaggaatagcaaaaaacggtacagcccaggggggctacaagcagatagaaaagataggcgactacacagtagttacatcaagcgagaactatgcaaatcccagcgaacttctggtaaagaggggcatggatatagtaggaggactggtgggctgcctgttcacacttatcatcatgatatttgtggggcctatgatatacatagcatcgccgggaccgatattcttctcacaggagagagtcggcagaaacggcagaaagttcaagatgtataaattccgcagcatgtatatggatgccgaggagcgaaagaaggagcttgcggcacagaataaagtgggcgacggaatgatgttcaagatggactttgacccgagaatcataggcaataaggtgctgccaaacggaaaaaagaaaaccggaatcgggcagtttatcaggaaaacaagcctggatgaattcccacaattcttcaatatactagtgggagatatgagcctggtaggcaccagaccaccgacactcgatgagtgggagaagtatgaaccacaccatagagccagaatgtcattcagacccggactgaccggactatggcaggtgagtggcaggagcaatatcacggactttgaggaagtggtgaagctggatacccagtatattagggagtggagtgttaagaatgatttgaggattatttttaagacaattacaggcgtattaaagagtgatggagcagtttaaagacgtgaacagacgaaagagtaagcataaagaaaaacttaatattgctatgtttggtcaaaaaagaattccatcaagagaaggcggagttgaaatagtggttgaagaactttgctcaaggatggttgcgcaaggacataatgtgacatgctacaacagaggtggtcatcatgtgagtggttctgaatatgattcaaaacgacttaaagaatataaaggaatcaggcttaaaacagtcccaacaatagagaaaaaaggtcttgcagctgtttcatcatcattttttgcagcattatgttgtgcttttggccggtatgacattgttcatattcatgctgagggaccggcatttttcgcgtggttaccaaaactatttggtaaaaaagtgattgtaacaattcatggattggattggcaacgtgaaaaatggaaaagtggatttggttcaaaatttattcatcagggtgaaaagaatgctgtgaagtatgcggatgaaattattgtgctgagtaaaggcgttcaagattattttgagaaagagtatggaagaaaaacagtgttcattccaaatggagtgaatagaccaaaaatccaagaagctgaattaattacagaaaaatatggtttggaaaaagattcttacatattgtttttaggacgattagttccggaaaaggggattagatatttggttgaggcatttaagaatgttaagactgataagaagctagtaatagcaggtggttcaagtgatacagattcatttatgaatgaattaaaggatctagcaaaagatgatgacaggattatttttacaggatttgttcaggggcagatattgaaggaactatatagtaatgcttatgtatatacgttaccttcagatttggaaggaatgccactgagtcttttagaagctatgagctatgggaattgttgtctagtttcgaatatccaagagtgtgcagaggttgtggaagatagggcattaattttcaaaaagtcagatgtagaggacttgcgagaaaaactgcaagaggcctgtgaccatcctgaaatggttatgaaaatgaagaatcaggcagctgactttatctgcgagaaatataactgggatgaagttgtaaaggaaacgatgaatctgtacaggagataacaatagatgagagtattgataataaataatctcctctaaccgaacgaaggtagtgagatgtacatagtggaaaagcctgaaaaatagcgtagttacggcattttttgagagataggtgaagctgcgaaagcggtttttatctcgctacctaggttcagcaacagcagatgattttatcgtaaggactttcagtatcactacctgcgtttgtatggagcactctggtttatgaacaatacattggaagtgtttcatctgaacagaggtagtgaaataaaacatagaatataacggttgacacttgaattgctgagaaaatatttatcagcagaaagacagtacgtaactcgtattgtgaaaagaaatttataaggagaaaaggcaatgataagaattcttcattctgtcagcaatatggatcgtgctggtattgagacgatgctgatgaactattatcgatatatggataagtcaaaagttcaattcgattttttatgcaataagaaaaaaccgggagcgtatgacgatgaaataaaatctatgggcggtagaatttatcatacaccgggattgaatccggccaagtatcctgtgtacttgaaatacatgcgagaactgtttcaagaacatccagaatataaaatcgttgaggcgcacaatggggcacttggcgtgtatgcacttcatgctgccaaagtgagcaaaattcctgtgcgcatttttcatgcacatggagcaagcataacgaaagactggaagcttccaatcaagcttgtttgtaaggcttgccttcccacaaatatgacgcatcatttttcttgtggtgtcgaggctgcaaaatgctattttggacaaaaagtagtagatgaaaatgactatgtgctgattccaaatgcaatagacgtcgagcgctttatctataacccagaaattcgtaataagattcgcaaggaaaacaatctggaaaacaaacacgttgtggggcatgttggacgctttatggcgcaaaaaaaccatacattcttagtggatgtttttgcagaggtcttaaaaattgattctcaggcacatcttgttctattaggcgatggtgaactgatggatgaaattaaaagaaaggcggcagaccttggtatcagtgagcatgtaaccttcgttggaaatgttggaaacgccaatgagtggtatcaagcatttgactgctttgttttgccgtcaatctgggaaggccttccggttgtgggcgtagaggctcaggcagcggaccttccgtgtgtcttttcgtcagccattacaagagaaattggattgtcacagcacgcaaaatttgtcccgcttacagaatctgtttctgtatgggcaaaaacactgagtgatgcgttgcagcagaatgagcgtaatgataacacgaagttgattacagaacaccactataatattgcctttgaagcgaagaacctacaggagagatatttacaacttgctggagaagtgaaatgaaaatcggaatattaacacatcaatatatcaacaattatggtgcttttttacaagcgtgggcactaagagaagcaatttcagaactatttcctgaagatgaagtacagattatagattatgtaaacataaaacattatatcatcaatgccggggggtggtttcgattttataaaaatagagaaacgctgaaagaatggtttgctaagattcatcttccgaacacttttgcgaaagcaagaaatcaagaaatggtactttccaaaagatgttttaatgctcgacagatcaatgaattagcatttgactgcattgttgttggcagtgatgaagtgtggaactacagagatacaaagggaaatgctgaacttaaatttggtgtaggattaacgtgtaaaaatttgattgcatatgcgccgagtgtaggaaagacggcaacggatgaagcaattccgcagtatgttattgatggtatcagaaagtttaagcggatttctgcgcgagatgacctgacagagcagctggtagaacaggtaacagggaacgcaccgaaacgagttttagatcctacttttttggccgaatttccacgggcagaattaaaagcaaaaagaaagccatatattctgttttactactgcgaaaatctaccggaaaatattttaaatcaaattttttattatgcaaaagagcatggtttggcggtttatggcgctggtgaatgcgacaaacgatattcagaagttactgtaaacctgacaccatttgagtgggtggaaatgttccgaaatgcggagtttgtgtttactggaacttttcacggtgcagtattctctattctgaatcgcaggcagtttaaggtatatctgacaaatgaaagccgaatcaaaaaagtaacagccttgctgagtgaacttcagattacaaaccgccctatcaaagaggatttttgcttcgatttagaaagtatgaagtcggaaatcaactatgaaaaagtgtatgatgtcatagaacagaatcggcagagcagcaagcagtatttaaaagatgcgataggaatggcaaaaaaatgagaataggaattttaacacatcattacgtaaaaaattatggtgcatttcttcagatgaaggcgatgtatgaaacacttcggagactgtacccgaaagcggaaatcgtagttgtaaactatgtaaatccaaggcattggcggaagaacatcattcacattcttcatttcagatttggaattgacacacctgctacttatataaaaaaaattcagcaattgcagacgttcacgaaatacgaacataccattcctcgtacgcactctgtaaaaagtgcagaagaaattgcgacgttaaaactagatctaatcgtgttgggaagtgatgagatctggaatttgtgtggttctggatatcatccattaaaattcggaacaggtcttgaagaacaacagacaattgcttatgcaccaagtgtgggggctgtaacggaggatacagaggttccggcagaggttgcctctggattgaagaatatcgaccgcatttcaggacgtgatacagaaactgtaaagtttattgaaagagtttctggaagaaacgcagaaaagatgcttgatccgacattcctctataactttgatgctaatattaagaaagataatattcagccgaaaccatacaaatatatattgatttatgattgtaaactgacaccttctatggtggaggaattgaaacagtatgcacagaataacagcttgaagatcatcggcgcgggtgattataaaacatattatgatgaaggatttattaatctgagtccttacgaatgggttgatttgttccgaaatgcggaaaaaataattactggaacatttcatgggacggtattttctatcaagtatgaaaagccggttgtatgttatccgactgaaaaaaatcgaatcaataaaatacattccctgttggaagatatgaaaattccatcaagacttcttgaaattggaagagaaaaagaactgatcaacatgctgaataagccgatgaactatatgcagacacaggaatacatcgctagaaaggttcaggaggcggatgaatttctggtgggagaaaaaagatgagcgagattattctatacaaggataaaaaagaatgttgtggatgtggagcttgtatgaatatttgcccgaaatcggcaattaaaatgcaggcggatgaatatggatttatctatcctgtaattcagcaggacttatgtgttcagtgtggagcatgtatgacggtttgtgggtaccagaacaaacccaaaacggaagaacctaaaaaggtttatgcagctgcctctaaaaatagtgttttgttacggaagtccgcatctggtggtgcttttgcagtgattgcagaagctgttttgaagaacgagggcatagtatacggtgcagcactccctatggaaaatggaatactggaaccgaaacatattcgcgttgattcactggataagctgatcttattacagggttcaaagtatgttcagagcgaaattggagatacttattcgcaggcaaagcgggatttgatacagggaaaagtagttttattctctggaacaccctgtcagattgctgggttaaaaaaatacttgaaaaaagaatataacaacctgattacaatagatatcatttgtcatggtgttcctagtaagagattgtttcaagattttatagaatttcatggaaaaaaacttggtggtaaaattactgagttctatttcagagataagaccaaaggacagggaatgatcacgcggagcgtctatgtgggtgaaggacatggatttaaggaaaaagtgttgatgggcggatgcactgcatacattcattttttctctaagtcctatacatatcgtgagaattgttattcctgcccatttgcatcagaagagcgtgtaggtgatttgactgtaggcgatttctgggggttccatgaggaatatccttcctatgatgtaaagcagggactatccaatggaaagggaatctcttgcctattggtcaatacggataaaggcaataatgttctggaacagtgtgaagatcagtttgcgctgatgacttcggattttgaaaaagttgcaaaacataatgatcagttgtattctccgagtaaatatagtcctaagcgtgaggaaatcttgaaactgtacaaggaaaaaggttatgaggccgtgaatcagtatttccacaaaacctgtaagaaagatattgtaaagtatacgatttctgggatggtacccaaaggactaaaaagaacaataaaaaaagtgatgggtagaataaaacgataaaaagtatagaatacaggatggaaagaatgcgatatggagtaatataactatgatatttttgattgtttttatattagcggcaatttgggcggcatcgagaggaaataaaaaattcattatattttttatggcattttacccgatattgccggactatttttcaattgaactaggtggaggtatgcctcttctgaaagccagcagaattttgttgctgatacttcttctatgtgtatgtttccgaaacaaaaaaataatactaattaggaaacccttgaaagcaactggcctatattggccgttgattatttattttgcagcaagaattttggcaaacgggtattatgtttcaagcttatctgatgcaatcaatacggagtttacagtcattgttgagcaactgatactgattgtcttgatttgtcaaattatacaggatcaagaagatgtgtatctgtgcgtgaaaacaatcgtagatgcaagtggaataatagcagttatcagcattatcaatgttctgattggctcaaatttgttttattctttgaatacggtatctcggaatgttttaatggagtctacggtaagaatgggcatcattcgtgcagaagctacatttgggcatccggtatactatgcaatgtattgtgcgcttattatccccttagcattgtatatgtggcaaaatgaaagaagaaggtggaatggatgtattcttggtctaaatattgtcgcagcattcttaacagagtcaagaggaacaattgttgtactgcttgcgttgcttttggtgtttatacttattacagataaaaaaacaagaaataaaattttttgtgcaggttgtgtaattgcttgtttggcagtgttcgtttcttttgcggtgccgactgtttcacaacaatttacaaacataattaaatcaataataattgcgtttggagatagtggagaaacaattgaaaattttggcggaaattcttcaacggggctttcgtcaagaatgatacagttatcgggtatttcttggatgctgatacataatgcagtatttggactgggagcaagttgccatacaagggggaaattaagttatcgtataaatggagtatggcaggtaagagataccattgacaacggttatgttggatattttgtagaggaaggtttgttaggtggaattgcatgttttagcttattctactcgcttcttaaatcttcttggaaaaaagcaacattcaaaaattcaagaaacatgaataacagcttttttctctgttttgtgtcctatgtggcggtaatgctgtctgttgctgatgtatcgcagttgctttgggtaattattgctttatatataacatataatgcgaaagcacaagcaattgcaagcgaataatttgagaggtgtagtatgtgtcgatgcttaatattattatctacatataatggcgaaaaatatttaccagaactattggaaagcgtactagcgcagaaggacatatatgttgatattcttgcgcgtgacgatggttctacagataaaacggttgaaatattgaaaaagtatgatagggttaaagtttatggagggaataatttaaaacccgcgaaaagttttctggacttgatttggaaagcggatataaattacgattattatgcgctgtgtgatcaggatgatgtctggaaagaagaaaaaatcatttctgctgtaaaatgtattgaaaatatagacaagcctgctttatacagtagtgcagttgaagtggtggacaaagacttaacatttatccgaaaatcgtttacagataatacatttaaaaatccattgtatgatattctgacatatggaacaccaggatgtacatttgtgtttaataaagcactgatggaaaagctgaaacaatacaaaccttcagtaattagtatgcatgatagctggatcagctttgtgtgtcttgctgtgaatggctttttttattcagatcagaatgcctatatcatgtatagacagcatgatgcaaatgttttgggagcacaaaggcattctctgaaagatacactgagggggatcattaaaaataaaaatgtccttagaagtgatatggcgaaggaaatactaaaagggtattccgagatgatgccagaaaaaacaaaagaagattttatattttttgcagaatacaaagataatttgaaatataaattgaagattttgatgctcccgtataataaaaagaaaacaaccaagagaacatttgaaaaagtaaaacttcgaatcgtgtttaatacgatataaagtggaattgaagattgagagcattgaatcttcaaaaaataaaggaagagaaagtctacaatgtcaacatcactgaaaaaaggactgatgtacgtccttatagcaaattttatcaatttaggatttaacctgataacaaattttgtccttccaaaggaattaagcgtggaaagctacgcaacgataaagacatttcagctttatgtaagttatgccggtctgttccactttggctttgtcgatggaatgtacttgaaatacggagggaaaaatgttcaagatatccgaggagaagatttaagaacaaatctttctacactgaggttttttgaaattgctgttacgattatttgtgcttttgtcgcagttgttttaaagcaagaagttttggtgttttttgcattatcgattctaccgttgaatctggcaaactattttaaacagctataccaagcaacgggggaattctctctttacgggaaaatcatgaatgcaaatacgattttgatcttttttgcaaacatgatgtgggtatacttaattaaaacagataatgcacaatgttttctatttagtaacgtcattgtgtattttatcgtgtggattgccttggaattgaattgcaaaaaacttgttgcaggcgagcatagaggaacttctttctctttaaatgagttattaaataatattaaaggtggtattttgctgacagtcggaaatttgtcatctgttgtgcttacgagtatggatcgatggtttgttaaggctttgatgactacgttggcatttgcacagtattcgtttgctgttagtatggagaactttatgaatgttgcagttacgccagtgactacaacattatataattatttctgtaaggccactgataaatcacagatacgaaaaacaagaaattatgtaatggtttttgcagctgcaattgtttcgtgtgcttttcctgcaaggtttattttagagatatatttgacgaaatatattgattcagctaaagttatgtttttgctttttgcggctcagattttttatattgtcataaaaagtgtatatgttaatttgtataaagcacagaaaaaacaaaatatttatttcataaaactaatgatgattattgttgtaggatttatatttaacattgtctgctatggaatctataaggttaaggaaagttttgcagtagggacactgttatcagcaatttgttggtattttctatgtctgcctgattttaaatggatggaatacaataccaaagagaaattgtatccttttattcaaacatgtgcctttttggtgtgtggattttgttttagtgcagttcctggatttttaatctatatttttgaaatcgcagtagtgtcttatgtttcatttccgagagaagtacgtgagttttcaactaaggtgaagattcgtattagtggtttgaaacgttaagctggaaggataaacatgcataactactgaatatataaatgtctttctgttatatagtactttagctgctttttgcacattttaacttggagtttctgcttttttgcagacaaaaaattggattttaagagatgagaataagatgacagaagtaattaagatactcaataatattataactaacgtactgactgccctatacagaccatgtggcttttcacttcttttgtcttttttttctatgtttttttacttatatgcgtatcgaccaattaatgttggaaagggatggaaggctgcaattattgtgtggcacgatacttttaaggaatcagcgttgttccgtaaattgtttcttttgtgttttgttacttcgctcattttatttaagactctcctaaatagagatctatggatgaacccgttatctaacgttatgggaggttggagcatttgggaaacagtgaatggaaaaaagaagcttacaacagaatgtattgagaatgtgattatgatgatgccatttagtgctacgttgatatggacatttggagaaaggcagaggatgatttggaaaggcataaagataactttttgtttttctgtatccatagaatttcttcaattgtttttgagattgggcacatttcagttatcagatatcttttataacacattggggggatgtttaggaagtgtaatatatgggggatgctggaaaatgataggcaagcaacaatgattttcacctattagacttttagtagaagaagtgaagaaacgaatgaaaggtattattttagcaggaggttcaggcacacgcctgtacccattaacaaaagtaacaagtaaacagcttttgccaatctacgacaaaccgatgatttattatccgatgtccgttctgatgaacgctggcatccgcgatattttgattatttccacaccgcaggatactcctcgtttcgagaatctgctgggagatggacaccagtttggtgtgaatctgacctatgcggttcagccgtctccagatggactggcacaggcttttatcattggtgctgatttcatcggaaacgattctgtggctatggtgttgggcgacaacatttttgcgggccacggattgaagaagagattaaacgcagcggtggaaaaggcagaaaacggcaagggcgcaacggtgtttggctattatgtggacgatccggagcgattcggtattgttgagttcgacaagaacggtaaggccatttctatcgaggaaaagccagaacatccgaagagcaactactgcgtgactggtctgtacttctatgataaccgtgtagtcgagtttgccaagaatctgaaactgtctgcccgtggtgaattagaaattaccgatttgaaccgtatgtatctggaagatggtactctgaatgtggaattgctaggtcagggcttcacttggctggatacaggtacacatgagagcctggtgaatgccaccaacttcgtaaagactgtcgagcagcatcagcatcgtaagattgcttgcctggaagaaatcgcatatctgaacggatggatcagcaaggatgagctgatggaagtctatgaggtcatgaagaagaaccagtatggtcagtatctgaaggatgtcatggacggcaagtatcaggaacatctgtattgataaaagaagaaacaacgatgaaagaaacgattgatttacttggaaagatcctcacaaatatcctgactgctctctatgagccgtttggattctcgctcctgctttcctttttggctatgtttttctatctgtatgcgtatgagccaatacatgctggcaaaggctggaagaatgccatagtgacatggtatcagaagttcaaagagagcgtgttcttccggaggttgtttttcttagcttttgtgacctcacttattctgttccgaaccctgttaaaccgcaatctttggatgaatcctttatccgatgtcatgggtggctggggcatctgggagacagtgaaaggtgaacagaagctgaccaccgagtgcatcgagaacgtaatcatgatggtaccgttttcagcagtagtggcgtggacgttcggagagaagataggaagcggctggaagaagatactgtggcaaagcggaaagatagcatttatcttttctgtaagtattgagatgctacaattattgcttcgcttgggaacattacagctatcagacatcttctacaatacagtcggtggaatgatcggcggattgatgtattgtgcggtgataaaggtaagaaagcgtctgtaaaactggatgaaattgtgatatactgggagcggtagctccctacgctgctctgataagttacacacctctccgtggtgagcagcaggcaacggtcttatgactggctaagaatgcgagggaagaagattagctgaggaggatacagtctatgaaaagaatagccctgtgtattggcaatgatgcgtactctattctgccagccctgaattgcgctatagctgatgcaacagctatggaaaaagaactaaaggctcttggctttgacacggaattaaggacggatcttgatagaactggtttagcagatgcaattttttcatttgcagataaaatagagaattatgatgctgctcttatatactatgctggacatggcttccaagttgacggagacaatatattggccccgattgaacttgatatccaagctagacccgaattggtaaaatataatgctttcccgttatctgaattaactgaagttttaaatcgatttccaaatcaaaccaaaatagtcatccttgatgcttgtagagaaattattgggcatagaggcgcgataaaggattttgcaccaatttcagctccacaaggttcagttattgcttttgcaacatctcctggacaatcgtcaaaagaaaatgtgtggactggacatggatactatacagaggcattattgaagtatatgtccctgccaagggtgccgatagaaacaacatttaaaaaagtaagagaattcctctttgctaaaacgagcggaaaacagattccttgggagcatacatcgcttgttggagagttttattttaatccagatacaatttatgatggtgcggcatacagtttagaagcttacagtgataatagatttagatttagcactgatagtaaaattaaaggaattgttgatggattgaaaagccactcgtggccacaacaggaaccggcagtgcaatctgtaaatggaattgattttcagactgcaagtggtaatgaactgttcgttttgggacgaaatatttaccaagcggcagacggaaacagttatgcttgtcacagatttatagatggattttcggaaaacagtaaaataccaacgcaagcaaaattacatatcttgaatggtatggcttatgagatatattttgactcatcaaataaaatccgaaatctttttaagttgggatattatcagaagatcatagactatttggaacaggcagagttttacgggagcagagactttattgcggcaaaattaagttcagtatctgatagaccaatttatattccgggtcaaaatgaagcgatggaatttgtgattcagacacacagtgaagatatggacagatgtgtggataatattacatatcatgggaaatcagtattttatgatgaagagggagttgaaaagccgaaaacaatggattttccgaaaaaaacaactagctataggttgatgcaggaaattgctggaaaggttgcagctccgatagatagaataaagctacaatatgatacagaattaggtgcagatgcaagcgttattattccacaatacggttttgaaatcaagttttaaattaatacagaaatgaggtatacgtcttatgcccagaacgaaaggcagcaaaaaccgtcccaaaatcaataccaccaacgactacgcatctcagattgctgagaagcaggagactattgcgtctctgaataccgagatcgcatccatccagaaagcgattgaagagcagaagaacacactgaaagagaagaagactgctctgaagaaggccgaaaaagaagtggcatccatggaatcgaagaaggcaaaggcagatgctaaggccgctgaagaagcgaagaagaccgaagcagaggctgtgctgaagaagctgctggccagcggcatgagtgcggatgaaatcctcgaaaaactgaaatgagatcggccgtgtggacaaactgaattccagaagttcacacggtttttttgaaggtcgctatatagtttataacggaaataaaagaaatggagtgtgacataaaatgaatttatcaaaaatacaccacattgcaatcatcgtatctgactacgaagccgcaaagaatttctatgtgaacaaactgggattctctgtcatcagagaaaactatcgcctggagcgcaaagactggaagctggatctgcgtgttaatgaacacactgagctggagattttcgttgaggaaaacccgccgaagcgtgtgaaccgcccggaagcctgcggtctgcgtcatcttgctttctgtgtaaagagtgtggagcagacagtgaggaagctggcggaggtaggaattgaatgtgagccaattcgtgtggatgattacaccggcaagaagatgacattcttccatgacccggatggactgccgctggagctgtatgagtaaaatgaagaaaacaagaaaaccaggcggtggccggaagaagctgaagccggagtacgatgccgggaagaatctgaaagagcagatggatgctgctgtgccgctttataattctgagatgtccttgcaggccatcggcgatgaactgggattaaatccaataaaagtaagaaagctgctcatcacggccggtgtgtatgaatctgaagtggcggagaaggtgcaagctacctttcaagaataccatgaaacacaagactacaaaacctccatactctcaactgcaaacattctgaaactttccaaagcctccgtcacctcgtacctgccatatcggaaaggtgtgtacttcccaagcacagcagaaaaagggaagatcagtgtcggagcagagcggcagcggagatacagagcaatgaagcggtggagggttgatccgacagaagaaaacttctggggcgtggttgtgtcctatgccggggtaggatttaaaacctactctggattgccattctcttacgaaataaaaaaaggcaggaacggtgagtacacgaaagagctgtggatcgaccgccgggagaagagtaagagtttggcatggagttctatcgttttggcgctgaagaatattaaaggggaggtagtagaccgcccgaaagctttgggtgatatccggggcgtgacttacatatacggaatgttctatcggtttgggctgatcgatgtgccggatgaagtaaaggagaagatggggcaaccgaaaaatcgcaaaaaataggttgctatgtacagaagtgtgcggtaatatgtgccgtaactgaggatgtgaatctcagttgggaaggatggtagcattatagaaaaattgaaggaaatgctggagaagtatttaaagaaaacagagccggagctcaatgtcatcttaacttaatgacattgcctagtagggcggattttttaaaatttcaaggtacggattattacatgcttatatataaatatttttcgggtttgttaagattttaattttaagagtagtattatatgcatatatatagtataattataacaactgatatcaatatatagtacgtttgattgcgggagaaaatgattatgtatatatgtgaagaacttatggataaaatcaatagtaaagatatcaatgcatttttaaaagaaattgaaatatctcctaatgatgagaagtatccaaagaatcgtaaaagaatgttcgaggagcttattttagagggaataattgatgaggagacactttcgagtttcttttatagaggaataatgtgtggtgaacatcgtcttataagagtatataagctgtctgagagatgttgcaatttgttaagaaacagaagctcttgggatgattttatgcatcattatgatgtgagtgagctacagtacaatcttattttaacgccattaaagtacaaatcagaaactgcaaaactggtttatataaagagttttaagagcagacttaaatcaaggttggcaagaattgatatgatttatgcttttaaaattttaaaatcgaacaaagagacaagagcggtagaagaacttaattcatacttaccggtaacgattgatttgataaatcatgaacttattattaaggtatgcaatcaatcggggatattggagtccagtcgaccaaaaaaacagttagatgccgtgtttgatgaactgaaggctgatctgaaaatagagttgaacaagaacaaagtcagacctgaaactgtgctatatgatatgagtagagaactttttaataatttttacaggcagttacctaatataaaggaacttgatgagaaaagaaataaattgtgtagagttgtagatttgttattacaggatatcaaacttaatcatagccaaaaagaagcggatggcatgatacatattgatcccaatcttattgatttagaggatgagttatacaagcttctacagcaaaccgtattattggattatttggagactggagatctggaaagtctgttgccggatgatacgatatatatttccaaaattcgttttagtgatcaggataatctggaagcatcattaactggtgagaatggcaaggactgcatatatgacaagcgtacatttatgggaattagaaattctctcgatattgtaaagcgtatagtttctatgagggtaatttttccacagaaaaagggaaatctgacagttaagtatgatggaactgatgataaattcattggagttcatattttagatagcagacattacaatcaggatgagttgaatgaagcatgggagctttatagagtgtatgaaagacaaagaattaataaagatatgctggcaaagagtaaaggacttaagtcgtcggcaatataagaatctttcgttggaggagatatctgagctgctggaagtcgatatggaaactgcttcaagtgtgatatctcttttaaaggagcagggaattataaatgaaaaactgcatgtgtattgtgatgaatgttcatcagagaatgtcatagagtgtgatggattttatgatatacaggatatcagatgtcatgagtgcggtaagcagattgatttagcagaggcaaatgaacatggaataaggagatattctatagataaagcaagtctggaagaacttgtaaggaatgactactatgatatttatgaaagctgtaagactgagcgtaagattattgaaatcgatcctaaactgcaggcggttgagacaactaaagaggtaattaaggagcgtgatactcccgacaagagtgttaatgagcggttatcagccattgaacgtagaaatagcaatgaagatcgtattaagagtattttggggctttcattatggatagttgtaatagctgtattgactgtagaaattttagatttcctgatagatgtattgtattttaaagataatcataattttatctttagtacgtttataaaagctattaaaggtagtgtgttggaacactacactggtgaaatactaggaggagtgatagctgtgattggtgctatatatacattagcagtaaggcagattaagtttcattgggatgatattaagaataaatttgaactttaaaaatttattcattaaattgtttggcagatggaattaagttttggatttcattgaaagaggctacaatctctgcattcttggtgaatctgatgcaggaaagtcctatcttgcaatcgctatcgtgaacctgccaccaagaaagatgatgggcattgattccgagggtatgctaatttcagcagtacatgaggaagacggtcacgaaggactgaaccttctgatggtaaatgacagaatcccagcaggtgcaaagctgtactaaaaactatatgataataaagaccccattggatagagaaaactgtctgatggggttttgttgaatagtattgtgaatattggagattatatggcatataatatatttaaaacttctaagatatataatttgacataaaacaaaaaaatgttttgaccacagaaattggacgtgatatactatgtattatgtatggcaaaacaaaatgttgatttaataggaggcgataacatgctgattagctataaatataataattttctgtcatttagacaagaggcggaatttactatgttggctccaagttctaaagtaaaaagcagatttcccaataactatgtagagcttgaaaatggatatcaagtattaaaagatgcagttattgttggtgaaaatgcaggtggaaaaagtaattttgttagaagcttaaattatttcaagaacttttttgttgatagcgatagtgcaaatgtatcaaaaaatacaataaataataataatattaatgggaaatgtcctttgaagtcagattttgatcagatatttgaaatggaattgactaataaaggggggcgaatttttaggtatttgttgcatgtggattatatggggattgtagaggaaaaacttgaagctaaagaaaagaaaacagtttcatataagccggtgcttcatgtaaaaagatcagagaacaattatgaatgtgagtcggacagggataactgtaaactagatgaatgcaaattaagaggagttatgtcttaccaactcacaattccaggcattagtgatgaaataaagaagatgttggaagaaacaattgaggatataaatccaataggattgtttacaactaaaatggctctattgggaaataaacttgcaattgaatttattggtattgttaaaaacgatatttgtccggagtcggttccgcttaattatgattttgtgctttctgttcaaaaggataattctgattataaggagatactttataaaaacgagttttttgaaatatttaaaatggttgattacagtattagtgacataaaaattgatgatgaaaagccgtttatggagacccttatatatagaaaaaagaaaaatggagatacattctcgcgaaagattggagctgattcgagcggtgtaagagaattctttgcatgggctattcagatttataaagtaatttatgaaaataagattgtaattgccgatgaaatggatagggtgttaaatccaattttgtcggatagagtaatcacatttgttaacagtaaaaaacactttggacaatttatttttacatcacacaatattttacatttagatttgaaaaactacatgaaagaacaaatatatttcgtttcaaaagatgtagaaacgttagagtcagaactatattcattagcagattttccggaagttagatatgaaactacaaagatatatgagttttatatgaagggtatattgggaggtactgcaagtgagtagaaagaaacgattagtagagaaagtttttaaggttttttgtgaaggagacacagaatacaattattttgaatacataagaaaaaataaaaaggtgtctttggcaatacgtcctatcaatatgaaaggtggtggatatgcaaattttcttgatcaaataaaggaagatgctaattcaaattgccttgctaaatttattgtgattgatggggacagagcacttagctttccgggagaactggatgtattaaaagggataatagattattgtaagaaacagaatagcagtaaaagaactccacatattctaattattgattatccggattttgaatatgttgcttgtttacatacatacgcatacaaaggacaaaaagttgaacagtatataaaaagagaattgggatatagggacgtagacgccttcaaggcagatgataaggtttttaaggtgttggttgaatcgggaaaaggatctatagagcaattaattaattctgttaatcatgctacggcaatagtgaataatgatttttctattaacaaaagtaaatatgagatatttgttaagtctacaataaatatgagtaaccttggaaaaaaaggaactaattttgatgacttttataaggtcttgggtgaacttggggttgtaatttaataatattgaaggtgtatataataaaaataaaattcatgatggtgtgaaatgaagggagtataaaacagggtcgggaactaaagaaaattatagaataaaatttaaaaattaaggatatactatggatgagaagcaaataatagaagaattaatacaagattgggcacttgaatggaaaagtgatcaagaattattgttcaaagaattgtttttagctatatactataaaacaaaaggtaagaaggaaaaaaatcgtaaattgaattttatagggaaattcatatttattggagtaatttttataggcatattagctttggtggtattgttgtatataggaataaaaaataaatggaaaaagtcggattgtatatgggcagagtcggttgttttatttattatagttgttatagctggacttgtatcaaaatggatggatataatgaagtatcaagagacatgggctagacattccatgttggttcatgaaatggaggccgaaatcgttaaatatcagtatggtattaagcaatatagaaaaaatagtgataaaaaccaggtatttataagacgcataataagaatatgggatactaatcaattaatattttcagataatatgaaaaacaatgagaggatattaatggattattttaaaagtattagtaaatttgcgtaaaaaaacatatgattttaagcattttatggaaaaaacgacataatatatgttgtaaaatgaaaaatcaaatgatataatacaaatatattaggtttctataggaattatgaggattgggtcgaatgggaaataatacatccgttttaataagatattcgaacgcaaaccgatacaaatttcaatggtatgcggaatttttacgatttattggttattttgtttgtgaatatttaaaagaagacaatgattcatacgaattagatgaatacatttatgacatagaatttgatttggataatgatgaaaaaacagaaatttatgatggtatattaggtgtattaggtaaatttaaaggaaatgaatatgaatatgaattgaattatttgaaaaaagtatttgaaaattataatttatttcaggcggctgttacacttcaatattttagcattaattcgacggtcacatatatggcaggtaaatattttaaagaggctgccaatgagctagatgcatcatataaaaaatattcagacactaatatcctatatgaatttaactatgcacgactatattgccgacaaaaggcgaatttagcgtgttttttgtgtaaaaagccattatattatactgagaatgaacttggcagtatgtgttcgcaatttgctgacgagtttcctggtgagaacaatatctatatgttgctcggattgatatttgagaattctagtcgtaataagatgaatgcagtaaatgcttttattgaggcaaaagacaggataggcgaggaaccgtacgtgtcaagtgtactttataagataggtaaggcttgtgagggagaggagaatctgcgttggttgatgaatgatgcgtatgaaaatgcatataacataatgccgaaataccgtaatatatataaagtagcacaacaatatatgaagatggaagtttataatgaggcaatagaatattttgaagaatgtttgtgtaagcttggcaatagaaccgactatatggatccattagaacaggaatatttattcaaagtcaatgctcatttgtcgtatctgagtattcgtaacaatgattattttagtgcagtagaatatgctggaaatgccaagaaacttaaacaacgtataaaagatgacattgatgataaggatggctttaatagattttactatgaagtatatggaaatactgaatggaatgtagaagagattataaatattgagctgaatagaatggctgaagataatattgatcaatatctaggaaccgcatatcataatatgggattagatgatattgctacaaaaattttaaatactgcagaatgatagggtgcgtaagatatttaatgatattttacgcatttctttttaagaagggaaggtagtaaaaatgaataacaaaagagaactgttgattgtacaagatgagcaaaaagattggaaaaagggtgaacatgagatatggcatccattatatttagatggatataaattggggcttaaaaatatatttacaaaggcatatggagaagacatcgaacaaaacagaaaggagcctaaaagaatcataagagatgaacaaaacaatattttatcatttattggaaaacgtggttccggtaaaacgacagcaatggacgaattttgcagaattttggattcgttggatgcaaaagaagaaagcagatggtggattcaacagactgaaaatagagagatatatgatcagttaaagaatagatcgtttaaatttcatattttacagcctatagatgcatcactttttgacgaaagtggcgatttatttgaacaaataattgcaaatttatacagatattttgataagcaagctaaggaaggatatatagatttatgttcagagaataattcctgtgctggaatgtacacagatattatgaaacggtattatagcaacattggtgataaagccaataggggtacatatttttctgttgcaaatatgatgagctttgcgtctgacaataatgaaatacaggaaaaaataatagaattgatagacgtgtatctgaacggtcgaaagtgggattacgagtatatagtaataacgattgatgatattgatttgaatattggactcggatataaaatgttggaacaaatacagaagtattttgcatatagcagaattataattcttgtatcaatggattatgatcagatgagaatggtatgtgaaaaacatttttggaattgccttgggggaaaggacagaattactagtgaaaagtataatcaacagtatattaaaaatctgactaaagatgttatgacaaagatttttcatatatcgcagaggatatatcttccggatctgggcgcaattttgaaagagacgcacgtaaaagaaaatgaaggtgactctggaaaattaataaaggggtacattgttgaaaaaatagtaaaaaaactaaatatatactatgatcttgatggtatgaagaaacattttgtcgaaccggagacaataagagaatttgttgtttatacagaatttttggattcattggatgatattgagataaaacgactggatattgatccggaagatgcactaaaaatatatgatgcaaactacaaacttttttctaaagatatagtcgagcggatggctcagaatcttctttcagcagagcaaatggttgcgtttagaaaattgcaatcacgtgatgtggaaagaagagctaaatatttcgtgaattcatatattgatgagagtggaaatataatttttggaaatatagatgagccttcaaatagtaagacaactcatctaattaataagaagattaatgcgttaaagggaccggagtatagctatggggagcttttggaacagatttacgtctggggtagaataccggacagagattgttttgatgataaaccttatatatggtgtgttttggcaatgtttacaactgatatgaccaacgcatacatacattttaaatatgacgtcaataatagcaaaaaaaaatttacaaaagaaaaggtggattacaaaaagcagctgttaagctttattggggatggatttggaagtgcatggctcaaggatgcttttcccaaaactccatatatacctttgactgtgaatttttcaaagactactataaaagatacagtgaataatataaagatgacaaactatggttttgataatagtgtatctttgcgtggcttgaaaataggcataccagatttattgttaaaagagaagcattatagcagcgtagaattaaaaaaacatatatatgaatcacatattattcagactatggcattgattgatatgtgcttttcgaagatcgttaatggtgagattaagaggataaaattttcaataaaaaaagatgacacaaacggtttgtatattggcgtaagtagtgattatagtgtgaatttagatatgatgtcttttgcagtaaaagcaattgagtataaagaatgccaggaagcattgataaataatatcaaggaagtattgattgaaatattgaaacatgtgaattttaatagcatagacattaaaaccttagatatagaaggatttataaaggaaaaactaccttttagatatgtgaataaaaaaaataaagatttatatttcccattttatgatctggatttatcatataatgtgcttaagcgtgttagaaatgaatttaaaaatacgtcgaaccctgcaccggatttgagtactgctatgagaaggttttatggaaaaatagcagagcttcttgagaatgaagataagaaatatttggatttagggatagaaaatccaaaatttagggataagtacctggcatgtccgtttgtaaaggcagtgttggatgtaaaaaatcttgatatggtcaaagcaataaataactttgaagaaatcttgattaataatatgacactgactccgggtggagatgctggagttgcaccaattcaaaatgtggaggaataaatggaattctcagattacagagtaatattattttttagaagaactcttccaagtattattttaaagaatgatgaattttataaaaggtatgattccacgttgtttgaggaaattgttaggcatgacattgtagagatgacagaatcagaagcaaaatatgcgtacaattatctggataatttatatgatgaatattctgccgaaaatggattgaatgtattcaatgcgttatcaagtgtagcatcaaaatatctaataattagagataatttaccggtgtgtagatatgatagtatacttgaatggcataaattggtggaaaacgtaggggaagatttgatggtatgtgcatttttggcacaaaagtcgaagcttgatggaagagaatggaataattttgcttggaatccggttatagggcatgataatatgcaattaaataaggtaatggaaagaggactttcggataatcattaccatttgtttggctcatcacctacatttaagcttatatggattaaactgatgaatgattttgaggatgaggaatatgtaaatgcattgatgaaaatggataaacattatatgtcagctgaaaaaagatattcgggtgtggaagagaaaaaatcttttattagaatgaggtttcaagcagcaataataagatattaccttaattcatatatacgaaaattagagcagcgaacaaacatagaaagcttattagaccgttgtcaggaaattcaaaaagtgttagagaatgagaaggatggattcttttattataaagaactggagatgagaattgatggaaaaaagctgaatgctattttgccaaatgggacatttattgatgattacgcctgcataggactgataaataatgatataaattcgtcatttgcaggtgaacgttatttgatgtacaggatgcttagaggttacattaatggtgtaaagataccggataggctgatgaattggttttatacatatctggtaataaaagcgcaatttagatttgaattgattcaggtaaatcaaaaggtgggatttgacaatttctcatattacagtaaaagaaaaaatgaattttttaataaacaagctgatgtttttaatatgataaaacatgctgtgggtgaaagtttttatacaagaaatttacgttcattagagattagaataacgcctaagaaaactgcaggacagaatatggaatatatagagacgtgtgatgaatgcataaaggaatatctaggcgatagtatatgtgctgatacatattatgtgtttcattttccgaagaaaggatataaaaagactgatataaagtatagacttccatttatagagtgtcgtcattcccagtatagagaaatattagaagaagtatcagaagaaataatttcatttagagaattgtatccggaacaagctggtagagtacttggaattgatgcatgctcaaatgaattaatatgtaggccggaagtgtttggaacagtatatcggaagcttcgccagcatattagcagtatgcagcaacttaggatgacgtatcatgtgggagaagagtggaaagatgtagcagatggacttagggcgattgatgaggctatattatttctgaatatgggaaatggtgatagattgggacatgctacagtgctggggattgatatagaggattggtatcagaaaaaaaataatgaagtgtggctgtcgtatcaggaatatttggataatatagcatggatatacaataaacttgttgaatttgaaattgcagactgtgaggctgttaaaggctatctggaatcggaatttgataaaatgtacgccgatatgttcgaaaatgtgccgtatacaagggggattgaacgttcaattaatttatattatgaaagctggaaacttcgaggtgatgatccaagcgcatatattacgggaaaatatgtatcgccggtaatatttaaatggtattatgtgaatatggagatacaggaaggaaatatcataagagataacatgacgatatccaaattggtgtacttataccattattcaacacaggtgaggataaatggagaaaaaacattacataaaaaagtgaatacgatgtatataacatgtatgaaaaaaattcagcaagctatgcagcgaaaagttgcaaaatatggaatatgtattgaaacaaatccaagttctaattttaaaataagtacacttgatacatatgaagaacatcctattactaaattttataatatgggattaacatggaatgaagaattgctggataagtgtccacagatacattcatctataaatacagatgataaggggctatttgacacatcactggaaaatgaatatgcgttaataggtcgctcactggagaaaaaaaattataataaacagtatgtgtatgaatggctcgataggataagagaaaatggaaatcaacaaagctttaaaacaagatataaggatgatacctga

SEQ ID NO: 316 - DNA, 17060 bp, unidentified
  source 1..17060: mol_type = unassigned DNA
ttatgccaattcagcaaagtacttaattgtacgaaccatctggctggtgtagctgttttcgttgtcgtaccaggaaacaacctgtacttcatacagatcatcagcaatcttggaaaccatggtctgagttgcatcgaacagagaaccgtacttcatgccgataacgtcagaagaaacgatcggttcttcattgtaaccataggattcagtagcagcagccttcatagcagcgttgatgccttccttggttacgtctgtgcccttaacaacagcagtcaggatcgtagtagaaccagtcggaaccggtacacgctgtgcagaaccgatcagcttgccgttcagttccggaataaccagaccgattgccttagcagcaccagtggagttcggaacgatgtttgcagcaccagctcttgctcttctcaggtcgccctttctgtgcggaccgtcgaggatcatctggtcaccagtgtaagcgtggatggtgctcatgataccgctctggatcggagcgtagtcattcagagcctttgccatcggagccaggcagttggtggtgcaagatgcagcagagatgatcttgtcgtctgttgtcagagtttcgtggtttacattgtaaacgatagtcggcagatcgttaccagccggagcagaaataacaaccttctttgcacctgcatcaatgtgagcctgtgccttagccttagaggtgtagaaacctgtgcattccagaacaacgtcaacaccgatttcgccccacggcagttcagcagcgtttgcctttgcatagatggtcagggccttaccgtcaacagtgatagtaccagcttcatcatcagcagaaacagtgtgcttgttttcgccgattctgcctgcgtaaccgccctgtgcggtatcatacttcagcaggtgagcgagcatagacggcttggtcaggtcgttgatagcaacaacctcataaccttcagcaccgaacatctgtctgaatgcgagacggccgatccggccaaatccattaatagcaactttaactgacatttggaattacctcctaaaaatttatactcttattgtacaccaaaacggtgaaaattgcaaggtctttctataaaaaaattgacataaaattatcgtttcttccgcttttctctattttgcacaaatttcaacatgtttccatctacgttttatcggcaaaaacacatttgatagaaattgttctttttttctctctttattttaggcagtttcgggatataataaaaagaagtatttgaaccgttgccacgagaatctatcttttctttcaaattgtgcagaatctttttctacatatgaagaaaacatttctttttcgtgcatattctgtaaatactatgactttgacagaaatgacactcaacagaaaggggtctgcaatgacgacagaaacactgcactttttaaaagccctctatgccaacgaaacccgtcaggtctgggttttcgatgaaacgaatacctgtatttggaaaaacgatatttccaagccgttacaatcagaagccgactgtcaagcgttgctgaaaactgtagctgctaacacaagcagccaactattctggcatgaatcgcttttgtacgctgcggaagttcagcagagcacagaactgcactgcaccatcttaaaaatcacagccgagccagtcttgaccaacgtcatgaaagaaaaaaatttccgggcaatttgtcaagaatttctcgccaatcaacgagaggcagtttttcagatttccaccattgcggaacagatctatgatgaagtggaatccaacaacattggcgacttggaacaggaggagattttctccaatttaaatgatgtcatgcgtgcatgctgccacctgctgcggcgtaccaactattatgcagagttggagaaatatgcagaatctgagagcatggctcttcaaccgatagaactatctcgactgttgtttgacttttcacaaaactgcaaggaaacactgggacggagaatttccatgaaaatgcaggcggaaacaaaaatctgggtgctctgcaacgaagcccgactctgcttctcgctgctctgcctgatgacacagctgctggctcaagggcagtcagaattaacacggactgtttttctgcatgttttttccaaggaaaatacagcaaccatttccattcaaacagaaaaaatcgaaaatgatttcccagaaatagaacctacagtcctgtttcagtcaaatgaagaagttgcaaagcaggattatgatcttaccaatgcagtgctggagaatttctgcaaaacgtataacgccaaactagaacgcaccagcaccgataccaagcaaggctatctgttaaaaattccggtttacaatgcacgcagcaacttgcaattacatgcaaatattccacgccgcagacgctccacgttcttgaacaactatcaagttatgctgtatgatatttccgattaccgattttattaaatgaaaccagataacaaaaacgtccctgtcgaagttgacagggacgtttttttcatctcatgcaaaaagaaaatttccttacagtcttttcttctgattttcaatcattgctaccaaatcatctaccgatgcagtatcataagaagacggtctgcgagatgctggctttgcagcaggtcttgcagtagatggctttgcagtggtggaacgctgcggtgttctggatgtggaagtgctccgtgtagcgaatgggtcgttgccaaagatatcatccacatttggacgcttgaatgtaccagtggaactcaggaatgtcttagaacctgtggacgagctgccagacggagcttcatgtgcaccatggtaggtctgttcctgctgcggtgcttcctgtaccggttctgcaaccggagcatctgcaccatactttccaacatagccattggtttctggctgctgcgatgcaacagattcatatggctgttccggaatcggcacattcttttgtgcctggaactgcatggtctttgccttctggaatgcagaattcggattgactgccttccgttcaaagttctgcgagatagatgacttcttggtttcaaacgatgaagtctgtgcgttctgaacagccgtatttccataacttggatagctgctgtccatgttgtaagaacctgtgttatacgttccggtgttgccgcttctggtctggtaagtcgtctgcggtacatcgtttacgaagtcctcgtcttcatagtcttcatcatcataattgtagtcttcttcgcccggcaattcatcatagctttcttcaaatgcatatgcatcatcttcccgcttgtttgcacttctgcgtaccaatgcaacaatcagcaacgcaatcagcaatacgcaaggcagtgccagcagaacgataatcccgctgaatccggttgcaaactgaataaagctgtaaagctgagcactttcataacggcaaataccacgcacactgtctaccgtgattgctggttctgtaccgatggtgtccacctgcatggtggtcggataatacttcatgatgcccgtttcttcatccgaagcaatgttcagaatccggcggattgccatgccttccttgtccttatcggaagaagtgtcttccggtgctaatacgcacaaaatcgcattgttcttggaaagcggttcgctgccatcgtatgccttacagataacagccgtttttgcgtgaatggatgcactcgcatcaatcgtggtagaaccgtccgtgctcggtttgacttccatgctgtctgattccatcagatagacatagttgccaaaaattttcggcgtatcatgctgcgagaataaaacattcagcgtcagcgtgatcaggacaacgatcagcaggagaactgcggcaacgatgcccaaaatggatagcgatttcttttttttcatgatgttcccttcctttgacacagtttgtatttctcaccttattataacatactttttgggaaatttcaatttcctttttgctttttttccgattttttttactttctgcaaaagatgccgattttctgccgtttttggcaggaaataaagagattgctctcattataccatacttatttttaaatttcaactgcaaaatgcaattttcagatatttttttgaaaaccccttgacaaatccaaaaaacatgctataatatacttgttactgtgcaccgcactgagaaaaatctgataacatttttgctggaatagctcagttggtagagcagcgcattcgtaatgcgcaggtcgcgtgttcaagtcacgtttccagctccattttttacctaaatttcaccagtggacaagagcgggcaagcaaagagggcacaaagagggaaagcgaacggacagggggcaataagaccatgtggaaccattctgaaccagaagattcttttggcgaaccgccaaagtcgcacacaaaaggaaaaggcattgcctttgcacttgttccaaccattttgctgctgacgggaatcggattccgaattgcccgcactgctcaaaaagcagaacgtctgatcaaccatcacgcatccactacagtgacaacaacggcggtcacaacgccaaccaagccagcccgtgcagctgccaagcaggtgaaaaccgaaccggcaaccgctgcaaagactgccgctcaggatgttcgcaacggaatttatacttctggcgactatgaagtaggggttgacctgccagccggaacatatctggcggtctatgatggaccttccggagatcagaagtttgtgatgcagatttcttccagttctgacccgaacgattctgatgcagttttgacaagtcaaacgtttcatccgaatcaggtttattttcaggtgatagacgggcagtttctgcacatctcatgggcaaacttttatgatatcgaacaggtttcgattacattagaaccatttgtacatgatggtatgtaccaagttggaaaagacattccggcaggcacatatcaattggaactggacaagggcgagtatgtttatccggaaaccgctggttatcagatttacagtcaaatggcttctccgcagccgcttcccaaatccaaaggcagttataccgattccatcactttgcaggatggggaatatgtacagttagatgattgtcattttcagcaaaatgccggatgattccggttttttgcgggcgtagtttagtggtaaaacatcagcttcccaagctgaggttgcgagttcgattctcgtcgcccgctccaaattttaagaagcagtccgatttgttcgggctgttttttcttttcaacaacaaaagaccgctatcgtttccacgccaaacgacagcggccttttttcaatcccaaatatgcttgtttattcccttgtttttgatgattctatttttctttcttttcaatcgccatattccgcaatctgcatttctgccccgaaagattcgatgattttcctgtctatttttctacttcagggcagatactgcatccctgcggtcaggctgctttcctcaacttctggaacaggtgttgctgcttcatcaaacagaatttctttgaaatagtctatcttctgaaaatctgccccaactgtttcccgcttcaaagcgatccactgttccatatcaatcaaatagcgtgtgatactgccgtcttcatatttcccgaccagatagcaatctcggttcagataagaaaccgttccaaatacaaacaaattctgggggacaacgactccttccaaatcttcgctgcgtgccgaaaattcctgtcccaaataaaaaatgccatcttcaaaaatagttccatccgccaacatattaacggctgtatcataattcgtccactcgtccgtacctgcatttaaaaccgtatagcactgtaaatccggataaatggtataccagttatttgccgtccagacctgttccatagaaagtttctgctgattcgcatagatgtattcccacgttgccgcttccctgctgtcgctctgggaatccggcggtgacgctacaatccgaaggacatctttggttctggttgccaagtcaatctgaaaggtcgtcaggctgcgaatttcctcgattgctcctgttccatcggatgacatccctgtgtaggaatccaccagcgaaccagaaacctgccgaaaggaaaacggctggtttaatagctgcggttgcaagtcctgtatcgttgtatttttggggttgctcccatcaatggcagttctgcccagcagttcccctgttgcagaggtactgttttccgatgcattcccattctgtgtattggggacaactgcatgagaagcggcaacttctgagagcatttccgttaaaatttccggtgtactaagaaaataagcctgtctgtccaacaaatccattttccaaacaccatctccaacatcaaaatacaaaacgccagagagatccagacagtcagaagaaattgtaatagcataatcccatgtaaaccggtcagtcatctgtacattttcttccgctacatctgcatccgaagaaagtccgctgctaaaattgatgctgtccgcattgtcttgcaaaaaggtaaacagtggaaataattcctcattggtgtagttttcataggtgcgttctgtaatctggtcttcatccaaaaaagtaaaactgccggaggaaatccagtcttttataatcggataatctttgaccgttctcacaacgtccggaatagaaataaacaaatactgcgttccgttccattctgctgctacaactgtttcttcaacggttgctatatctttcaaatagacctgataaactgaaacagttgttgctccgtctgcatcaatcagcgaaccttcacccaacgtgttttgtacttctaccctgtccggattgacaaccgccatttcctgcaaattctgtccctgatactgcaaaacaagtgattgggttgcttttggtgtttcagatgcttccggagtggattctgaagagggaacaaaaacttgttctgtgtgtttcagatgataaccaatcaccgttcccatactcagcagaaagacggctgcaactacaccgccggaaaatttctgccaggaacagcgaatgcgtttggagggcggcggtgcagttttggtatgcagggtttgaatcgaacggttcggctgctgctcggcaagagaggctacttcttctgcatgaatccgctgttgcagtcgctgcaccacggcttccggcggctgcatctgttcaaacattcgttcacattgctttttatccatcaaccgttccctcctcatcttgcagttgcgtgcgtagttgttccctgccccgaagcagctgcatccgaattgttccagcccgttttcccaacaaccctgcaatttcttctgtccgatatcccgcaaagtaatacagatacagcacatttcgatacatgggcttgaggctgcaaagtgccgcaaacaattgattatccgctggcaaatcaaacaataccggcagcggcgtggtgtccgtcagtggaacggttcgctttcggtaagtactgcccgtgattttcttgcagtaattgcaggctgtccgaatcaaccatgctttccgatgttcttcttctcgaaacgtcttgtttgcctgaaaataagcaagaaatgtttcttgaaagacatcctctgcatctgcccgatttccaccagttcccgtcagtgcaatgccatagatgagccgctgatagacctgaattacctgctgaatctccattggctgcacggcttcttccggcgagatgctttgcgagatctgcaacatatcacttccccctttcacctacaactacaagttccgacacaaaatgtcacacagtctgcaaaaaaattttttcagcgattgcaaacaaaacagggagcgtttctcctgtaaaaaacaactccctgttttatgtaattttttaaaatcctgctttttttaattcatcctgaaaagcgggtcttcgtggaaatttttcccgcaattcctgtgccagcacccgagccgcaatcggactatcctctgaaaacttcttcaacttctggcagaccgctgcatattccgagcgatttgctgccgcatccatctcttccaaaatccaatcttcatataattctgttgcccgttccgcaaagggactgcattttaaagcactaaaatacagcagcaagtcagacgggtctttctcgcaagcttctgccatcaagtccactcgattttctgctaatagaattttgcgatacaccttgatgggagcttcttttaacagttgttcgatttttacagatttcaaatcgaacggaatcaacgatttccactcttcataataatccggttcgccacctttcaacaacgcttcgcaaacatccgccagcttttcccgttctcctgttctgtgatagcagtgatagcgacatttctgccactcctgcaacaagcccggcaatgcttggttttcatattccccatccagtgccagccgttccactgtgctttcatctcctgcatcaattgcattttgaattgccatccgtcgatattctgggttggaaagatgccggttgatgaaatcgttctgttcctgcggtgttccatatcgtttgagaatttgaaactgctgttctgccagttctcttcgttcatattctgtcgaaacggcttgccgatattgcagccattcttctaccttttttcgatattccggcagagcacacagagtattcaacatcggagaaaatggattttcaatatctataaaatctacttgcagcatttttaacagaatctgataaatagcctctgctgcttttcggtctttctgtttgacaacaccctgcacaatttgcatcaatgcatccgaacaaacgtcaatctcatcatatacaatccaatccgattcacagctatttgtctgataccatttcttcaacaatcgaatcatggatgcacctgttttcaccttttctgcatcatcgttccaactctgcatggatttcaacagaaatgcaactgttttctgcaattctttccacacgattttcccagagaaaaagcggttgcaagtacgatttagaatggcaagcagttcttccggctgcaattgctctgatacacgcagctgcaaataatccaaaaaaccccgattttcctttgcatattccatcatccatgcaatcagttctgttttctcacaggcagccaattgttctggcagagcctgtttctgttccggttcttccacgaacgaagtatattcttcctgttcccgcaatgcatataaaaccgctgcctcatgcttacaaaattcttcccaatcataagggcaatcacaggaaatatcagaaatttcaccgttttcttccagttctacaaacacggtatagatttggctgccctctacttctgcttcataatatccttcttcgatgcgatccagtgtgatcacatgatgattccggtagtattctttcccacgctctaaaattctcgggctgaaatattcttcaaaatctgttatattcatacttatttttctcccttctgtttcatcggttctgcggattctatatgcttctgtccaattcgattataagcaaagctgataccgaaacacaacagcccgcaaatcaaaaatgctcctgcccataacagcggtgtctgataggacaaatccaacagcagcagcttgcacaaaaagaccatcattgcaatcaagctataaattcgcagtcctttctgatgaaaacggaatcccaccaacagcataccaaacaaaagcagcgttaaaataccactactccatgcagctcgctggaagaatgcaccgctgaccactgcccccagcaaggtcatgcgaataccaaggtatacaccgacaccatttcgattcggatactttcgcagcaaatacggcacattcaacaggaaaatcaaaacgacaaatgcagccagcaaaatcgtatcccatggaatgacaattgctgtatcgtttcccgtctgccgaaacagcgagccgattgcatgccaaaatgctgcaactgaccggaacaagccctccagcagcagcaaacaccagccctctaccatcagccagcccgttacacaaagcgatagaatttccatgcctcgatgggaacggcaatgacgaagatacaaggttacagcaatgtcaatggcaacccatgcaccatactgcaaagtaatatcatccaaaacggaaatttttgacagaatcagacgaatgccaaacaaaaacagcacatatcccagatacaagcagccattttgctttcgtacgtgccacatcacaaacagagctgcttccaacagcacccatcccagcaatgctggcaagatggacaacggcagcagccacagaaatgcgaaaatactgcaaatacacgccatcaaattccgcaggacaggttcttcctgcttgcggtcatagagcatccaaactgcaacggcagtcagggcagacagcaaatattttccggtatcccaaaagaaaaagaaccactgtgcctgcaactgcaccagcagcagccccgacagtgctgtaaaaaaatatccaactccgctttgctctgccggacgcatccgcatgcgataccaaatcaactgtgccaaagtgtacagcatcaaaagaatgccctccgcaagcaataatccaaacatcggcgtatgcatcgctcttcgcaatgtcactgtaaacaaaaccgtgagaatcagcagagaaatcgcattgcagagcaaggtagacagctggcaagcaattccgattcgacggtctgcaaactgataaagtgccgataccaacacgaaaaagaaaaaaatcaatccggtttccagtgcgttcagctgccgaaacgcaaacaacaacgacaatacgattccgcactgtccaatcaagcggaacaaaggcacgctttttcgggacatccaaagcacaaacactgcccagagcaacagcattccatacatcgcccattttccaactacagaaaaataccaataactcaagagaatggacaaatagagaatgcctgctccgcatccggcaacgctcaggaaaaagtagggatatttctttttagaaatcccgtaaagtcccgcagcggaaacgcctgctccgatgacgaacaacccgaccatctgcaagatactgggcaaaaatgcatatccaatgagaatcgctgcaaagatgaaaatcgaagcaagaattcccataacaattcttccgaacttctgctcggtatccattcgctgcggtggcggaacaggttgcatggtttgtgtctgtgatgtccacgaggcattctgttgaaaagaaggcggaggcggtgtaggctgcgtcgtctgcatcggcgaaatctccggagcgggtggcagaatggtgggtggtgcttcctggtgcggcatggtgggcggtacaggtggctgcgaggatgcaggtgcattcttttcttgcaacgcctgttccagctgagcaattcgctgctctaaccgctgtactttttcttcttctggcgacaattttgtcccctcctgtctattttttaagaaaagtataacatagtttcggttctctgtcaacgaacatttcatattcagaagcatctcggaaaatcgctcgaaataccgtttccctgcacgcttgtcatccaaattctcccttttcttgcagcatcttccgccatccctgaaaaaaatctggtttctttgcaaataagacttgaaaaaaaaagaaaaatccgctatactataatagtaaattgctgacatagtatcccctgtgtcacacaacgagagagagaaaggacgaaacagggaaatgggtgaaattcttgtaactggcggtgcagggttcattggaacacatacttgtattgctcttttacaggcggggtattcggttgtcattctggataacctttgcaatgccaaacaagaaagtctgctgcatttgcaggagattaccggaaaatccataccattctatcacatggatatccgcaacgctgacggtctgcgtcagatttttcaaacacatcatatttctgccgtgctgcactttgccggactgaaagcagttggcgaatcggtacagcagccactgcgatattatcaaaataacatcggcggtatgatgacgttattagaggagttacagaaaaccgactgccacacgctgattttttcttcttccgctacggtatacggaacacaacatactgccccctatgcggaaaccgtcacaccactttccgcaagcaatccctacggggaaacaaaaatcatcagcgaacaactcttacaagacctctgtcaggcagattccgactggcacattacagcactccgttacttcaatccgattggagcacatgaaagcggactgctaggcgaagaaccgcatggtattccaagcaacattgccccttatttagcactggttgcaagcggtcagctgccttattttcgagtctatggcaacgattatgacaccccagacggtactggtgttcgggactatgtccatgtcatggatttggcagaaggacacgtttctgccctgcaatacagcatgcagcacgctggcttctcggtattcaacttgggaacaggcagcggttgcagtgtattggaactggcaaatatgtatgaagccgtcagtggaaagccgattcccctgaagatttttccacggcgtgccggagatgtggcaacatcgtatgctgatgtatccaaagccaaaactgtgctgggatggacagcgaaacgcaaccttcagcaaatgtgtgcggacagctggcggtttattcaaaaacaagctcagaaaggagcggattccaaatgattaataatattcattacgaagaagccttaaacaatatcttgattgtcgtcattgcagcagcagtggtgctggtactggtcatgttgctggggtcgaaaaaaagccgattccggaaaaagctgagtacattctttgcagatgatacggttggaacggcaaaacatccgatggaatttaaccgggaatattacatcaccggagaaaagaatatgcggaagcctgccaagacgaagggggcaacccgaactgaaatggtcatgctggtgcagaaagtagatgaacgccggcgtacgattgacccaaatggtacatcgaaactgtacaatgaatactatgaattgattttcaagacccgaaaaggtgaaattttacatatcgtcaccacaaaggtggtctataaagaagtgccattcaatcagcagggttctttgacgttccgtggagaacagttcgtgaagtttaagtatctcggcggagaaatcacagaggcaaaaacgcattataatgcagaagtcatcaacaagtaaggagtcttgattcagatggggttatttggtgctctcaataaaatgtctgggtattctgcagaaaacatgaacaaggtatttgatgaattcctgcctgtaatggattccaaggcaatttgtccaattggcatttccctgaaagccaaagggcttttctcctcaaagccgattgcttctggatttgcaacgattacaaataccagtctttttgttatctatacgatgattcccatcaaaggcgttgcgatttatgatttccgcaatgcaaaaaagttagtcatccgcaatcagattgccaatcaaaaagtgattgatgcgaaattgttgaatcttcgcacgcaggaatttgaggatgtctgcctgcaaactgccccgaaaatcaacggctttccgcaacaggaaacgaacctcaatcaaatgcttgcaatcttaaagccgtatttgacagaataaaaaatagaacagcgtctgctcccgaaaaaggaacagacgctgttttgttttccatcaaaaatttgctcaatatggcacaacaaccgtatcacaagtatcattatcatcactgatggtatgataagttacaactgcctcggtatctttccaggtaatccaataggaaaccccgttggaatagactgcatttccatctgcatcttcgctccaagtgccatattttgtaaatggctggtatccatcatctgttccgccacttccaatcaacgttttttcaacgccatctgcatcgcagcgataaacagaaaccgttccgctgaacaaatccgagttctgtaaaacaacaaggctgtgtttctgatcgggagcatcataatacagccagtccgcttcatcttccgatgtttccccaaacactatgaatccagctttttccacttctgaaagctctgcccgtcgaaccgcagcaaatgccagataattggtcagctgttttccgcctgcctgctgataagagagcagaattgccaaagcctgattcttttgaattgccgtatattccaatggtgctgcatttcgcaattggaacgaatgaaccaccaaggtggattccgcaaaaaaagcatcgtcatattgctgtaaatattccggtatctcatccggctgtaaaatcgtttctaaataggtttgcagttcctctgtggaatcaatacgagtttctgacccatcagaaaaagcatcatttccggtaacggcacaccaattcaaagtgacctccggcgtgacagattgccatacgacttgttcatgatcctgcatctttggaattgccacctgcatccatgcaaattgctggattcccgttggtttttctttttcccagatacaaccataggaaacctgcaaggtttttgcatctgcacctgtaacctgacaggcatatgccttcattgtttttcccatcggtttcaacagcaaaacagactccgcaaaaaaatcggcatcgtatcgttcacagaacgtttcccgttctgattccgtggtgtatggggtcagataagcggtcagttcctccacagaatgaatctccacttccggcggcacgactccggcagacgatgtggacagaatatccgttcgatactgctgtgtaacctgcttttgctgcaacagtatctgttttaaaaggcagaggtcaacaatgttcacctgtgcatctaaattcagatcccatgcagattgttcctctggcatctctccgactgttttttgtcgcagcaaatacagctgcatggaaaccagatcggacaagtcaaccgttccatcctgattgcaatctccaaccagaacggtttttggcgttttcacttgttccgataacgttttcgcctgtgcagagattcccagaccagaagttgccattgcagcactcaataccagtgcagcgatttgtttcttgttcatgtttcgacaccctttctaaatgattcttttttcataaataaaaatccaatttaattataacaaattagaccgctttgtgtcaattgtaaaatacaaaaaaagtgtgaacattttatattaaagcagcatctgtcccctgaaaaaggaacagatgctattttttgaatcgctttcacaaatatgtacttctatttttccctgcatttcaactctatgcatgtcgataaaattgcaggaaaaatgtctggaacatctccggaatatatgcataatgattggaatccgcataaattttgcattctgctgttgtaacaccatctgctttcagccgtcccataagatgtgtgataccctctaaagtagaatcattttctccataataagacgcataatctgcatcttcctgttcaccgccacacacatatagcgttttgttgaaacttgtattccggttaaaataaccatattccgtctgatattctggtgggttcgattcactttccagaaaataaggtgaccagaacgccggactgccgatgatataatactgaaacggctgattttcaaataaatcagactgaaatgctgcgtaatgcgtgaaagtaccgccaagagaatgcccatataaagcagactgagaaaaatcaatggaataagacgcattcaaatatggcattaggttgtctgtgataaacgaaagaaacaggtcttttttctcacaaaaatacgttgctctcaccgcattatcggttccatctaactggaaatcatacccaatgctaactaaaatgacatcttccactgctttttcctgcatgagattccagagtgcgggatgattgccaaaccgccataccccatctgtcatgacaaacatgggatatgttttctctgcatcaaaatccggcggcaatgttacatgtatgataaatgttgtatccagttcttcatcatacatagaaatttcctgaacagaatctgcaatcgaagccactgcatccgcatcaaattcccatttgtctttgaaatcctcgcctgtagaaatggtttctattggctcttctaagacttcatatgtttcattcattacactttgaaacagtaccagcatatctgcatatgtttggtctgactcttcctgcgtcatttccccagttttcacttgctggtcaagataatcccgatacatcggctggaacgcttcaaatgtatctgcatgaatcatttctcctgtatcagaagaatagtcgagtgctccgccggtatatccgtaagatggcagaaatcctgtgtaatacctgccatcaatcaacgctccatgaatggatgtaaacgaattggattgataaaaatcaacctgcttttgatagtcttgctctgaaaactgttcctgatgttcttccatccaattcaagtaatccaagttatcccagagttctacttccacaactggttgctccgaagaactagcatctgctgtattctgccccagcagggtcaatgctccaacggaaacacgtttttgttcctgttctgacatctgattttgcagcgttccgattcctgttttcacttcttctgttgtgagagcagttgtctctgaatgctgctgtgatgtggttgcttgacaagcacagagactcaacaggcaaccaatcgcaatcccaacggtaaaaatttttttcat

SEQ ID NO: 317 - DNA, 7525 bp, unidentified
  source 1..7525: mol_type = unassigned DNA
atgaagggaaaacatagaattattgtatcaacaaagcgcttaaaatatgattttgaaattcgaagaaatctgacggtcatccggggagacagcgcaactggaaaaaccacattggtagatatgattcgggaatacgtaaacaatccatccgggacccctgtggaactgacgtgtgacaaaaaatgttatgtgctcgaaggctcactgtggaaagaacagttatcagcaatgcaggatagtattgtatttattgatgagggaaacgaatttatcaagacagtagaattcgcagatactattcagaaaacagataattattatgtcattatttccagggaatccttgccttctttgccgtatagcgtggaggaaatctatggaattcgtacttcaggaaaatacggaacattaaaaccgtgttatcatgagttttacagaatatatggagcacagactttagagaaggatatcaaaccagaggttgtaataacggaagacagtaattccggttatcagttttttaattctgtatgtaggcaacagcaattgaaatgtgagacaatgaatggaaagtcaaatgttttccattatttaaatatgcataaaaatgaacgcatacttgtaattgcagacggtgcggcatttggttctgaaattgacagagtgatgcagttgatgggtggaaaagatcaagtggtgctttatttgccggagtcatttgaatggctgatattaaaggcaaaagtagtaaaaagcaaatgggcagatcaggtgctggaaaagccgtgggaatatgtggaaagcaaaacatattttagctgggagcggttttttacggcagttttgattgaagagacaaatggttcttaccttgcatatgcaaaaagaaaattaaatccagcatatctgaacgattctgtcaaagattccatactggaacagatgacaaaaattaaattgttttagggaaaaagtgtgataaaatagcagaagatgtgattttttctgcaaaggagtaagagacaatgttaaaaggaaaatgtgtggtactcggtgtgaccggaagtatcgctgcctataaaatcgcctatctggcaagtgcgctcgtcaagcagcatgcggatgtgcatgtgatcatgacggaaaatgcaaccaattttattaatcctatcacgtttgagacgctcacaagcaacaagtgtctggtcgatacgtttgaccggaatttccagttcaatgtcgagcatgtggcactggcaaaacgggcggatatttttatggtagcaccggcttctgccaatgtgatcggcaagatggcaaacggaatcgcagatgatatgctgacaacaacgattcttgcggcaaaatgcccgaagtatgtttcccctgccatgaataccaatatgtttgaaaatccgatcgtacaggataacatcaaaaagctcggggactatgggtttcatatcattgatccggcgagcggttatcttgcctgcggggataccggagccgggaaaatgccggaaccggaaacactgttttcttatattatgaaagatcttgcctgcgaaaaggacatggtcggaaagaaagtgatggtcacagcaggaccgacacaggagaagattgatcccgtgcgttatattacgaatcactctaccggaaaaatgggctatgcaattgcggaaaactgtatgcgccgtggcgcggaagtgacgctgatcacgggaccggtggcaatcactccgccgccgtttgtaaaggtcgttccggttgtatctgccgcggatatggcagcagccgtaaaggagacagcagagcaacaggatattattatcaaagcggcagctgtggcggattatcgtccggatcacccggtcgatgagaaagtcaagaaaaaagacgggaatgccactcttacgatggaacgcacggaagatatcctttcgtatctgggcgcgcacaaaaaaccgggacagtttctgtgtggattttccatggagacggaacatatgctggagaattcccgtgcaaaacttgcaaaaaagaatgcagatatgattgtggcgaataacctgaaggtagccggagccggatttggtacagataccaatgtggtgacgctgattacggcagatgactgcagggaactggaaataatgagcaaagcggatgtcgcatcagcgattgtgagtgaaattttaaagaaaatgtgttagtattaaaatatgacagacttagaagcctattataataaatttaatgaagagaagcgtctggacagccgacacggcagggtggaatttgtgacaagcatgcattatatccatcagtgtctggatgaaattgtgaaagaacgtgcaaaagaggaaatccatatccttgatatcggggcgggaaccggacgatacagcgtaccgctggcacaggaagggttcgatgtgacggccgtggaactggtaaagcataatctgggacgcctgaaacagaagggtgcaggagtgcatgcatatcagggaaatgcaatgaatctgaaaaaattttccgatgattcctttgacgtaaccctgttgtttgggccgatgtatcacctgcatgaggaaaaggacaagcttgctgcgctgcgggaggcggtgagggtgaccagacccggaggcaggattctcgtggcgtatattatgaatgaattttccgttatcacgtatgcgtttaaggaaaaacatattctggaggcgcttcaggagggaatgctcacagaggattatcactgtacttcaaaagccaatcctctgtattccatggttcgtctggaagatattgaagcattggaccggcaggtagaggtcaggcgccggcagatcatagcggcagacggtgcagcaaattatatgcgtccgtttttaaatgcgctgacggaagaagagtttgatgcgtttctgcagtatcatctggcaacctgtgaacggatggatcttatgggtgcaagcggtcacacggtggatattcttgtgaaagaggagtctgaaaacgtatgaaaaaatggatattgccaatcctaatggcaggatttttgctgacgggatgttcttctcctgcagcaacgtcatcggctttgccctcttctacggaaaaaatcacggagacacagatgacggaagaaccgggtacgctggaagaaacggaaaccgggactgcaactgaaacgcagcaggaaccggtgatacagacggtaaaaattacggcgacaggtgactgtacgcttggggcaacacagacgcatgggtatgcaggttcctttcatgaatactatgataaatacgggcaggattatttttttaaaaatgtcagaagtatttttgagcaggatgattttacactgctcaatctggaatgtgtgttgtcaaatgcgaccgagcgtgtggaaaaaacgtggaacttaaaaggaaaaccggagtatgttggtattatgacagacagttctgtggagggggcaagtctgggaaataatcatacgtttgattatgggcagcagggacttgatgataccagggaagtgttaaataaagcagggattatcttcggattcaatgatcatgtggatacctataccacgaaggatggtatcaaaatcggaattgtctccgcaagccagttgtctgcagatgaaaaacatgccaattatatccgggatgggattgcagaacttcgggaagaaggagcggatctggtaattgcctgttgccactgggggatagagggggatcattatccgaatgattatcagcagaagctggcacaccaggtgattgactggggagcagatctgctggtcggtacacatcctcatgtattgcagggaatggaattatacaacggaaaaatgatctgctacagtcttggaaatttctgctttggggggaacaggaatccaaaagacaaagatacggcgatctatgaacagacctttacctttgtggatggggtactgcagacagatatatcagccgatatgataccatgcagcatttcttccacatcagaaagaaataattttcagcctgccatagcaaaaggcgacagaaaacagacgattattgatcatatgaatgagtattcggaaaagtacagtaaaatcggatttgacgcaaatggcagggtaatcatcagggaagagtagggggataatataattttatgtggcaagtaaataataatgataagaggaatcagcacatgaatgcaagtttttggaattatccgtcaaaacagaaaagctggccgatagacgaagaaatggaaagtctcggggaagtcattcatccactcgataatatcggtggatttgatgtacgtccgggattttatcagatgaatggtgcatatcagacagaggaaggggtaagttttacggtaagctcccatggtgccacgagttgtgtcctgctgttattccggccggcggcacaggaaccgtatgcaagaatccgcattccggaaagttataaaattggaaatacgtattctatccttgtttttggcttaaaagcagaggattttgagtatgcctatcagatggacggtcctgccgatcaggcgagagggttactgtttaacagaaaacatacgcttcttgatccatatgcgaaagctgttaccggtcagagaaactggggagaaaaaccggaaggcggaaaggattttgtctataaagcccgtgtggtgcaaagtgattttgactgggggcggtatcggaatctgaattacaaatttgaagatctggtgatctatgagatgcatgtcaggggatttaccaaagatgcgtcctccggtgtaaaaggtgggggaacatttgaaggtttgcgacagaaaattccgtatctgaaagatctgggaatcaatgcggtagaactcatgccgatttttgaatttgatgaaatggaaagtgcccgtgtggtggatggcgtgcagttgtacaattactggggctataatacggtttccttttttgccccgaatacaagttatgcatttcatcaggagcataatcatgagggtgatgaattaaagcgtctgatccgcgaactgaaagaaaatggaattgaagtcattcttgatgtggtattcaaccatacggcagagggaaatgaaaacggtccatgtttttgctttaaggggattgataacaatatttattatatgcttacaccggatggatattattacaatttcagcggctgtggcaatgtcttaaactgcaaccatccggtggtacggaggtttattacggactgtctgcggcactgggcagtagagtaccgggtggatggattccggtttgatctggcatcgattctgggaagagatcagaatggtgcaccgatggagaatccgccgattctggaagcccttgcatttgactctattctgggggatatgaagttgatcgcagaagcctgggatgcgggtggcttgtatcaggttggaagtttcccgtcctggaaccgctgggccgaatggaacggaagataccgtgatgatatgagaagctttttaaagggcgacagtggcgtagcagggcgtgcaattacacgtatcaccggatcctccgacatgtatgatccggcaagccgcggatatagtgcatccgtcaattttctgacctgtcatgatgggttcacgttgtatgatctgtattcatataatgaaaagcataatgagaaaaacggatggaacaatacggacggggataacaacggcatgagctggaactgtggggcagagggtgagacggatgatccggcggttatgggcctgcggcgcaggcttgtaaaaaatgcatttgccgcgttgttatgcagccgtggaccggctatgttttttgcaggggatgaattttgtaatacgcagtatggaaataacaacgcatactgccaggataatattatttcctggctggactggaacagactggaagaatttcaggagattcatgattttgcccgttttatgatccatttccgtgcaaagcatccgattctgcgaagggatacaaagccggcagtctgcgggttaccttccgtaagtatccataatggagagccgaaccggaattatacggactataatacacatttaattggaatcatgtatgcgggaagaaatgccgatgatacggatgatgatatgatcttttacggaatgaatgcgtattgggagcctttggagatgcgcctgccttcgttgccggagtcttatcattggaaacttgtagtaaatactttctgtgaataccaggatggggcagattttgaagcccagacacagggagatcagacacgtgtgcgtgttccggaacgttctacggtaattttactggcagaacatgatttataaaaaagagttgagcaccgctctggaaacagggcgtgctcaactctttttttcggtggtatcgggtctggttgtaatttcactggttccgatgaggtaatctgcagaaacattcagaatctgcacgatggctgcaagatccgcaacggtcggagaacgacgaccggtacggtatccgctgatcgtggacggcgaaacaaacattgcatttgccagctggatattggaaatattttgtttatacataatcagactcagacggtcaccaaaatctttgtatttatttttatcattcgttttcatacaaatgattttatagaaagttgatataaaaaacagagaaaacgcgtattgcgttttaattcttaaataaatggaaaaagatttccaaagagataagaaattaaatccatccaccgtctaaggtgagaatctgtccattcaggtaactgcttgctgtggcaagagaatatgccagtgaagcaacttcttccggggatcccatacggccggcaggaatttcttcgatgagtgcagagcgttcttcctcggagaaacaacggttcatatccgtatcgattaccccacaggcgatggcatttacctggatattgctgggggcaagttctttgcccaaagcgcgtgtaagggaattgatcccgcctttgcatgcagaataggcaacttcgcaggaagctccgacatttccccatacagaagaaatattgatgatatgtccggatttggcatgaaccatggaggggatgacctgtctgcaggtggaaaagacggatgtgaggtttgtcgcaataatccggttccagtcggtaatatccatgtcggtgagcagaccgatataagagatgccggcattgttgattaacacatcaatctggccgaaggtatccagtgttttttgcaccatgtcacagataaaagtatagtctcctacatcaccacggaagcaaagcacctgtatggagtaggttgtttcaagttttgtggcaagtgcctgcagcgtttcataagagttatggcagcaaagagccagatgatagccttcagcggcaaatcgacatgccagggctgcaccgattcctcgggatgcacctgtaatcaaagcagtatgtttcat

SEQ ID NO: 318 - DNA, 12821 bp, unidentified
  source 1..12821: mol_type = unassigned DNA
tcaactgccagaatggtcatgtttggctttttgcaccgcaaaaatcaatgcaaacaatgccactgcaaacaggcattccacaccaagatactggagaaatgtccgtgtttgaaacacttcgcccgaaattccaaacagcatattatttgctcgaacataccaatatgccggtaaaaactgccctgcttttaaaacgccgtcgcttaacatcgactgcggaacaaaaatcccacacaaaaaactcatgcccaagccgatgacctgattccaaacattcaaaaccgtatcactgggggctgctgctgataacaaaatcgcaatggctgcggctaccagtaaaaatacaaagctgtttaatatcgcataccaaagctttccggtaaccataccgccattgaaccaaagtgctgcaaccataaaaatcaaccagacaaatagtacaaataatccgctgcccagcagcatttgcaacgtctgcgaactggaagataagcaagaacagttcgtacggttgcgaatgtcttgcttttgcagtgcaatcaaggtaggagaaagtgctgcaattaacacagacaggaaaatatagggcaaatactgaaaataatagctgaaactttcattgtgggaagctggattcgctgtttctgcaaacgggtcgctgtttacaggaatttcctcagaaagcaccgtttctgccgatgaaattgcatccatacaggataatccgcttgtttcatatgccaatacagtttttacatattcagaaagtgtactgtccaataaggtatttgcatagcggtcatctaaataataatgggtgaatagcgtatccgtcttgccagcttgcaagttttctgcatagccttttgcaatcgtcatggcatagtcaattcgttcatcatagagcatatctaaaatggtattctgctcctgcttaacagaaacgaggttatgatgctttcccaaataggaaaccaatgcttgactttcaggagtctgatcttcatcaaatacacagatgttaaattgattttctgtaaaggaaaagggactactgttgttcgtggtcacaccaatcgcaatcatcaagaacacaaccacccaaatcattgcaatcggcagcttttttcgcagaattcgcaaaaatgccttaaagacttgcatatttccgcctccttgtcagtaaaaatccaatcatcgtacagagcaccgacattcctaaaattgtccccaatttcaccagataccgttgataattgccgtccatattcaggcaataaaataaatcacaaatcaacgatgctggattgatggaatgaaacagcggaacgtgttctgccagatagggacgaatgccagatgccattaagccactgcaaaaacaactcaacattgaaaatgtcattgcaattccgacttttgccccttgttgcagcgttccgaatgaaccaattgaaaaaccaagagaaacgccgaacaatccgctgagaattgcagaaagataaatcaatccaatatttccgacaaactgcacctttaatacaaataccaaataggtaaccgcaatgctcatgcagacggtctgcaaaatatagctgccgaccaagcacgccaactgactcactaattttggcgttggagaacagcattttcgtgctcccaatgcggaaagattcccctgtccattgatggcaatatgcatacccgttaaagagccaaacattgccaccatcgcaagcagattataaaaatagttggtggttgcatccggattgccggaagtcatagaaattttttgattgcccactacagtatcattcaaagcggcaatcactgcttccattttttccggagcggtctgcatcgtctgctgaatcactgccttctgaatctgatattgttcagcaaaggatttgataatggtttgttccacgccattttctgaaaaactgagcgacaaggtttctccagcgtaaagaatgccgtccactttttgttcttttagcaaggataatgcggtctgttcatcggtataagtcaccgcaaacagcggttctttctcggattccagattgtctaatactgtgtgcaagactggctgttccgttgtttcgaccactgccatgggaatggtcgaaaagagcgttgttttttcatagatactcccgaatgcaattttgaaaaatgttgcaaggacgatgggaaatagaatcaaccagaataatacatcctttacccgcaagccgctcaacacctcatattttaaattatgccagaacattgctttatccctcctgatcccgcagtgcttttccggtaatctccagaaagacatcattcaaagtcggtagggtcgtataaactcgaccaattgcaatttgctgctcctgcaaaatgtgcagaacatctaccagattatgcataccgccagaacagtaaacttttaattcttcctgttcataggtcacctgataaacgtgttccaacgcctttatggattgtaagacgatttctggcagcatgggaacttcaatggtaatcgtttcggtattcttgatgatctgcttgagttcttcctttgtcccctctgcgattttctttccctgatccataattgcaatgcgtgtgcaaatctgctcgacttcctccatataatgcgaggtgtaaataattgtcgccccgtttgcgttcaacttttgaatgccctctaaaatttgatttcggctctgtgggtcaaccgcaacggttggttcgtctaaaataatcagctttggtttgtgtgcaatgccacaggcgatgttcaaccgccgcagcaagcccccagaaagcttttttggatagaatttcagaaatttttccagtccggtaaaatgaaccgcatccatgacatactgttttcgagttgccttatctcgaatatacagcccacaaaaataatcgatgttttcatagacggtcaactcctgaaaaactgccacattctgcataatcacaccaatttgccgcttgatgtcgtattgaactggtgacatttcttttccaaaaatctcaatcttgcctttgtcaaacgaaagcagagaaagcagacaattgattgtcgttgtttttccagagccgttcggccctaacaacccaaaaatctccccctctcgaatctccagtgaaaaatgatccagtgcaatgagttccttgtatcgcttgaccagattgtcaatttttacaacaacttgttccatatttgtccctccgaatggctgtgaatggtttataaccttattataaatccaattcaacaaaaaaggaagtgtcaaatgtcatcagttttgatgacaaatgtcacttccttttcaaaaatatctcaaatagaattattcttccacctgtgcagccaaatcgttcagcacttctccggcaacgatcagccctacaacagacggaacaaacgcagtcgaacccggaatatctctccgaacgatacatttccgaaccgttcccggcggacaaacgcactgtgtccggcaagaattttccgaatcatccaacgggcggcgaggctgttcttcggaataaaccacttttaagcttttaatgccacgtttccgcaaggcattccgcatcactcttgccagcggacacatttttgtttcatagatgtctgcaacccgaaaagcagtgggatctaatttgtttccagctcccattgcagaaatcactggaacacctgcattttttgcctgctgaatgatttccagctttccggttacggtatcaattgcatcaatgacataatcatattgccggaaatcaaactggtcagccgtttcgggcaaataaaagcatttatgccgatgtaccaccgtagacgggcaaatatcttgaatccgttccgcagcagcatctactttatacttgccaacggtgctccgcagggcaaacagctgccgattcaggttcgtaatacaaactttatcatcatcaatcaaatctagcgtaccaataccgctgcgtgccaacgcctccacggcataaccgccaacaccgccgatgccaaacacagcaacccggctcttttgaaaatgctccatgacagctttcccatagagcaattctgttctcgaaaattgatttaacaagggtggaatcctcctccgattaacgggattttctttgattatagcatatttttttggaacttgcaaggattttatccgacaaaaaacgggcagggttgcagttccctgctcgtttttctcataaacatcgctaacttacagcaatccttcctgttccaatgcctgctgcaaatctacaataatatcttctgcatcttcaatgccgacactgaaccggaaaaatccatcatgaaaggcttccggataaagatactgccgctcatcattttcgcccaaaaagacaatcaaactttcatcatgtcccagagaaactgccgaggtaatcacgttcaagtgactgacaaaacggttatgggtgtcatggtctgctttcaatccaaacgataaaacgccgccatatccgggttgcatctgcttttttgcaatttcatgaccggggtcatcttccaatcccggataggcaacaaaccgtacacccggaacggttttcaagtagtttgccactttcattgcattttcgttgtgctgtttcattcgcagcggcagcgttacagaaccacgcataatcaaccatgcattgaatgggctgatggttgcccctaagttgacctgtgactgtacacgaatcaaatccaaatattctttcttgccgatgattgctccacccatcgcatcgccgtgtccattgatgtatttggttaagctctcaatggtgaaatctgctcccagttcgatcggtcgctgattatacggagaagcaaacgtattatctactgacaatagaatgccgtgttcatgggcaatttctgcaatcgcacgaatatcggaaactgtcagggttggatttcccggcgtttcaatgtgaatcagtttcgtatttggacgaatcgccttgcgaatcgcatccaaatcagaagtatccacaatggtggtttctacctgaaatttgttgttgaacagttcattcagcagccgataaacggcgatataagtgacactggaaaaaataacatggtcaccgctttgcagcagagcaaaaaataatccggacagggcagcaacgccgcttgccaatacgatgcagtcttctccgccctctaacgatgcaagcttttcctgcaagtattgctgattcgagccaccgtttctggtatacagattctttccggcactgctccagtttaaatcgcttgggtcatatggcaattcataactatttgccatggtaatcgggcgtttaattgctccggtttctgcatccacatcatttccagtgtgtactgcccgtgtctgaaagccatattctgctccataagttcgctttcccattttcttcaccgctcctctgttttttgcagaaattgccatgcggattcgcatggcaattcttgtttctgttccatggttggtttgcttccttattgtggaaaaataacctttctgtaagtatcaaaccgcacccattttgcaaagaacgctgtctggtcagcttcattggttacagcatattcctgtaagaactgctgtacctgttcgttagaatctgccaatacggcaaaacctctgccgttgataaccggaacatggtcataaacataatctgctgccggcaaaatggcagtgattttcttatcccgtacccgtacagcaacctgatcccgcaaaacgataatatcaaagctatccggatactggtaactttctccgctaactgggatttcgtcgccgatggtataagtccggttgactggctgatatttcaagacattcaagctgctggtatcataataaaattcttcaaaaatatcgcctcttgcagtcaaatcattcagacggaaggatgccttttctgtaccgtttgtcaccttttctgcaactgcttctacaacgccgcatgcagaagtcatattggttacacggtcaatcagaatcagttcaccgagtgtcttatgctttgcgaacaaatctacaacaatgccttctgtcagcaacagttcgcagacggcaatttcattcttatgtaaagaatcctttgtgacgtgttcgcctgtattgacatcaattgcatactgaacgtgtgtcagaatgcccggaatggtctttgtacccagctttaccagatagtcctttccgattgccaaatcttcgtcatccatccacaggagcgaaactgtcagcttcttataaacgccaatatctgtatttttcaccagtacgcagccacgggaaacatccacttcccggtctaaagtaatggtaactggctgtccctgctttgcggaagttgcttctttgtctgtcacgagaatgcccttaacggttgcagtttcgttgctcggcaaggtggtaatggcatcgcctacagaaatgctgccggattcaatctgtccctggaatccacggaatgtatggtctggacggcaaacacgctgtactggcatatagaagccttcttcggtatccgatgcaatgtcaacagtttccagatattccagcagcggctttccagtataccacggaatgttttccgaatgggtggtaacattgtcgccctctgttgcagaaagcggaataatcgtgatgttttccagtcccagttcctgcttcagggcatcaatctgtgcaacgatttcgttgaaacgggattcgctgtagtttaccaagtccatcttgtttacagcaaagacaaagtaccgaatacccatcagtttgcagattcttgcatgacgtctggtctgcaccaaaacgccctgagaagcgtcaatcaaaatgactgccaaatccgcaaacgatgcaccaactgccatgtttctggtatattcttcatgacctggggtgtctgcaacgataaagctgcggttgtcggttgtaaaataccgatatgcaacgtcaatcgtaatgccctgttcccgttctgccatcaagccatctaacagtagcgaatagtcaatcttaccgctccggctgccgaccttgctgtccagttccagagccttttcctggtctgcatacagcaactttgcatcatagagaatatgtccgatcagcgtggactttccatcgtctacactgccgcaagtgataaatttcaataagcctttcattaaaaatatccctcccgctttctacgttccatgctgccggctgcttcgttgtcaatgactctggaggttcgttcggaagatacagagcttaacgtttcttcaatgatttcatccagtgtggttgcagtcgactcaatgccacctgtcagcggatagcagcccaatgtccggaaccgtaccgacttcatctgcggaacttcaccgtctttcaacgggaaccggtcatcgtctaccataatcaaatttccgtcccgttctacaactggacgttctgctgcaaaatacagcggtacaatttcaatcttttcccgctggatgtactgccagatatctttttctgtccagttggaaatcgggaatacccgaatgctttcgcccttcttaatcttggtattatagagcttccacatttccggacgctggtttttcggatcccatgcctgtgcttcattccggaaagagaaaatccgttcctttgcacgggacttttcttcatcacgtctgccgccgccaaatgctgcggtaaacccatattttgcaagtgcctgcttcaatgccttcgtcttcataatatcggtataagcagagccgtggtcaaacgggttaatgccctgcttgacaccgtcctgattgatgtattccagcatttcaatgcccttttccttggcaatccggtcacgaaatgcaatcatttccttgaacttccaagtggtgttgacatgtaaaaacgggaacggcggcttttccggatagaatgctttcatggcaagatgcagcattacagagctgtccttaccgatggaatacagcataactggcttctcacattctgcggcaacctctcggataatataaatcgcttccgcctctaattcatccagatgcgaaaattcgctcatatgacttccctcctatttaatattgattcgattctttttgatttacacggatttctgtggtcgtaccgtctgtgcgttccacaatccagcgtaaaatatcgccttctttttcagtatgtaccaaactgcccataccgcccatatctgcccccagataaaaccggatggcatgtaccggacattctttcaagcaagacgtacatccccaacaatccttggggtatttgataaatgctttccggtctgcattcaggtgaatcagtgttcccggacaaacatcatgacattttccgcatccaatgcaggcattttgattaatggcaatgctcataagtttgtcctccttccaccaaatcccggaaaatgattttcaattcgccgttttccaatttggaattgacgtattttctccaatgcacatcgtctttttccggataatccagattttctgcgaagctgtgccagcgagtttcttgccgagcctttaagtgtgcaatcacactccgacagacaaccagccgttcccgcagttcatagatgtacatcagttcctgaaaatcatctgcgtgcagctgttcagaaagctgcatcagctgtacaatcttttcatctgcaatcttcaattgcttctcattgaaccgataatttgttttaatgccgcctgcataggcatccatcaccgtctgcatggcttcttccagctgttctgttgtaaagcgagaaccgctctgcgtcaggaatcgctgtacttcttcagcatgttcggtcacagaagattctgcaatgggagcagcggtatgctgttttaaaaattccagtgcagagcatgctgcgatttcgccctctgccaatgcacctgttacatatttctgtgggcatccgccggcgacatctccagctgcaaacaaaccggtaacggtcgttgcccgatgggtatccacccagtaaccgcttgcagtatgtccgccaacaatatacggctctgttccttcaatttccacattctgctgagatggattctttccgctctcaatccacttcaacgtctgagaaggtgccatattcagataggctttcagcaaagattcatcctgttctggtgtaatcccttctgttcgcaagtaacatggacctctgccttccacattctcatttaccgttccatagactcgttcggaagtcgtcaaaccatacttggtttcataaacttctccatgagaattgatttgcttggcaccgacaccttgtgccagtgttccagttggtgcaatggtatctttacaacgcagggcaataaaccgcatttcaaaggtggtcatttctgcccctgcacgaatgcccattgcataacctgctccggtattaaacggcggataccacatcttgtgacgagaaaatcccggattgtttggcttgtataagccagctgctccaccagtcgcaatcaaaactgcattggcttcgatgacataaaacgtatcattttcaatgccgattccaaatgcaccacaaatgcgattgtccttaactgcaaaatcaacaatattgacccgattcaaaaccgtggtatttggcagagcagaaactgcatctgccaaaatcggcttaatattttccccgttgatttttaagtttcggttgccacgggtgacatagtttccgtctgcatctttcagtagaaccagccccaaatcttccagctttgcggttacggcattcagccgctccgacatggtcagcagcaaatcttcccgtacaattccgtctgcatctttctttgcatagtccacataatcctgcggcactctgccctttgtgatataggcatttaacgcattcacgccagctgcaaggcagccgctgcgtttaatgtgtgccttttcacaaatcaaaacagaaacagcatcgttttgttccgcaatggtcaatgctgcatagcagccagctgtaccgccgccaatcaccaggacatctgtttgcaatcgttctgttttcacggtatcacccatttccttttctgaaatactgttcaatcgactgcacgcagtttgcaccgtctgcaaccgctgttacaacctgccgcagcggtgttgtccgcacatctccagcggcaaacacacccggtgttgtggtaacgccggtttcgtctgcgaggatatagccgctctcatccaacttgcacagatctccaagaaaatctgtatttggaattgatccgattgcaacaaagacaccatccaccggcagcgttttcgatgctccgttttgcagcagttccaaatgatctactcgcttttctcccagaacagcagtcggtacggcatccaataccagttcgattgctgcattctgctgaacggcggtctgcaatgcctgatttgcacgaaattcctgccgacgatgcaccagatatactttctttgccattctggaaagatacatggcatcgcccagtgcagtatctccgccgccaatcactgcaacggttttatctttatagaatgctccgtcacacgttgcacagtaagaaacgccttgcagtgttccgcccggcacatccaatctgcggtaagatgttccggaagcacagagaatcgtacggctttgcagtggttctccctctttacagaaaacagtaaaaccatctgcggttcgttcgatgtggtctacttccacattttcaaactttgcacccaactgctctgcgtgttcccgaaacttttcgcccagcgtatagccatcgatgcccggaagccccggataattatctacctgttcgctgactgcaatctgtccgctgcccaaataatctttttccagtaccactgctgtcaactgtgcccgactggcatagatggcagcggttaaaccagcaggcccgctgccgatgatgatgatgtcatacataattgtttactcctcaataaccagcggttctttctccgcatcatcgccctcaatatggaacgaattgagtaccggctgctccaatttcatcagagaaagaatcatataacttgcggttttgtcgtatgccaaccgcttgtcttcctgcgatggacgggatggcgattccggatgagaatgccagttgcccagtggaaccagaccgtttgcacgcatatccttgatggctgcgagctgttccttcgggtctaacgagaaatgctcgttggaatggtcgatattggtgagcagatacaccttttgaatgtgcttgtctgctccatccttgacacctgcaatcaaaccgcatgcttcattcggcagttctttctttgcatgtgccagaattttttcaaaatctgcttttttcagtgtaatcataatcctaccccatcacattcagcctgttcgtagtcaattaacttggtgattgtcgggtactttccgcaaaccgggcaattatccgtgttatgcggcagctttaccttccggaaatccatggtcagtgcatcataggtcagcagatagccagtcagcagatcgccaacgccaacaatgtacttgatggcttccattgcctgtaaactgccaatgacaccgcccattgcaccaacaacgccagcctgcttgcaggtcggaacagcatccttcggaggcggattcttgaaaacgcaacgatagcaaggaccttcccccggtacataagtcatcagctgacccttaaaccgaatgattccggcatgagagaacggcttctttgccattacgcaagcgtcattgatcaagaactttgctgggaagttgtctgttccatcaatgatgaaatcatagtcctgaatcagttccatgatattttcactggtaacgaatgtgtggtatgtaatgaccttaacatccggattcatggcttccatggtttcctttgcagattctaccttcggctttccaacgtccttggttgcatggatgatttgccgctgcaggttggacagatccacttcatctgcatcagcaatgccgatcgtaccaacgccagcagctgccagatacatcgcaaccggtgcacccagtccgccagcaccgataatcagaactttcgcattcaggagcttcttctgtccctttacgccaatttcttttaagataatatgacgggaataccgctctaactgttcatttgtaaatgccattactgaccgcctcccatgaaatacagaaattcaacattgtcgccgtctttcagaacggtggtttcaaatgttccgctttctacaaagtcatcattgatggtcacggtaacatactgcggggtttctaccttttcctgttcaatcagctgtgcaacggtcagaccgtctgcaacttcctttgtaacgcctgcaactgtaattttcatgataacataactccttatgaatttattttttcagagaatcaatgacttctgtcaattctgctttttttaccaagcctctcagacgggcaacttctgcaccgttctggaaaaagacgagggtcggggctgcctgtacggcatactgttctgccagttctgcatcaaagttgatgttgacttttaccactttcaacccgtccgggtcagcggctgccacttccgaaagcagcggtgcaatccgcttgcatggaacgcaactgtcagaataaaaatccaccagaaccaatccctttgcctgcaatacttctgccgcaaaggtttccgcatttacacgaactgccat

SEQ ID NO: 319 - DNA, 32676 bp, unidentified
  source 1..32676: mol_type = unassigned DNA
  misc_difference 2451: note = a, c, g, or t
  misc_difference 2452: note = a, c, g, or t
  misc_difference 2453: note = a, c, g, or t
  misc_difference 2454: note = a, c, g, or t
  misc_difference 2455: note = a, c, g, or t
  misc_difference 2456: note = a, c, g, or t
  misc_difference 2457: note = a, c, g, or t
  misc_difference 2458: note = a, c, g, or t
  misc_difference 2459: note = a, c, g, or t
  misc_difference 2460: note = a, c, g, or t
  misc_difference 2461: note = a, c, g, or t
  misc_difference 2462: note = a, c, g, or t
  misc_difference 2463: note = a, c, g, or t
  misc_difference 2464: note = a, c, g, or t
  misc_difference 2465: note = a, c, g, or t
  misc_difference 2466: note = a, c, g, or t
  misc_difference 2467: note = a, c, g, or t
  misc_difference 2468: note = a, c, g, or t
  misc_difference 2469: note = a, c, g, or t
  misc_difference 2470: note = a, c, g, or t
  misc_difference 2471: note = a, c, g, or t
  misc_difference 2472: note = a, c, g, or t
  misc_difference 2473: note = a, c, g, or t
  misc_difference 2474: note = a, c, g, or t
  misc_difference 2475: note = a, c, g, or t
  misc_difference 2476: note = a, c, g, or t
  misc_difference 2477: note = a, c, g, or t
  misc_difference 2478: note = a, c, g, or t
  misc_difference 2479: note = a, c, g, or t
  misc_difference 2480: note = a, c, g, or t
  misc_difference 2481: note = a, c, g, or t
  misc_difference 2482: note = a, c, g, or t
  misc_difference 2483: note = a, c, g, or t
  misc_difference 2484: note = a, c, g, or t
  misc_difference 2485: note = a, c, g, or t
  misc_difference 2486: note = a, c, g, or t
  misc_difference 2487: note = a, c, g, or t
  misc_difference 2488: note = a, c, g, or t
  misc_difference 2489: note = a, c, g, or t
  misc_difference 2490: note = a, c, g, or t
  misc_difference 2491: note = a, c, g, or t
  misc_difference 2492: note = a, c, g, or t
  misc_difference 2493: note = a, c, g, or t
  misc_difference 2494: note = a, c, g, or t
  misc_difference 2495: note = a, c, g, or t
  misc_difference 2496: note = a, c, g, or t
  misc_difference 2497: note = a, c, g, or t
  misc_difference 2498: note = a, c, g, or t
  misc_difference 2499: note = a, c, g, or t
  misc_difference 2500: note = a, c, g, or t
  misc_difference 2501: note = a, c, g, or t
  misc_difference 2502: note = a, c, g, or t
  misc_difference 2503: note = a, c, g, or t
  misc_difference 2504: note = a, c, g, or t
  misc_difference 2505: note = a, c, g, or t
  misc_difference 2506: note = a, c, g, or t
  misc_difference 2507: note = a, c, g, or t
  misc_difference 2508: note = a, c, g, or t
  misc_difference 2509: note = a, c, g, or t
  misc_difference 2510: note = a, c, g, or t
  misc_difference 2511: note = a, c, g, or t
  misc_difference 2512: note = a, c, g, or t
  misc_difference 2513: note = a, c, g, or t
  misc_difference 2514: note = a, c, g, or t
  misc_difference 2515: note = a, c, g, or t
  misc_difference 2516: note = a, c, g, or t
  misc_difference 2517: note = a, c, g, or t
  misc_difference 2518: note = a, c, g, or t
  misc_difference 2519: note = a, c, g, or t
  misc_difference 2520: note = a, c, g, or t
  misc_difference 2521: note = a, c, g, or t
  misc_difference 2522: note = a, c, g, or t
  misc_difference 2523: note = a, c, g, or t
  misc_difference 2524: note = a, c, g, or t
  misc_difference 2525: note = a, c, g, or t
  misc_difference 2526: note = a, c, g, or t
  misc_difference 2527: note = a, c, g, or t
  misc_difference 2528: note = a, c, g, or t
  misc_difference 2529: note = a, c, g, or t
  misc_difference 2530: note = a, c, g, or t
  misc_difference 2531: note = a, c, g, or t
  misc_difference 2532: note = a, c, g, or t
  misc_difference 2533: note = a, c, g, or t
  misc_difference 2534: note = a, c, g, or t
  misc_difference 2535: note = a, c, g, or t
  misc_difference 2536: note = a, c, g, or t
  misc_difference 2537: note = a, c, g, or t
  misc_difference 2538: note = a, c, g, or t
  misc_difference 2539: note = a, c, g, or t
  misc_difference 2540: note = a, c, g, or t
  misc_difference 2541: note = a, c, g, or t
  misc_difference 2542: note = a, c, g, or t
  misc_difference 2543: note = a, c, g, or t
  misc_difference 2544: note = a, c, g, or t
  misc_difference 2545: note = a, c, g, or t
  misc_difference 2546: note = a, c, g, or t
  misc_difference 2547: note = a, c, g, or t
  misc_difference 2548: note = a, c, g, or t
  misc_difference 2549: note = a, c, g, or t
  misc_difference 2550: note = a, c, g, or t
  misc_difference 6661: note = a, c, g, or t
  misc_difference 6662: note = a, c, g, or t
  misc_difference 6663: note = a, c, g, or t
  misc_difference 6664: note = a, c, g, or t
  misc_difference 6665: note = a, c, g, or t
  misc_difference 6666: note = a, c, g, or t
  misc_difference 6667: note = a, c, g, or t
  misc_difference 6668: note = a, c, g, or t
  misc_difference 6669: note = a, c, g, or t
  misc_difference 6670: note = a, c, g, or t
  misc_difference 6671: note = a, c, g, or t
  misc_difference 6672: note = a, c, g, or t
  misc_difference 6673: note = a, c, g, or t
  misc_difference 6674: note = a, c, g, or t
  misc_difference 6675: note = a, c, g, or t
  misc_difference 6676: note = a, c, g, or t
  misc_difference 6677: note = a, c, g, or t
  misc_difference 6678: note = a, c, g, or t
  misc_difference 6679: note = a, c, g, or t
  misc_difference 6680: note = a, c, g, or t
  misc_difference 6681: note = a, c, g, or t
  misc_difference 6682: note = a, c, g, or t
  misc_difference 6683: note = a, c, g, or t
  misc_difference 6684: note = a, c, g, or t
  misc_difference 6685: note = a, c, g, or t
  misc_difference 6686: note = a, c, g, or t
  misc_difference 6687: note = a, c, g, or t
  misc_difference 6688: note = a, c, g, or t
  misc_difference 6689: note = a, c, g, or t
  misc_difference 6690: note = a, c, g, or t
  misc_difference 6691: note = a, c, g, or t
  misc_difference 6692: note = a, c, g, or t
  misc_difference 6693: note = a, c, g, or t
  misc_difference 6694: note = a, c, g, or t
  misc_difference 6695: note = a, c, g, or t
  misc_difference 6696: note = a, c, g, or t
  misc_difference 6697: note = a, c, g, or t
  misc_difference 6698: note = a, c, g, or t
  misc_difference 6699: note = a, c, g, or t
  misc_difference 6700: note = a, c, g, or t
  misc_difference 6701: note = a, c, g, or t
  misc_difference 6702: note = a, c, g, or t
  misc_difference 6703: note = a, c, g, or t
  misc_difference 6704: note = a, c, g, or t
  misc_difference 6705: note = a, c, g, or t
  misc_difference 6706: note = a, c, g, or t
  misc_difference 6707: note = a, c, g, or t
  misc_difference 6708: note = a, c, g, or t
  misc_difference 6709: note = a, c, g, or t
  misc_difference 6710: note = a, c, g, or t
  misc_difference 6711: note = a, c, g, or t
  misc_difference 6712: note = a, c, g, or t
  misc_difference 6713: note = a, c, g, or t
  misc_difference 6714: note = a, c, g, or t
  misc_difference 6715: note = a, c, g, or t
  misc_difference 6716: note = a, c, g, or t
  misc_difference 6717: note = a, c, g, or t
  misc_difference 6718: note = a, c, g, or t
  misc_difference 6719: note = a, c, g, or t
  misc_difference 6720: note = a, c, g, or t
  misc_difference 6721: note = a, c, g, or t
  misc_difference 6722: note = a, c, g, or t
  misc_difference 6723: note = a, c, g, or t
  misc_difference 6724: note = a, c, g, or t
  misc_difference 6725: note = a, c, g, or t
  misc_difference 6726: note = a, c, g, or t
  misc_difference 6727: note = a, c, g, or t
  misc_difference 6728: note = a, c, g, or t
  misc_difference 6729: note = a, c, g, or t
  misc_difference 6730: note = a, c, g, or t
  misc_difference 6731: note = a, c, g, or t
  misc_difference 6732: note = a, c, g, or t
  misc_difference 6733: note = a, c, g, or t
  misc_difference 6734: note = a, c, g, or t
  misc_difference 6735: note = a, c, g, or t
  misc_difference 6736: note = a, c, g, or t
  misc_difference 6737: note = a, c, g, or t
  misc_difference 6738: note = a, c, g, or t
  misc_difference 6739: note = a, c, g, or t
  misc_difference 6740: note = a, c, g, or t
  misc_difference 6741: note = a, c, g, or t
  misc_difference 6742: note = a, c, g, or t
  misc_difference 6743: note = a, c, g, or t
  misc_difference 6744: note = a, c, g, or t
  misc_difference 6745: note = a, c, g, or t
  misc_difference 6746: note = a, c, g, or t
  misc_difference 6747: note = a, c, g, or t
  misc_difference 6748: note = a, c, g, or t
  misc_difference 6749: note = a, c, g, or t
  misc_difference 6750: note = a, c, g, or t
  misc_difference 6751: note = a, c, g, or t
  misc_difference 6752: note = a, c, g, or t
  misc_difference 6753: note = a, c, g, or t
  misc_difference 6754: note = a, c, g, or t
  misc_difference 6755: note = a, c, g, or t
  misc_difference 6756: note = a, c, g, or t
  misc_difference 6757: note = a, c, g, or t
  misc_difference 6758: note = a, c, g, or t
  misc_difference 6759: note = a, c, g, or t
  misc_difference 6760: note = a, c, g, or t
  misc_difference 14870: note = a, c, g, or t
  misc_difference 14871: note = a, c, g, or t
  misc_difference 14872: note = a, c, g, or t
  misc_difference 14873: note = a, c, g, or t
  misc_difference 14874: note = a, c, g, or t
  misc_difference 14875: note = a, c, g, or t
  misc_difference 14876: note = a, c, g, or t
  misc_difference 14877: note = a, c, g, or t
  misc_difference 14878: note = a, c, g, or t
  misc_difference 14879: note = a, c, g, or t
  misc_difference 14880: note = a, c, g, or t
  misc_difference 14881: note = a, c, g, or t
  misc_difference 14882: note = a, c, g, or t
  misc_difference 14883: note = a, c, g, or t
  misc_difference 14884: note = a, c, g, or t
  misc_difference 14885: note = a, c, g, or t
  misc_difference 14886: note = a, c, g, or t
  misc_difference 14887: note = a, c, g, or t
  misc_difference 14888: note = a, c, g, or t
  misc_difference 14889: note = a, c, g, or t
  misc_difference 14890: note = a, c, g, or t
  misc_difference 14891: note = a, c, g, or t
  misc_difference 14892: note = a, c, g, or t
  misc_difference 14893: note = a, c, g, or t
  misc_difference 14894: note = a, c, g, or t
  misc_difference 14895: note = a, c, g, or t
  misc_difference 14896: note = a, c, g, or t
  misc_difference 14897: note = a, c, g, or t
  misc_difference 14898: note = a, c, g, or t
  misc_difference 14899: note = a, c, g, or t
  misc_difference 14900: note = a, c, g, or t
  misc_difference 14901: note = a, c, g, or t
  misc_difference 14902: note = a, c, g, or t
  misc_difference 14903: note = a, c, g, or t
  misc_difference 14904: note = a, c, g, or t
  misc_difference 14905: note = a, c, g, or t
  misc_difference 14906: note = a, c, g, or t
  misc_difference 14907: note = a, c, g, or t
  misc_difference 14908: note = a, c, g, or t
  misc_difference 14909: note = a, c, g, or t
  misc_difference 14910: note = a, c, g, or t
  misc_difference 14911: note = a, c, g, or t
  misc_difference 14912: note = a, c, g, or t
  misc_difference 14913: note = a, c, g, or t
  misc_difference 14914: note = a, c, g, or t
  misc_difference 14915: note = a, c, g, or t
  misc_difference 14916: note = a, c, g, or t
  misc_difference 14917: note = a, c, g, or t
  misc_difference 14918: note = a, c, g, or t
  misc_difference 14919: note = a, c, g, or t
  misc_difference 14920: note = a, c, g, or t
  misc_difference 14921: note = a, c, g, or t
  misc_difference 14922: note = a, c, g, or t
  misc_difference 14923: note = a, c, g, or t
  misc_difference 14924: note = a, c, g, or t
  misc_difference 14925: note = a, c, g, or t
  misc_difference 14926: note = a, c, g, or t
  misc_difference 14927: note = a, c, g, or t
  misc_difference 14928: note = a, c, g, or t
  misc_difference 14929: note = a, c, g, or t
  misc_difference 14930: note = a, c, g, or t
  misc_difference 14931: note = a, c, g, or t
  misc_difference 14932: note = a, c, g, or t
  misc_difference 14933: note = a, c, g, or t
  misc_difference 14934: note = a, c, g, or t
  misc_difference 14935: note = a, c, g, or t
  misc_difference 14936: note = a, c, g, or t
  misc_difference 14937: note = a, c, g, or t
  misc_difference 14938: note = a, c, g, or t
  misc_difference 14939: note = a, c, g, or t
  misc_difference 14940: note = a, c, g, or t
  misc_difference 14941: note = a, c, g, or t
  misc_difference 14942: note = a, c, g, or t
  misc_difference 14943: note = a, c, g, or t
  misc_difference 14944: note = a, c, g, or t
  misc_difference 14945: note = a, c, g, or t
  misc_difference 14946: note = a, c, g, or t
  misc_difference 14947: note = a, c, g, or t
  misc_difference 14948: note = a, c, g, or t
  misc_difference 14949: note = a, c, g, or t
  misc_difference 14950: note = a, c, g, or t
  misc_difference 14951: note = a, c, g, or t
  misc_difference 14952: note = a, c, g, or t
  misc_difference 14953: note = a, c, g, or t
  misc_difference 14954: note = a, c, g, or t
  misc_difference 14955: note = a, c, g, or t
  misc_difference 14956: note = a, c, g, or t
  misc_difference 14957: note = a, c, g, or t
  misc_difference 14958: note = a, c, g, or t
  misc_difference 14959: note = a, c, g, or t
  misc_difference 14960: note = a, c, g, or t
  misc_difference 14961: note = a, c, g, or t
  misc_difference 14962: note = a, c, g, or t
  misc_difference 14963: note = a, c, g, or t
  misc_difference 14964: note = a, c, g, or t
  misc_difference 14965: note = a, c, g, or t
  misc_difference 14966: note = a, c, g, or t
  misc_difference 14967: note = a, c, g, or t
  misc_difference 14968: note = a, c, g, or t
  misc_difference 14969: note = a, c, g, or t
  misc_difference 24493: note = a, c, g, or t
  misc_difference 24494: note = a, c, g, or t
  misc_difference 24495: note = a, c, g, or t
  misc_difference 24496: note = a, c, g, or t
  misc_difference 24497: note = a, c, g, or t
  misc_difference 24498: note = a, c, g, or t
  misc_difference 24499: note = a, c, g, or t
  misc_difference 24500: note = a, c, g, or t
  misc_difference 24501: note = a, c, g, or t
  misc_difference 24502: note = a, c, g, or t
  misc_difference 24503: note = a, c, g, or t
  misc_difference 24504: note = a, c, g, or t
  misc_difference 24505: note = a, c, g, or t
  misc_difference 24506: note = a, c, g, or t
  misc_difference 24507: note = a, c, g, or t
  misc_difference 24508: note = a, c, g, or t
  misc_difference 24509: note = a, c, g, or t
  misc_difference 24510: note = a, c, g, or t
  misc_difference 24511: note = a, c, g, or t
  misc_difference 24512: note = a, c, g, or t
  misc_difference 24513: note = a, c, g, or t
  misc_difference 24514: note = a, c, g, or t
  misc_difference 24515: note = a, c, g, or t
  misc_difference 24516: note = a, c, g, or t
  misc_difference 24517: note = a, c, g, or t
  misc_difference 24518: note = a, c, g, or t
  misc_difference 24519: note = a, c, g, or t
  misc_difference 24520: note = a, c, g, or t
  misc_difference 24521: note = a, c, g, or t
  misc_difference 24522: note = a, c, g, or t
  misc_difference 24523: note = a, c, g, or t
  misc_difference 24524: note = a, c, g, or t
  misc_difference 24525: note = a, c, g, or t
  misc_difference 24526: note = a, c, g, or t
  misc_difference 24527: note = a, c, g, or t
  misc_difference 24528: note = a, c, g, or t
  misc_difference 24529: note = a, c, g, or t
  misc_difference 24530: note = a, c, g, or t
  misc_difference 24531: note = a, c, g, or t
  misc_difference 24532: note = a, c, g, or t
  misc_difference 24533: note = a, c, g, or t
  misc_difference 24534: note = a, c, g, or t
  misc_difference 24535: note = a, c, g, or t
  misc_difference 24536: note = a, c, g, or t
  misc_difference 24537: note = a, c, g, or t
  misc_difference 24538: note = a, c, g, or t
  misc_difference 24539: note = a, c, g, or t
  misc_difference 24540: note = a, c, g, or t
  misc_difference 24541: note = a, c, g, or t
  misc_difference 24542: note = a, c, g, or t
  misc_difference 24543: note = a, c, g, or t
  misc_difference 24544: note = a, c, g, or t
  misc_difference 24545: note = a, c, g, or t
  misc_difference 24546: note = a, c, g, or t
  misc_difference 24547: note = a, c, g, or t
  misc_difference 24548: note = a, c, g, or t
  misc_difference 24549: note = a, c, g, or t
  misc_difference 24550: note = a, c, g, or t
  misc_difference 24551: note = a, c, g, or t
  misc_difference 24552: note = a, c, g, or t
  misc_difference 24553: note = a, c, g, or t
  misc_difference 24554: note = a, c, g, or t
  misc_difference 24555: note = a, c, g, or t
  misc_difference 24556: note = a, c, g, or t
  misc_difference 24557: note = a, c, g, or t
  misc_difference 24558: note = a, c, g, or t
  misc_difference 24559: note = a, c, g, or t
  misc_difference 24560: note = a, c, g, or t
  misc_difference 24561: note = a, c, g, or t
  misc_difference 24562: note = a, c, g, or t
  misc_difference 24563: note = a, c, g, or t
  misc_difference 24564: note = a, c, g, or t
  misc_difference 24565: note = a, c, g, or t
  misc_difference 24566: note = a, c, g, or t
  misc_difference 24567: note = a, c, g, or t
  misc_difference 24568: note = a, c, g, or t
  misc_difference 24569: note = a, c, g, or t
  misc_difference 24570: note = a, c, g, or t
  misc_difference 24571: note = a, c, g, or t
  misc_difference 24572: note = a, c, g, or t
  misc_difference 24573: note = a, c, g, or t
  misc_difference 24574: note = a, c, g, or t
  misc_difference 24575: note = a, c, g, or t
  misc_difference 24576: note = a, c, g, or t
  misc_difference 24577: note = a, c, g, or t
  misc_difference 24578: note = a, c, g, or t
  misc_difference 24579: note = a, c, g, or t
  misc_difference 24580: note = a, c, g, or t
  misc_difference 24581: note = a, c, g, or t
  misc_difference 24582: note = a, c, g, or t
  misc_difference 24583: note = a, c, g, or t
  misc_difference 24584: note = a, c, g, or t
  misc_difference 24585: note = a, c, g, or t
  misc_difference 24586: note = a, c, g, or t
  misc_difference 24587: note = a, c, g, or t
  misc_difference 24588: note = a, c, g, or t
  misc_difference 24589: note = a, c, g, or t
  misc_difference 24590: note = a, c, g, or t
  misc_difference 24591: note = a, c, g, or t
  misc_difference 24592: note = a, c, g, or t
ctccttagatttttttatactctccagaaaatccaccacttcatactctcccacttcttccggaaatgatagtttccggtcataggtcaggctgccaaaaacctttgagaatatgttaactcttccggtaagcttaccgatgatccactcgaatcccggaacgagccatatacttcttccatagctttcggcgatccgtgctaccatatctgatgtattcacatattggctgttttgtgggcaatagataccatctgcatctcctctgataatccgatataagaactcgcacaaattctcgatgtatatcatgcttctctcattgctcactctcggaaaaacaggtatcttgcccgccagcttctccaatgaagcataatttccggtacaagctttcccataaatcatcggaggtctgataactgctactttgaatgtatcacttctttgctcatataagtaccgttctgcggcaagcttgctttttccataaaaagtaatcggtgtacattctgtttcttctgtaatctgtcccattgtcattccataaacactcatcgtacttaaaaaaacgaactgacgaacccgctcagcctttgccttatccgcaagttcttctgtcaattttgtattaactgcataatagagtgcctccatttccggctgttctttctgatgtacaattgcagccacatggaggatcgtatcatattttgaaaaatccattttcttccattctgaatttctcacagaaacaaatgtaacatgccatcggtcttccaacggcatgtttccattttttttctctatatactgtttgaatgaagtcccaacataactgttggttccggttatcaaaatctgttttcccattattttccctcgaataacccagcatgtctttttatccgctgctactagctatttatgcatttctccggttccaccttccacaacacctttgtgtgacaagactgctgtgatcgttccaaaaaagcacttcagatccattatgaatccaaattttttcacatactcaccatccagttttgcctttacatctatctccaactcatcacgtccgttgatctgcgcccatccggtcagtcccggcattacatcattcgcaccatacttatcccgttcctcgatcaaatcatactgattccacaaagctggtcttggtccgacaatactcatctttcccataaggatattgatgatctgcggcaattcatccagactgctttttcttaaaaatttccctactcttgtaatatactgttccggatcagccagcatatgggttggcatatcctttggcgtatcaattctcatagttctgaatttgtagatcataaagtgtgtcttatggattccaacccttttctgtttaaaaaggattggtcctctactatcaattttaatcgcaatgcataaaatcaaaaacaaccaggataacagaattaatgccagagcagataataaaatgtcaattacccttttcactcccatataaattttctgtgaaattgtaaactgtttcatctttttgattcctttcatgtatctgcaatttatgcaagcatcagacaataaatagatatacctgtgcctatcagcattaaaaacgctataagactctgataattctctaatttcatgctgcatctcactttttggtttataaaaatgagactcagtggaaagatcagcggcaaataatatcttggtgatactccgttaattaccatcgaccctaccggtgtaaaatccaggtataatgccgtccagaccagacatgctgttccaaatattaatactgcattccatattttcatcatcaatatttttcttttcatctgtgcatcatatgttttttctgtcattccaaaatcggtcacaaatgtaaacaacatcgtaagcagtactacaaaatatcctattccatcatagattccacggtatgcaaaatttgcaagcactttggaaccaataaaataagatgcaaacgttgttccaagtgatttcagcaaaactcctgtatacgtcaacggatatcccaaaatcatagataactgacttgtctggctcgtatctcctccacggtaatctcctacctctgctccgcttgtaacattacctattaacggcaatataaaggacgcaaacattaatattaataagacaaagattcctgctttaaacagattcttttgtctcctgctataaaacttgtccttcggcataagccaatataatgccaaaaatggaatatagaccgcctttgaaaagcaacccacaactatagcaagaatagataccatcgtccgttttgtttgaattttttcttcactcaggtactctgttacaaacaatgctatgcccaacattaaaagtgctatcacaaatgcatcatatgtaaatgacgaaaaaagaaataccgttgtnnnnnnnnnnnnnnnnnnnnnnnnnnnnnnnnnnnnnnnnnnnnnnnnnnnnnnnnnnnnnnnnnnnnnnnnnnnnnnnnnnnnnnnnnnnnnnnnnnnngtatcatttgcctgattaagccattctcctatccattgttcttcctctaacgtgtcccctgttggtacacgcatttctacatttgacatcacagcatcactgtactccatataattccatacccaggagtctgtatatgctatattataatgaatctgttcatcccatgaatcaaatgaatgatgtgctgataagataatcaccgttcctaatgcaactgataccattgcgtacatccattcgggtctttttccaaaaaaagtacaatgagaaacaaataagtaacttagcaacaatactgaaaatacaagcagaaactttgcccaggaaaataccgtgtgatttacaaatattattgaatttaacttatccgcatctttgttttccactgtcaatttcaggctgtcaactttctgatctacccaaactgcagattttccaagcaaaaatgatgcagtatcttccagttccaccacttctttttgtccatatccatcatagaatgtcacttccattctggagctgatatccgtcttgctttgataaatcaaatagatagagctcacatatcttccatcaaataaaaaatcatacgttgtctctccatctttattctctgccttttgtacttcgctcacctgaaaagtctgctcatatttttcgtttttaaacgaattccactgtaataatacctgttctacaaataacgataggaaaaatattacaataattgcaataaaatctctaagatatatttttttattttttagaatttgttttatctgttccattttcctttttcctatcaagctgcaaaataaatcccattcctgcaagcacaagaattaagatgacttcccatattttttccatattagattccctgttttctggttctaccgattctgaatagagtatgttggcaccatcttctgcacccattcccgtatatcatccggttcttctaccacatgctctttgatttcttctaactgttttaaaaacttctcttcatccatctgtattggtttgccaatatgaattaatttattggctgtttcctgcatgccttcttctttcatgagcatctcttcatacaatttttcgcctggtcttaatcctgtaaatacgatctggatgtcctcgtcaggtttatgtcctgaaagaagtatcaggtttcttgcaagatctacaatcttaaccggttctcccatatccagaacaaagatttctcccccttttgcataggctcctgcctgtaacacaagagatactgcttccggtattgtcataaaataacggataatatccgggtgcgtaacagtaaccggtccccctgcttcaatctgcttcttaaataaaggaatcacacttccgttgcttccaagtacattaccaaatcgaaccgctacatattctgtcttagaacgattattgtatgtctgaataatcatctcacagattctcttggtagcgcccataatattcgttgggtttactgccttatctgtagaaatcatgacaaaacgttttacattgtatttatctgcggcctgaaccactttccatgttcctaaaacattattttttactgcttcattcgggctgtcttccatcaacggtacatgtttatgcgctgccgcatgatatacgatctccggacgatatttatcaaaaatcagatccatgcgctttgtatttcttacggaagcaatcaatacaaccagatcgagttcaggataatttctctttaattcctgctgaatatcgtatgtagtattttcataaatatcaacgatcactaactgttttggattgtgtgatgcaatctggcggcataactcgctgccaatcgaaccacctccacctgtaaccataactaccttatcagaaacatatcccataatggaatcaagatcaaccgtgatcggatcacgtcccaaaagatcatttacatcaacatcttttaatttgctgatactgacatccccatttaccaactgatacataccaggtaaacgttttaattcacagccggtctgtttacaaatatctaaaattgcctttgtctcttttgcactcgctgtcggaattgcaataataatctcatctacaagatactcatttgcaatttctatgatatcatttctatctccaaggactttgacaccatgcatatattttccaattttgcttttatcatcatccacaaaacctacaatatgcatattcacaaaacgactgccggaaatttctttgataatagaatttcctgcttctccggcacctactacaagcactctcttaagattcttctcatccactttttttccaaaaaaagttctgactgcccgataagaatagcggctgataaacataaacgccaataataatgttccataaataaaataccagcttctaggcagcggatactcctgatctctgtaattcagaagaatcgtcactgtattgagcagcgtatctacaatacatgctgctgcaagatacaataattcggttacccctgcatatacccaaaggctgctatacaaacgaaatacataaaatacaataatcgcgatcactaacgttgccggcaatgaactccatacaacgccaatataatactttggtacagccgaaagactgaattcgaatcttacaatcaatgccgtgatgcttgtcaatattacaatgcaaatatccatcagcaccataaatattcttttgatccataatgttttatctaagtttttcataagtccgccacttttctctataaattattttgcatatacttcataatgttctgtattataaattttactaaatccaatgctattaaaaaattcaatattgtcatactcagaattaataaccagacaattgcagccataggaatctgtttccatctgcagctgttccagattctcctgtgtaaaagataaaccttcaccataaataactgcaaatctggtatcatattcacgaagctcgcctgccacctgttccggtgcaagaactcttggtttttctacaaattccaactgttcagcgatctccataacttcatttgatattttgtaactattcgtgataaattccaaatgctgcgacgtataatttaatcccatccctgcctgaatcagtaaaatatatatcactatgacaattattttttctttcttagatggtatgtttatcaaatagtctgtcattgcaactccaacaaccgatactatgtttagtattccatagaccatccaatgatctgtcttctgaccgctcatatttagtatgccatttgcaatccccggcgtcaccagaaaaagtataccaaaaatctcatatattaacaaatttctttgtctttttttatttataatcaagaaataaaatattgcaacaaaaaggaaaaaaacatttgttcccatcccattgtaagaaaaatatgcatttttaatgtcttcccacaacccggacatatttataccccttccttacaaaccagacaagaatcatcagcaacatcatcaggaacacataaaaccagcctttgtgatgtaacaattgtgccgccggatataaaataataaataatactgcctgcatcataaccggatgttttacacaatcggatactttatttttttctcctccatacatgaaatttaacatacgcatcacttgtaaaaacgcatatggaagaatgcagcattccaacattacactaccattccaacagcttcggaatatgcctgtcaccggagtttctaccgctgtatatattggtacataatagataatttctacaattattaaaaatactgcctgcattttttcctgcttaaaaaagaactttccaatttcccaataacagcacataaaaaatggtaaaatgaataatggaagtattacctttatcagcaatgccggatgtaatccggaaacccatgcattgaccgcatatagcatctcataaggtgaaaatatcttttccatctgcgtggcaggatactgctcgccagtatatggttgatatatatatgcagaattggtatcaattgatgtcattactgtttgtactgtctgctccatctgtggttttacnnnnnnnnnnnnnnnnnnnnnnnnnnnnnnnnnnnnnnnnnnnnnnnnnnnnnnnnnnnnnnnnnnnnnnnnnnnnnnnnnnnnnnnnnnnnnnnnnnnntggtatcaattgatgtcattactgtttgtactgtctgctccatctgtggttttacacaaactacagaaaacaatattgctattatggatactaccatggcaatttttacggtcttgtgtccattttctgattttcttttatgtttaaaacatccatatattgcttttttatttgctaatatggatgccacgcatatcgtaatcgtcgcaagcatccaaaccatactaagtttttctaatgtacagccacgatataaaaaaagtaccgcaacaccccaaaatattccaagcatagcaacaaatccatttgcatatgtgcttgatatatttctcctttttacacctgctgctgcatcaataaatgcacctgctaacaatggtactaaaaaaaacaaataaattaccagcaatattcctgctgcatttttcattcattttctcctaacactttatcgactttgcgttctaataaagttttatatactttcgtccccttaatatactccagttcgttttctactttgttcatatgacattttaactcactaagtgcactgagtatcggattgtcctgcaaccctgcttccctgattctaaatgcaattttgatctctctgacattattttcccattgattttcaaatatgatctgcggatcttccgatgcaaatataaaatcatgatcttttgttatgatggcattgtgccgataatgttcaatttcatattcattgttatcttttgtcacaatttgcaccttgagattttgcaaaacacatgaaacatttaatggatccaatcgtatttctgatacatactgtgtgaattcaatcggaatattcaattttacattctgtcctataatatgatttgtaattgccttgtcttcaagatagtttgttccatcatttaagaacacctgtaagaataagttttcctccggaagcagttttttcacatcgtatacttcttttttgtaagcaataaggcttgcgttatagccatttttcccaccatatacatattgattaaatgcttcattcatattttcaaatataacaatttcttcttccgtaatatcaaagcaatcataaatttcattgattgtcatgatatctttcatagcactgccatttctggtataaaaagcagacaccgcacggtatattacaaatttcactggaattggaaatgaaaatacccattcataatcaataattttatatttgctgtcagtctgatcttttatgatattatcaaagctcatatcgatattcatttcttttccacattccatctcatctgggaaagaaacttcgccaaacacctgtacaaattgtgcatccggcataaatgttcttctttctatattaacattgcttcttatgattccatcatacattcgaagcaaagaaagaaatcttacttcgtctttatcctcaagagcctccaacattgtattgcaaagactctccccggttaaaaattcaaaagcgatctcgttttctgaaatcagtttggatggacacaggataccttcatccttatttttttcataataatcagacatcttcctgatatgtgctactccgtcttttgccaatgctctttttacaaccagtctctgttccccatccttcattatgtaggtttctatctgaaactgttttcttctctcttttgtaatttttgagtaaattttcttcaagatatcacctcacactattttgtaacttctataaagaacgaatttgcaaaaaattcaaattttttttcttttaaaagatttgcatagactctgttttcgttaaaaagcatcattcttgtattatcgaaagtatctaaacctatattaagatcatcttctcgtggaaggtactcatcagaaaaaatctgtacagggaatttataatccggaaacggataataaaattctgctttcccatatccagcatctgtaattattttctttaacgcctctttactaaaagttctcactttactatctgtatcaatataaccttccaaaccatcaaaaaattttccagtatggtcttctctggaacctgcccaatatttcaatccaaatttattttcaatagcaatcagcagttttccatcttctttcaaatatccactgattttttttaaaaaggcttcaaatggatgttcatcatccgtgtaataaccggcatattccaatactccgattaatgtaatataatcatacttttctttcaaaacaacatcattgaaatttccaaccataattgtaagattatcgtattctttattacgatttgcattaatcaatgatctgcgtttagaaagatctacacttgtcacatgctttgcatttctgcaaagtactccactgatagctccacatcctgccccaatttcaagtacagatgcatcttttttaaaaggataccactccagtatattttgtctgacaggtgaaaaatgatataacactggccaccggtcatcttctgcaagtatcttctctacgtctggttcttccataataagctgtaacagatcattctcgatgtccccgtcactatattgatcctgtccattataaaatgtataatctaacgttacttttccaatctgctctgtcataggacctcttttctatagttatctacaactattattttttacccaagaatctccttgatatcctttataaaatcaaatacatgctcattttttacatataatggattcgctgtcacatgttctacctgcggtctgtaagctttacagatttcagtcagatgtgttgcaatgttcattggactgatattatccagtgataccatgttatcattgaaatccttaagatctttattcgcataagtattcgtgatcgtctttacatcaaataccgacatctcaagtggcggataacttggatgtggtgaacacatcagtgaaattcctgcgtaagtttcctgcaaagtccgcgcatattcttcaattgtaagctttccaacggagacaagctctttgccgtttccaagcggaattgaacggtgcatctcccctgccgaaagaatctcccattcctcaatatccggctgcatcatcacccattttttcagagccgctactacaaggttaaatgcattacgctccgtacctggacgtccataaacaagaatctgttttttcttatcaacctgtgcaggcatttgctctaacgcttttcttaatccatcatttaagacaggatcaaatgcaaagctatgcgtaaaatggtaatgattttcatcgaagaattctttcaacaacatactgttaaaaattgcaattgttggataatcacttttgtaggtagaatctgcaagcaggtacttcgtagaccaggagtaaaatcctggctcataatcctgaataaaatagagaaaaatatttggtttgattccaaatgtattttcaaatccaacataagcatcctgacaacaatacgctgtccaccagccagtaaataagaaatagtcattctctgacactggaatactgcggttaaaacgattgctgtatggaataatctgttttgcatcaagagaatcatcttctgcttttacaaatgtatactcattggaatattttttaatggcagctttgtctggctctgcgtctactaaaataatacgtgcatcatagcctaatgctttcactaaagtatcgaaaaacttcagtgcagttgagattccaccaaagacatgctctgcattgatagacggaaccagaaggttcattctgcggttcggatattctatcttacggaaagtgtatggtgtaatttcatatacattcgtatccaattgtggaagtccggtttctctttttctcttcagaagcattttttcctcctgctctttgacagtctgctgcaccgcggcacaaattttgggctgacaacaataataatcaagatttctattataatatggatctccgttttttcggtaggtcttatacatctgatccgacaaatcaaagtcaatctgtgggattttacttgcatccctgctcttagattcataatgatacagacgaacatttggatcgtagatattcacgagtccatgctggtttgcacgaagtgcaagttcaatatcgcttccacatacaatgaatttctcatcaaatccaccgattttctcaattgtcgccttcgaaactgcaagacaggctcccgttaccgccgaaacatttcttgttaccatcggtgacacaaatggcgatccatagtgctgcggtttcattcccttgaatacatgatcagcccagccacccattccaataactactcctgcatgctggatcgtattatcttcatataaaagcaatccaccgacaacaccaacatcttttcgtatggctttctctaccagtcttgtaagccattccggttcaataacttctacatcattattcaaacatacatagacatctccggttgcgaacttcattccataattattaagccttgaccagttaaactcaaacgccgcatctttcacgatgacattgtcatgttcttctttcaccttcttcagataagtaaaagtctcttccctctcagaattgttatttaaaataataatctcaaaatttttataagttgtcttcgcaaaaatactgtcaattgcagcctttaacaaatctgcatgatctttaatcggaataataatggaaaccttcggttcctcattcatgtgatatctcacatcatagacaaacaaattctctgtctcatttgcagtcgctgctcctttgccataaacacggtctaaatgttcctgaatcgcattaagtcctgctgtctgtgcatatggctttgactccgggttggctgctgtggagctcggaagatctctccaatgataaagtatctcagggacatgtccaatcttgtccgtcatctctgtcattcgaagtaacagatcataatcctggcttccgttgaactcaccgcgaaatccacccactttttcaaataaggacttcttgaatccaatcaaatgtcctaaatacatctggctcaggaaaagatccggagaccagtcaggtttacataatggatctctcgtttttcctttcacatcaataatatccatatcgctgtatatgatctcagaaccttctttttttatcttctgataaaattcatgtaatgcagacggtgcaagctcatcatcattatccataagaaggatatattctccggatgcaagcgctgctgccgcattggttgctcctgaaatcccctgatttttttctaataatttaattttaatccggctatttttcattgcagataagtgctctcttacctcctgctttgtagaacagtcatctgcaatgcaaatctcccagtttttgtaattctgcttttctatagattcaatcgccttatcaagccacttaatttctacattatatacaggcattacaatggaaaaaagaatctctccactataattttttaatttttctttcttcactctgccatacccaggttcataatttacactggcagataaacgctgtttaaagatttccggtccctgattttttaaaacttttaatcctttttttattttctgaggatttcttactccctcttttataattgctgcaagcttctgtgttcttcccataatgctcctttttatatacagcgattcctatcatcgctgattttactcgctgttcgccttcccatagcctactcttcattacaacttactatcgagttcaaatcaaaatacccaacagtaacttttttagataaaacctgtatacaacaaatatcatataatctgtgatgaacttctaattcgtcaccattatatcctgtacatcctaactgtagcagatactgtcctttttgaaatggcaatttttgtctgaatgatactgtaagtgtcgtccctgcctctatcagtccaggctctaacccttcaataagtgaattggttccggtaagatctgttccctttaaatcccggattgtaaatgcaaaaattggatttagcacatcctcatgaaactgtacctttaatttcaaaacacactcttcgaatttagaaacagtattcgtaatctttcctgttgcatcgaaaattccaaagtcaataatctctgcctttttatcgccatactcctgcttatccggatttaaaatcatggattctttccatgcaactccttctattgctgcatgaccgtcttcttttttcgggctgtcttccatctttgattctgccattacccttttgtaaagatcgatcatatcctttggtttaccctctgcaagctttacccctttattcaaaaggacaactctgtcacagtattttccaatgctcccaagatcatggctaacaaaaagaatggtctttcccattttcttaaattcttcaaatttgtgataacatttcgtctgaaaaaatacatccccaaccgaaagtgcttcatcgacaataaggatttccggctcaatattgattgcaactgcaaatgcaagacgtacaaacataccgctggaatatgttttgaccggctgatttacaaaatcaccaatatccgcaaaatctaaaatatcctgcagcttttcatctatctcttctttggtaaaaccgatcatggttccattcagataaatattttcaattccggtatattccatattaaatccggcgccaagttccagcaacgcagaaatacgcccatttactttgacttccccatcggttggattcaaaactccagtgatgatctttaaaattgtagattttcccgaaccatttgttccaataatgccaactgtctctccctgaccaacctgaaaagatacatcattcaatgcgtaatgctcttttccaagtggtttttttgaaaatcctaatgcatctttcaagcgatcccggtttctgtcatataatttatatattttttttacatgttctactgaaattgcgatgttatccatgcagttacctttctataacacatctgcaaaatgtggctttaattttttgaatatttttgtcccgattatgaataatacaattgtaagaatccaataataaattgtcatgcctggttgttcccaaaatccagccttattgatcaaagaatccctatatcctgccacaatataatacattggatttaactttaaaattgtaatcagaatcggattcaattccatcccatcaatattccacataattggtgtcatccagatgcctatctgcaaaataatgttaatgatctgtccaagatctttgaaaaatactactattgcagatgttgcatatatcagtcctaataaaaggatcatcatcgcaaaggtataatataacatttgcaatgtatacaaatccggataatacccataacacgcatataaaataattgtaaatgcaataaaaaacaaatgcacaaacaaagctgatatcaatttaataattggtaagatatcaatctggaatactaccttttttaccagatagctatactccatcagcgcatttgttccgccgctcagtacctcctgaaagaaaaaccatggtacaagtcctgctatcagccacaaaacaaaaggtgctgtaattcccgatctgagattaatgccacttgcatgcattcccttttcaaatacaaaccaatataccaatactgttacaatcggctggacaaaagcccagataattcccagataggatcctgcaaatctggttttaaaatcattctttgacaagtcccatattaattttcgattacttattatttctttcagcatattggcttgttttatttccgttggcatgcttttcctctaactttcattctcttaagctataacttatttacggtttttgacatattctgagattccactccatactttatccttatcagataatgtaagatccgcctcagtcattccttccggcatcggccattccacaccgatctccgggtctttccacaacagtccgccctcatcatttggatgataaaaatctgttaccttataacagaattctgcataatcggacaatacgataaatccatgnnnnnnnnnnnnnnnnnnnnnnnnnnnnnnnnnnnnnnnnnnnnnnnnnnnnnnnnnnnnnnnnnnnnnnnnnnnnnnnnnnnnnnnnnnnnnnnnnnnncggctcgatcacttttaatcctgcaattccattgcaattgtctgttacttttatttttcccattttccatacttccttttcgaattttttcatttttattcatagatgaaaataaagaatttataatccctctgcgatttccatcagatattttccatagtctgttttcaacaaaggttgtgcaagtttcacaagctgctctttgtcaatgaatccacgcttgtaagcaatttcctcgatacaggagatatataatccctggcgtttctggaatgctgacacgaaatctgccgcagcaagaagcatgtcatgatttccggtgtctaaccaggcaaatcctcttcccaatgtttcaacatttaaagttccacggttcagatattcattatttacgcttgtgatctctatctcaccccttgcggatggttttacattcttagcaatctcaactacatcattgtcatagaaatagagtcccggtactgcatagtttgacttcggattttccggtttttcctcgatggacagtgcttttccattctcatcaaattctacaaccccatattctctcggatctcttacataatagccaaaaatggttgcaccggcttcattctctgtacgctctgctgcactccgaagaacttttgagaaactctgtccgtaaaaaatattgtctcctaataccaatgcaactgcatcttttccgataaatttttcaccgataataaatgcatctgcaagtcctctcggctgttcctgtaccgcatactcaaatctcattcctagctgtgatccatcccctaataactcctcaaacaccggcagatcccttggtgtagaaataatcagtacttctctgattccagcaagcattaaagttgataaaggatagtaaatcattggtttatcataaaccggcatgatctgctttgaaattgcttttgtcaatggatataaacgtgttccggatcctccggctaaaataattcctttcattcttcatcctcctgaaaaaaaattcaatttatcactttttggtaaaacgcaaacaagcagtatcatccgacctacggacggtactgctatttgtgctattattattttccctgatacatatcttcataatatttctgataatcaccactggtaacgttgttcatccagtcttcatgttctaaataccaggcgatggtcttcttaattccatccttgaacatcgtctccggttcccagcctatctcagcttttatcttgtcaggtgcgattgcatatctgcgatcgtgtcccttgcgatcctctacatatgtgatcaaatccttgcttacatttgcttttcttggatcagtatcaggaagaatttcctgtagagtctcaatgataatattgataatctcaatattacgcttttcattatgtccgccaatattgtaagactcaccaagctttccatgttcctggaccatgtcaattccctttgcatgatcatctacatataaccagtcacggatattcaatccatctccgtacaccggtaatttctttccgtgcaaagcattgttgataattaatggaatcaacttctccgggaactgatatggtccataattattagatgtattcgtcacattagccggaaaatgatacgtatcaatataagccttcactaacatatcagaagacgctttactagcggaatatggactgtgtggctgatatggagttgtctcataaaaatagctttttccatcatcaggaagtgaaccatatacttcatctgtcgatacatgaaggaactttttaccagttttaaaactgccatctggcagctcccatgctttttttgcacaattaagcataactgctgttccaagaacatttgtcttgacaaaaacttccggatttttaatacttctgtcaacatgactttctgccgcgaaatgcacaacacggtcaatatcattttcttcaaaaatcttcatgatagcatccttgtccgtgatgtccgctttaatgaaagtgtaattatctctattttcaatatcttttaaattctccagattacctgcatatgtcaatgcatctacattgataattctgatttcattatcatatttgcgaaacatataatgaatgtagttcgatccaataaatccagctcctccagttaccaaataagttctcattccgagatcctcctatcatcacaattatttgtcattttaccatattttatatactaagacaagttttacacatcttaggattttattaactatttcagctctgccatataaacatccaatgcgtctttccagtcagccatctgataaccatccgctaatctcatcatataattatccagaatagaatatgccggacggtcagccgctgccggattcatctgtttatactgcttacttgttacatgatttacctttgtgctttttcctgctcttttgaaaatttcctctgtaaagtccgcccagtttgtatctccctcgcaggtagcatgatacagaccataattttccgttccctcaaaatgatggattgcctttgcaagctctactgcacttgttggcgatccaagctgatcgcagacaacactcacttcatcatgagtctccgaaaggttcagcatagtttttacaaagttttttccatctccatataaccaggctgtacgaaaaataaagaaatggtttgaaaactgttgaacaaacttctctccctcgagctttgttttaccataagcactcaccggattcggtgcatcaaattcagtatatggttttgtaccatttccttcaaaaacataatctgttgaaacatgaatcatctttgcgccaactgcctctgctgcaatgcttaagtttcttggacccaaagcattgatacgataggctgcatcccactgcttctcacatgcatcaacatttgtatgggccgcacaattaatgatcacttccggctgttctgcacgtacaagtgataatacctgctcaatttttgtaatgtcaagtgctgtcacaccttccccttccgctacatctgtattaataaatgtcacatcacttcctgcatattccttattgatcgcacgaccaagctgtccattacatcctgttaccaaaatctttttactcattctcttcattccctctttctttttataaaattttccatcttttatcacacttcagttttcttcttcctgtcctttacgacacaggatgttattattaaaaatactataaatactactccaaacgaaagggtacaactcagtgccgctcccaacattccaagactctttacgaaactcgatcccagaaatactgcaaatataagtccggctccatatcccagcaataaaaaaatctgttttcccgtaactgttaccacataatagagacaatatacataggcattcagtcctccgcatatcataatgatcaccaattccattcgatatgccctcagatcaactccatacacaagagataatattggtattcccaaaagataagcacccacacatgctgcaatcgtaagtgcaccaattaaaatcatcatttttttcacaatgtccgtaaactcttttatattttccccctcccaatctctggcaagatctgtaagaagtggccggaatacaaaaaggcttaataaattgatcacaaatgcaggcataaataaaatattatagctgttctgaaccgtctcatcgtaatatgtgttaatcgcatatttgggtgcattgttcagataattcataataaaagatgacacaaacaatggccagcatgcattataaatacctaaaatccctctccattcaagatgcaccggtgttggttcaaagtattttttcatatgtaaatcataaaacagcataataaccagtgacgttaatgtaagtgtcatagccgcatataacaggttgtctgttaaccataatataattgtaaatgtaatggttgaaattccgctccgcattaacatctcttttccggaaatatcaatgcgttctctctgttggaatagtccactatatacatctgccacagcctctaccattcgataccccagaatccaaaacacggtaagtgcttcgactccagtataaccattcacaacaatatagcctatcatgcagatcagcataataatacaatttaacattctgctggtaaaatattgatcaaatgtaaatttattttttatatccgtcgactgaactggtctgatttcaaatccaccgacagaaaacaaaagctgcgctgtagaatacgccaatgcaaaaaatccacccctgctctctccgctaatccggttaacgataatcaacagaagcatagaggaaagtgaattgcaaagacttccagccatattccacataaatttcttctttgctgttgtttccttcatttatttctgttcccttttttctttctcatcaattgcaatcttctgtactaattcttttactttattgtccagtttagaaatgtccatagtgagttgaaaacatttgacaagtaatataaatataatcaaaagaaatatgaaattagttgtggaatatacgcctaccaactctgacatccaatctgcaatctgtggaaaaatactaaacaaaacgagcattatcgcaaacaatgtccaaaaaatagaatactctatctgtaatttttcctgttttacttttttgcacatataaagcaatgtaaaaacagatacgataatcaatgtaattcgaaatgctatcgacattcttttctcctttatcctgtctattttgtaaaatccactttctttttattgcgaaagttctgtattaataatatagatatcaacattctggccatatattttgcagcattgacggcattaagataactttgtccggcaattctttcatccatctttgcctgtatttctgccacttttgctcccattttaatcaaatacgatacggtatccggttccggtccaaaatttatgttgtttgccaatacttctattaattttttattatacatacgcattccagatgtcggatccatgatttttgcacctgaagtaagtctgatcgcagtggtgatcaatctgcttccaatcatccttgctgtagccggtttcttttcttcaacaaatctggatgcgatcacaatatcatttccttcttctattttccggatcattgctgcaatatattccggtctgtgctgtccatctgcatcaaactgtactgcgcaatcatatcccttttgatatgcatatttcataccagtctgaaatccacctgcaagtcctaaatttaccggaagatctataatattgtaatgatttgaatggcatatctcagatgttttatccattgatccatcattaatcaccacataatcatactctggataattttctgtcaaatgcttcaccacacgttctatattgtcttgttcgttgtatgccggaatgatgatcaatactttcattctttctccccattcatgtcttttgcaatctgcataaccttttcagcagtggcatcccacgtgaaatattttactaatctatcataacttttacattctgcctgtgttcggtatgcatcatcttctattactttttccaaatttttctgaattgattcaactgtattatctctcatgataattccatactgttcatctatgagcaactctttcgctccacctcgataagttgttatcacaaaacacttacatgccacagcctccaatacggaagttggaaagccttccgaatctgatggcaggcaaaatatatctgacgcatccaaaattttaacaatatgttcaaagtcaatttgtcccgtcaatatggtatattgatctgacatttctaacaattcctgatataacgggccatcccctgcaatcattaaataaaccggtatctgtccgttttttatcctgcttatatttatcttctttactgctgatacaagctgtttaatccctttttccggaattaatctgccagtaaaagaaatcacttttgctccactcggaattccatattccttccgataatcaatgtcggactcttttagaattctctgaaattcttcgatttctactgcattatatagtgttccctttgattttatatggaaatgcccgctccactcacaacaggcttctgaaacaccataataatcattacaatattttttcaacaaaaatgtaaggaaatgttcataccatccccccactgtgtcaaacaacttattatttacactcaggtgagatgttccatgctctattacaatggatggaattcccttactttttgcaaattttgctccgtataatgaatgcaaatagaatctcgtattaataatcacaagatcatactgattcatcctgatcaacttttctacttttttaaactctttattttttttgaacaccggatatcttccgcctaataaatcgtaacatggcagacgataaatctggattccttcttgtatttcatctcctgataaatcacccgtatttgatgttactatagtaacttcgtttcctgcagcgatcaattttctgctcaaatacaaagtataacgttctacaccaccaacatgcggataatactgtgcagaaaaaatgcaataatgttttgacatttttttcacctgttcaattgctctaatgtattttttcattatgaataataaacttttttaatatataacattaaaattcttgatgtcaatccaaatcctaatatacgatataccctatgaaccagatgaactgccgggtttatatcataagttaacagatatgcatattttttcattatctcacgatcatttttaatttgctcattctgttctatcaaatatgcctgtcccatccagactgcaaacggatacgctaaatacgcataaaaaactttccgatattcttgatccaaatatttttctgcatattgggtatattctattataatatttttcagatcattcaccatataatatttcatcttctgacttgtctgagctgtttcatggcctttgcgatacacataaaatggtttatcataccattcaaaccgttctgcgtaaatcagcattctggcaatccagtctgtatcttcattgcggattccctttttaaaatacagatcgtgttcccgtatcaaagaggtttttacaagttttgtccaaactgtaacgctaagcattccagcttttatcagattttccactgcctcttttcttttctttcccgatacaagtgtgcgatcaaaagaagatgggtttacagttttatttttatcctgccaatacaccatgtttgcatgcatcacaacatccggttctgtctcacttatcacttttatgatatcacacaacgcatctggattactccaataatcatcattgtccataaatgtgatgtaatcaccactggctttctccaatccgacgtttcttgcatctgatgttccaccgttctgtttgtgaatcgtaacaattctgtcatctttttgggcatattcatcacatatcatcggactatcatccgtagatccatcatctactaacaaaatttcgaaattgtgatacgtctgcgccaatatactttccacacattgtttcaaatataaagttgagttgtataccggtataataatacttattttcatatcttacttaatatctttttcttttaatttttgaaaaaatatcccttactctcccaatccatcctcaatcgcttccacgatcgcttttaaagcctcttcctcgtcttcgccctcgcatatgagttcaatctcatctccggacttgatacatgcgcctaacacgcttaagacactttttgcgtttgcgatattatcgcggtagcggaacgtgatatgtgatttaaactgcattgcatccttacataaaattcccgcaggtctcaaatgcagtcctgttggattttttattactactttctgactaaccatgctgtattaccctccaaattccagtcccctgatttttttatccgtatgccggtctgaatcaccatgttataatcagaccagcattttggtattctataacataatttttgtgatcaattccgccagtttccttgcttcttcatcgatcactttctgatctttcccctcgatcatgacgcgcaccagcggctctgttccggatgggcggatgagaacccttccctcgcccttgaattttttctcaacatctgccacagcatctgcaatttcctgatattccatgaatttttcttttttatggtttggaacttttgcattgacaagagcctgtgggagcacttccataatctcagcaagttctgacaacggttttccggtattgaccataacctctaataaatgcagggcgcttaataatccgtcaccggttgtattatcgtctaagaagataacgtggccggactgctctcctccgatgttatagccattttttctcatattctcaagaacataacggtcgccgactttggtcttttccacatggatgccctctttctgccccataagggtaaatccgaggttcgtcatgactgtgactacgatcgtatctttcttcaaagttcctttggacttcatgtagttgccacagattgccatgatctgatcgccgtccacaacatttccatgctcatccactgcaagcatacggtctgcatcaccgtcaaacgcgagaccaactgctgccttttcatatacaacacgcgctttcagctcatccatatgagtggagccacagttggaattgatgttggttccatctggatcggtatggattgcgataagttctgccccaagatctgtcagcgttttgacagatgtataatgagatgcaccttctgcacagtctacaacaattttcatgccttttagatccactggaacacatttttccatgaattttacatattcgtctctcagatcgaagcgataatcaatctttccgacaccggaaccgatcggaagtaccacgtctttcatgttgtttttgatcagagcctcaatctcatcttccatctcatccggaagtttataaccttctccattaaaaaacttaattccgttgaattccattggattgtgtgatgcagagatgactactccggcatctactttgtgttttctggtgagatacgcgattgcaggtgtcggcattactccaacaaaaattgcatttgcaccaactgaacagatacctgccattaatgcacttgctaacattcctccggaaattctggtatcacatcctacaataatggttgcctgatgttcctgctcttttgtgagcacgtaagctcctgcctgacctaactttgttgccagttcgattgttaattctgagcccgccacaccacggacaccgtctgttccaaacattcttgccatgttactattcctctctttgttcctgattttatagatatctgtgaaactggttatcagcttctttnnnnnnnnnnnnnnnnnnnnnnnnnnnnnnnnnnnnnnnnnnnnnnnnnnnnnnnnnnnnnnnnnnnnnnnnnnnnnnnnnnnnnnnnnnnnnnnnnnnncctctctttgttcctgattttatagatatctgtgaaactggttatcagcttctttcaatcatccaatattttttcaaatttttacggtttataattcattatttctgttccgcttgtttcaaaatctactaccggtcaattacctttttagaagttgacgtattttccagttcctcgtctgtattatcagcagaagcagatgtatcagatgcactttcaatggtaaccgctgcataagtatccgcatagctgaccatatcctcatccagtgcaaatgtgatcagtacattatgtgcacccagttttaaatctgtcagatcgatactgccggaaatcgtcttttcatccagtgcatcgatcacactgctccttccagacactgtgagagcaatgttgtcttcctcatactgtactttttcatctgagtcaagtccgatcacctgaagatttgtcaccgggatctgcagagtctttgtcttcactgcctccacaacaaccgtaacattgatctttgagtccgaactgatcaccaaagcagtacctgaaggaagatatgtggaaatatccacagtcttttcaatatccgaagatgcgtctgtaaggtctaacacttcttccgggatcgtgatcttattaatggtatttaaaatagccgcctcgcctttaatacgtactttctgtggcgtataggtgagatcccctgcctgatatccatctgccggagttccggttgtcaggaattccagttccacatctttcgtattcaggatctgtgcactgatattgactgtgctcacactcagcgtaagctttgtcgtatccacaacctctccctgtgcatcataaaatacaggtgtcacacggtctgtgatatccgttgacatgccatctacattaatagtcgccacaacggtatcgatctgatttaccacagaagccggaccggatactttcataacattcgcatctgtgatctcaacatcaccaagcgcgcatcccgacgcaaccgtaccggttgtgtttgtcttgatcgggaactgttttgaagcagaatcctccagttcaagatccagatacagatctttgctggtaatattaatactgctgctgttacggttacaggtcacgacaaccggcacacggtaagtccctgttttctcatcatattcaattttctgtgcatccgccgttgctgtaaagttcgcattggtaagtgtattatgcacagagcgttttgcatacacgctgaacgtgatcgtattctttccatccagataatctgcccattttcccatggaggtgatataagatttattttccagtgagacactggttgtgtaaggttttgagttgctcggatcatcaatattcacgactacgatccataaaacaacagcaaacaaaacagcaaggattttaaggccaaagttattcattactttctttccgaatttttgtaacatctttcagcctccttctccatgatttcactttcgaagtgtcctgctcacgtttctgaatgtaagccagtttattttttaagaattctgcatctacattccggtaaagttcaccgtccagtgcaatggatacttttccggtttcctccgatactacaattgtgagtgaatcgctcacctcactgataccgactgccgcacggtgtcttgttccaaggtctttgctcaggcttaaggagtccgtcagtggaagatagcaggtggcagaaacaactctgtctcccctcacaatgactgctccatcatgcagcggtgtgtttttttcaaaaatattgatcagaagctggctggtcaggataccatctacggcaatccctgtcctctcatactccgtcagaacgatttcatcttccactacgatgagtgctcctgtttttacttttcccatctcatagcaggccttcaccagctctgtgatagtcttgtcggaaaactttccattctccactttgttgaaatcaaaattaaaaagatttaccaaaatgttcttccgtccgagattttccagtgccttgcgcatctccggctggaagatcacgaccacagcgatcattgccacgttaaacagtttgtcggcgatccagacgatcgtattcatttcaaataaaactgcaagcaaaacaaaggcaaggatcacaaggattccacggagaagcatccacgctctcgtatctttgatccaaaccagcatataatagatcagaactgaaatgataatgatctctataatatctgtgagggacatctgaagcgtcaggtaagacaccgctttttcccaaaacgtccgcaatattacgcctaaattctgcaccggattcacttccttttaatctaataaattttcgtctatgtccatctcttctgcaaatttcttcttgttcaaacgttccttctcgtttttgccgttaaaacgtttgatctgtttatccttctctgtcaccagagactttggaactgcttttacataataatagtaatcatcatcctcgaactggagtcgttccgttctggagtaatccagattaaaaaacagaaactggatgatcatggcgatcacaccggagatcacgcttccaatgatcacaccggcaattttgtctgaaatcccaagtaaaatgtatcctgctgtcagtccaatcgcttcaaataaaataccggatgcccatgcaaccgtccatgaatgctcaatgtcaagctttctcaccacatagacaatgagtgtcgtaatgataaaaatgccaagaacaaggtacatctctttatttccaatcagctggttcaatgccactactacttttgataccgaagaatccgtctcttccgctgcatcgctcaatgcgcttgcattctcgctcactccatggataaagaaatagatcaccgtaccgcaggcaacagacactacagaatacgcctcactcagcagaccggagccaaccggtaccgcataaggaatatgcagcttaaagcagaccggtgtcagaaccgcattgataccactctttggggaaaaacggaaataaataaaatagatgatcgcaaacatgagaagtcctaccagacatacctcaatggataatgcgtacagatccgccaaaacgaccaacgcagcaattgcgatcagtccattgaccggaagcatggaacacacaagtgcaagaatgactgcaaccggagtcttgctgaccagtttcatatatccaatactgttgttgatcacaaggaatgtaaacaatgcaagtacaaaccggatcgccggtttcacatatatttcattttttccgtaaaaacggatcagtttctctttcaattctaataaggttgtcattttagcctcccgccgtttgttttactcctgattttcctgccccccggcagcgttcagtgattattcccagtctttattctcagacattttcagcttgtcttccctctcgtataactgattcagcttcttcagattgccataatacttctttacctcacggcgtccctttgtatatcttctattataaacaaaatacgtgatcgccatgtaagcaatcataaacacaatatactttaccagcacggatgtcagcagttcctgaatatccattgcattcagattctccattaactggttcatggaataaatgccccatgtcacaaggatcagcgcaaagccaatcgttcctgacacaaagcttccaagcatacgcagcgaaacataatcttttcttgcatactgtgtcatcggcttacattcttttccctgatcggtgtcaaatatcgccatttttatcatatgatgtaaacgttcttcgttaaccatgcagatttccttcctgtctgtcacacaatgtatctactataaaataaacccatctcattttctgaaaaagtacattcttcacgcaattatgcattcttattcatcattataacacagtaggcggtattttcaaacaaaaaaaagcagatgcgacctttctacgtttctatctatataaataacgtagctatgcgccctgcttttttataaattctgtccttattttcagatatgtgacattctgttcccggttctatctcaggaatctcatcttatccccttcatcacgctctccgcccgatctctgctgcattggacgtggtctgttcaaagcactccgcagattatttgccatagcagctttacacttgtcacagaagcgtccgcttgtgatcggtctgccacagtgttcacacaacacaccatctaaagaagcttccgagaggatcagtctctcctctttcacccactgtttgatctgtttcacagaaacatccatatcctctgccacctgactgatggatgcctgtggatgttcaccgatataatctttcacgctgctaaatttcttctcaagctttgccctgcattcagggcaaagctgtgcgccactcatataattaaagagttttccacagcccttacaatttcttacatccatagcatattcctcctaaaatccctcgccgatactgatacataggaaataaatctcatccacccctgcctgcaaaagtacctctgccactgcatcgatcgtgcttcccgtcgtatagatatcatctacaattaatattttcctatattttactatatttggtactaactggaaagctttttttagatttatcttccgttcgacatcatttaattctttttgcggcgtggtattccggattcgttttaccatgcgcttttccaccggaagattcattttttctcccagagtccgcgcaaatacggctgcctgattataccctctccccttttccttcaaacggtacatgggaacgggtacaattgcttcgatctgttttcttcggatccagtctccatagatgcgcactgcttctttcgcataaaaatctgcatattcgcgtttattactatatttaaaacggtacatggactggcggatttctccctgataaacaaaaaccgcttttccctgggaaaaatagtgttttttcctcatgcagtctgtgcagtattccctcctctggtcttctaatggcttgccacattttttgcaggacggttccccgatacagatcactttcttccggcagtcttcacatgtatctttcccaacatatatcacctcatcacagacagggcatcttggaggaaatacaatgttggataacccctcttttattttcataaaatcctttctaaaaatctctccggtttccatcctaacacttttctaccctgcatactataaaggttttcttaagattttaaatctttttcttatgatcctcaccgaaaaaatgagtgtcctttacacattttttctcaaattccggttgacgaatcctgtatgagtgattataattcaatcattaaaagcattaatgctttaaagcattaaaggctatgatcaatgataaggagaatgaatatgaaaaagatgaacaaaatactctctgtcatgatggcagctgcaatgacagtttccatgacagcatgcggcggcgatacagcctccgacaatacctctgcatctgctgacaattcagcagcaacaacagaatccgctgcagcaggcagtaccgatggtcagaaatatacgatcggtattttacagcagttagagcaccctgctcttgacgctgcttcccagggctttgaggacgcactgacagagctgctcggtgcagataatgtaacatttgaccttcagaacgcacagggcgagcaggcaaactgtgctaccattgcaaacaattttgttgccagcaattatgatttaatccttgcaaatgcaaccactgctttacagtgttccgccgctgctacaagcacgatcccgattctcggaacttctgttacggattatgcaactgcccttgagattgacgactggacaggttctaccggaagaaatatctccggaacttccgatcttgctcctttagatgaacaggaagccatgatcaaagaattattcccggatgtaaaaacagtcggtatcctttactgttccgcagagccaaactccaagtatcaggctacccagatcgaggctgctttagatgctgacggcattgcatacaaagaatatactgcttctgattccaatgatatcacctctgtggtacagacggcagtttccgaagtagatgttatttacattccaacagacaacacaatggcaaacaacacagaaaccatcaataacatcgctcttccggcaggtattccgatcattgccggtgaggaaggcatctgttccggatgtggtgttgcaacgctttctatcagctactatgatatcggatacacagcaggccagatggcttatgatatccttgtaaacggtgctgatatcacaacgatggagatcaaaactgcaccacaggtaacaaaagagtacaatgcagatatttgttcccagcttggaatcacacctcctgatgattatgttgcaattgaaacagaataatctttcatcaatgcaacaagttaaagctttaaatcgttttagtattatgttataatatgcctgcggtatttcgtctcaacaaataccgcaggtattttatgctgtgggtattttgttctgcaagcaattgatttcatgaatattgttttatatttgtagatgatttttgcaccaaatagttccgcacaggcattttataaaaaaataaggagagatttcttatgacgatgatgttaacaacttatttagcttccctgagcccgctggcattgctccgttccctgccgggcgcatgtgcacagggactcatctggggactccttgcactcggagtctacattacttacaaattattggattttgccgatctgaccgtcgacggttccatggcgaccggaggtgcagtcgccgttatgctgatccgcgcaggcatgaacccatggcttgctcttatctttgcttttcttgcaggaatggccgccggatttatcaccggaatgttacataccgcactcggaatcccgggaatccttgcaagtatcctgacgcagatttcactttactctatcaacttaaatattctcggaagttccaatcaggcagtcagcgttgacaaatacagccttgttgtgtcactccgttatatttcggactcaaccgcaagcaaaatccgtatgtttacgacctgtatcctcttctgtgttgtactcgttgccattctctactggtatttcggaacagagcagggacatgcgatccgtgcaaccggctgtaaccggcagatggcaagagcgcagggaatcaacactgattttcataccgtacttgcactgatgatctctaacggtcttgtaggactttccggtggactttacgcccagtatcagggagcagcggatgtcaatatgggacgtggtgcgatcgttatcggacttgctgctgttatcattggcgatgtcctctttggaaaaatgtgtgccggcaaaaaaattgcatttgcttacacactgctctccgtcattgccggagctatcctgtactaccttgttttaagtgttgttttatggttgaaattcccatccgacgacctgaaattattctctgcaattgtagtagctatcttcctttcaatcccgtatctgaaagcgaaacatagcaggaaaggagtggcaaaataatggctgaaatgttaaaaatcgatcatatctgcaaaacatttaacgctggtacgatcaatgaaaaagttgctttaaacggagttgatctgacattagaagatggcgattttgtcactgttatcggtggtaacggtgctggaaaatccacaactttaaacgctgtcgcaggtgtctggccagtggattccggtaaaatatttattggtggtgatgatgtcacaaaattatccgaatacaagcgtgccaaatatttaggccgtgtcttccaggatcctatgactggaaccgccaccaccatgtccatcgaggaaaatatggcaattgcagcccgccgtggcagaaaacgtgggttaagctggggaatcacgaaggcagaacgcgacacctaccgggaaatgtta

SEQ ID NO: 320 - DNA, 21150 bp, unidentified
  source 1..21150: mol_type = unassigned DNA
atcggttgaaacaaacgatcgataccgtaagggagcaatacgactacgtgctgattgactgtccgccgatcgagctggtcgccgatacgcagatcatcgaaaaactggcggaccggactatcttcgtgatccgcgccggactgctcgaacggagcatgctcgttgagctggaaaagatctacgacgagaaaaagtacaagaatatgtccatgatcctgaacggcaccgaagagagcggaggccgttacggatacagatacggctaccgttacggttatcactacggttacggctcaggataccactatggctccgacgagaagcggagggggggggaaatggctggtcgttaaatgattgaaaccatgaatctctggccgttcagaaagcgcgtttcattgcaggacagcggcattttcaacgggttcaccgattggcactgccacattctgccggatgtggacgacggtgtgcggacaatgggagagtctttggaaattctgcatctatacgaaaagctgggaataaaatctgtatggttcacgccgcacatcatggaggacattcccaataccaccgctcatctgcggaaacgtttcaccgaactgcaagcctcttattcgggaaccgttgaactacacctcgccgcggaaaacatgctcgataacctcttcgaggaacggctggaaaagaatgacctgttgccattgggcaagaatggtgaccatttactggtagaaaccagttatttcaatccgccgatggacttgtacggcatattggagcgaatcaaagcaaaaggctactatccggtcctcgcacatccggaacggtatgtctatatggagaaaaaagattatcaaatgctgaaaaaactcgatatcaaatttcaattgaatttgttttcgctggtcggtacgtacgggagaagcgtacagcgaaaagccgagtggctactgaaaaataacatgatagcctatcgaggaagtgatattcatcatgcggaaacatttcacaatctgataatccgccgaaaaataatcattccgacattccagttggtaaagagcgttcatgcctgattttcaattttcgatggataataaacgaattgctaaaaatactatattcttgtatatgagaatgattcttgcaatgggaatcagcctatatacgagcagagtcgttttatcgcaattaggagtaacggattttggtgtgtataatgtggttggaggtgttgttgcgatgttctcggtcctcaattcggcgatggcaggcagtacacagcgatatcttacttttgaattaggaagaaatgatataaaccgattgaatattgtatttaacacaggggttcaaatccatctattaatagcattaattgttgttattataacagaaacatttggcttatggtttcttaatcatgaaatgaagataccttcagacagaatggatgccgctcattgggtttttcagttttccattctttctatggcaatatcattcttaaatgtcccatatacagcattaatcattgcctatgaaagaatgagtgctttcgcttatatttcaataattgaagttcttctaaaattgagcgttgcgtttcttctaataatatcaccatttgagaaactgaaattttatgctttactgacatttttatgtccgttaattatcagattttgttattggcattattgcaataaaaattttgagacttcaaagttgaggagaatcttcgaaccaaagttgtttaaggaaatgttctcttttgccggatggggattgtttgggcaattagcatcaatgggttccacacaaggagtcaatgttttacttaacgtattttttggccccatagtaaatgccgccagaggtattgcagttcaagtacaatctgcggttacgcaattttcaattaattttcagacggcggtcaatcctcaaatcacaaagaattatgcaagttcacatttcgcggaaatgcacgaattgatgtgccgaagtgcaaaattttcatttttcctactatatgcgcttggactgcccataatgattgaagctccctttatcctaaatatatggttaacggaagttccggaatattctgtgacttttttacgtataattctatggataacaataatcgatgccgtcgcgaatccattgatggtcgcagcatcagcatcgggtaagataaaaaaatatcagtccattatcggaggtcttttgctttcaatcgtaccgatcgcctattttgttttaaaattgggaggcgatcctgcatcggcatttattgtccatctggctatttgtatcattgcgtttattgcccgcatttttattgttgcgcctctaaccaaaatttcaccctctttgttctttaagaaagttataatgaggtgtatctatgtcggagcagcctcaatcataatccctatcacgttatatatttccacggcagacggcgtcatgagaaatatactggttattttattatccattttctctgtttgtgtagtggcatattattggggattcgacgaaaaggagcggttgtattttaaagatatgattgccaaatacaaaaggaagttgatatgatcaacatttctaaaccgactgaatgttgcgggtgtaatgcctgtgtgcaagcatgtcccaaatcgtgcatttcattcgatgaagatagagagggttttcgttatcctcatgttgatttgaatcggtgtatcaactgtaatttatgtgaaaaagtatgtccagttttattcaatgtacctcataaacaaggcataaagaaagtatacgctgccatctacgaaaatgagacgatacgagcaaacagttcatccggagcaattttcagttatatctctgaaaaagtcattaaaaaaggcggagttgttttcggggctggtttcgatagtaactgggaagtcaaacatctctgtgtcaagaacgaacaagatttatcaaaaatcagaggctccaaatatctacaaagtcggatagaagattcctataaaagaacaagaactcttttagaagatgggcgtgttgttttgttctcgggtacaccgtgccagattgcaggactaaagaaatttctacgcaaagattatgagaatcttatttgtattgattttatatgtcatggcgtcccaagtcctaaaatttggagattatatcttgaacaaattataaaggatcgtaatctaggactggatctgggagatattgaatcagtaaatttcagatcaaaatctttggggtggcgtaattatagcctccaaataatctcatcgaatggtatcagagaagtgtctcactttgaagattattacaatagggcatttaaccggaatatgacattacgaccaatttgttatcgatgtccattcaaaggaggaaattcaggcagcgattttactttggccgacttttggggtattaagggaattgccccgaccatgtatgacgataggggtaccagtatggttatatcatacggaagagaagtcatcggtcttgaaaaactccgattattggaagaacctattgattgtatacggaaatacaattcatcttattatgaatcggcccaaattgacgataatagggttgtattctttggtcatttgaaagacaatgtcaatattataaagctacttaagcgttgtataacaccgaccttgtcacaaagagtatcaaataggatttatagactgactcataaaaaagatatatgagaataggattgttttcaccgcatttcgctttcaactatggagctgtattgcaagcgttcgcactcaagacctttctaatagaacacggatatgatgcagtaattctaaacagaagaccggaatatcattgcgccataccgtccttatccgggagaatcgcgagaaaaatagaggtattggccaaatccaatagttttggaaaatttgaacgagaataccttcaaccccagacagagcttatagtccaccaaaaagattggagcaaattcgaaaattttaatttagatgcggtaatcgtaggaagcgaccagatttggagagacgattattgttttacttcatttggttataatctgtttttggattttatcacagataggtctatcaaaaagatttcgtatgccccatctttagggaaagactcttggaatgctgatcccgaagtagaagctaaagtgaagatgctcattaatgacttttcatctatatctgtaagagaaaaatcgagcattgacatcttgaaacaaaaattcggcgttgactcagaattggtcctcgatccgaccatgttgctgacaagggacgattatagaaagcatttcaagataaaaaaacggttggataactatatcgcaacctacatcttggattataatgatgagcagaacatggtattatccaatatcggcaaaggtttaaatctgaaaatacacaaaatattagtcagaactcccaaatcaaaaatcggcaaactgcttaacagattccgtacaatgaagcccgttttaaaatgggtaagtgatatagcaaatgccaaatatgtcattacaaattcattccatggaatggtgttttccattatatttagaaaacaatttgtggtgattatgaatgaagaaagaggagcagccagatttaagtccctcctcagtatgtttggattagaaaatagactcctaagtaattataatgattctctgtccctgttttcagaaactattgactattcagcgattgaaccgacaattgatttatggcgaaataaatcgattgactttttaattaaaagtttatcaaaatgaaaattggaattataacatttgaattcaattataattatggtgcgatactccaagccacagcattgctcgattatttgagaggcattgggcatagtccattgataatcaacagaggttggaaagatgatgatgaggggggggggaaatcttatcggtaaagttgttggacgattatggagcaataaattgataatagacttcaagaatcggcactgggatatgacagctccagttaaagatcaatcttctttgaattcaaccttatccaacatggatgctataataacaggaagtgatcagatatggaatagtgcatgtattgaaaacatggggttgtattatttcggaatagatgcattgccgagacagaaactcatcgcctacgcaccaagttttgggaaaaatagatttgaaaccaataaatatcaaatcgacacactgaaaactcattttcgtaaatttaaggcaatttcagttagagaagacgacggagtgtcgatcatgcaaaatgtattcggcatcgataatgttatgaaggttttggatccaacaatgctgatggataaagattattatttaagattggctggaataacagatttaaagcaaaaagactcgttagcatactatatactcgataatgatccgcaaaaacagagatggattgatactctatcaagaaatctgggattaaaacccgtaaatattaacaaacctgaatataatggttcttcgcctattgggaagattcgttccttgaggtatccttctattgaaaattggttgaaaaatattgcagaatcgaaatttgttttgactgattcttttcatggaacggttttctcgattatttttaatcgcagttttctgacttttggaaataacgcaagaggtaattcaagatttgagagtctattatctatgtttgaattacagagccggattattgtcaatccggatgaaattacactccctgtaaaggagattaactacccaaaagtcaatatacttcttaataaatatcgtaaggaatcagcagatttcctattaatggcactctcatgaacataagcttctatttgcagaataaaaatatcagcgatgtagactgctctaatccgatgagtgggaatcctggcatcggaggttgtgagtatatgtttatcgccatcccgttttatttatggcaaacaaaagataataaccatcatattttattgatggctaactctactaaacatttgccacatcataataattgtattcaagtagagtcagatgaagatttgcgacggagtgtaactgaacattcaatagatgccgtagttttgaggtattctctcgacaatttgaatatcgctgaagatttaccatccaatgtgatggtaataatgtggtcacacaattttattaaaagagctgaattatccagattagcaaaagaccgtcgaatcacgtgtatagtatgcgttggcaaagaacaactacagatgtatcgtgaccatcaggcattttataaatctattgcaatttataatggttatccaatcaatcactttatacggactcagtcttgcaaaatctctccatttgaaaatcgaagtaatgaagtgacatttttgggaaacttggtagattataaaggattccatcttcttgcgaaagcctggaaaaagatattggaagctgttcccgatgcacatctaaatgttataggcggaggcaaactatatgacaggaatcagaaacttggaatatggggcatcgcggaggagtcttatgagaatatgtttatgccatatctgcttggagatgatggcaaacttctcccttccgtaacatttcacggcgttatgggaaatgaaaaagccgtcatcttgaatcgtacaaaggttggagtcccaaatccctccgggataagtgaaacattttgtatagcagctttggaaatgcaattatatggtgcgataatatcgaccataagctatggaggctttaaagatacagtatataagaccggagacctatatgaaacgcctgataggctcgccgaaagtgtagtcagacagcttaaaaaaacagacaacgattattccggggccttagatttcgtcaggctttttgacttttctactgtcataaaaaagtggattgaactgttcaacacactccaacagacaggtaatattgattctatcctaaaaccaaagcctacgaaagaatatcgcttagctgagtggaacagaaaatttaagaggattattccttttggaagcctgttgccttcttcaatgttctacaaaagcatctttcatcgaatcagctcactattacatgtatgcctgtcgtaagcataattatccccgcatataacgcctcaaggtttatacgacaatgtattgaaagcatccttaatcaagatttcctcgattgggaattaattataattgatgacgggagtactgatgatactaaaatgatttgtgaggaatatgtatcaatagacagaaaaatccgtcttatatcccagaaaaaccaaggagtgtccgttgcacgcaacaaaggtctgtgtatatcatcgggagaatttataatgtttatagatgcagatgatttattaccatgccattctttacgaatctttcacgaagctctcaaacttcacccatcaactgatatccttcgaggagaatttgatgcaattgatatttcaggaaatagaatattcacttctaacaaaaaagttttaaataaattaaaactccattctgttgatgatattaataaattctattccaagtatattaagactgaatattttctatggttaatgtggattagaaaaccatgtattaatgacattctatttaaagaagggcaaatatacatggaagacgcccggtttctatttgctgtgatgaggaatatccggagttgtgtttacataccacaagtaacatatagttataggaaatatccagaggccgcttcttcattattaaatgagaaaaaaatagaagacatagcatcactctctttatttcttaacaaattaagaaacgagcctaagaacttggattctaacactcttagtcatgctataaataactgctggaacttgatcttcaactatcttttgacgattggcaccacccaaagaactattgtaattaagaaacttgatttacatgataaagttatgaaatgtgtttctgacggcagattcggctcttcagacatgaatgactttattcacaaagacattgacactttcatctcaaattatattaagagacagaagtatagacgaatctgggatgaagcgtctaggttattgtcatatttcaaagcgcgattgtgattagaaccgattacatgcaaagagccaataatggatacggaagtttattggctatactgatatttttcataattaatcctactttagggttaattatgagtttgttggtcgccatcagttcaaatgatgattatgaaaataatcatcgcgatattatcactttcttgattattacggcagcatggattagcctcattaacataaccaaatttatttccggagatcagggagtttacacaaggatattcttgaatgttccggaagctggatttaaaggtactgtatttaatgcttggggcggctccggcaaggaaccggtattcagttgttttacctggttactttactggctcacatcaggcagcgtaagattatattattttattataagttttgccatttacatcttccattatcttgcgacctataagttatttaagaaaatggatattccaaagggcgcactgatatgcggagtgctcatcttgacattcttcactcagtacttcgtgatgactcttcagattatcaggcaaatgcttgcaggaggtattgtaatatatgctttggtttacagagctgttgagagaaaaaataattggatttttttggcaatggcagttctcgttcatacctccgccgcgtttattgctttattatctttagtgccttgggtatattcatggatgaatcctaaacgcattgtcattgttttagggtgtttcataccgattatagcctttaacggcataatcggaagagtctttggcggctcaaccggaataaatgccttagactatggattgtctatgtatggaaatagcgggtattccgacggaggaactatagcgatgtcaattatgctttttatatttattccactgacagcggtttctgccaaaatactttgcaaatacaaacataatatgatagaaaatgattctgaagaattgaaatcatttgagaccatattaccaattgtctatatttgtatccttctgctcatatttgtaatgtcatttacaaaatcgccactgatccaataccggttcttctactattcatattcgtttattccattgttgcttccaatgttatttataaaatctccctggaataagccgtattggactctatcttcaacattttttattcttcgtttttttattacccataatcaatcaggttggatatatgcttctgtatttgatatattgtcaagtacaatttactatttctggaccgggaacttccattggatgtatcttgcataacttgtcttagtcatgcatatcgtatatattagtcgggaatatccgccatcgcataggggcggtggtatcgcatcatacctcaaaatcatggctgaaggatttgcggcaaaaggccatcaagtgactgttattgccgcaagcgatgacactcggatcgaatccgacgagatcattaattccgtaagaataatacggttggcaggaggcgatttttgcattaaggcatctgaaccagactcagggattatagaaaagttcagattcatatatagattccatttatatcggaaaaagattcgtgatgctgtttctaaacttgacaatgtggatattattgaagttgctgaatatggagcagaaggattatatctcaataatcttaatatcccaatagtttacagactccatacaccggctcttttggatcacaagaattttaataaacaaagattgaacttttccaatctcttgtattattattcgggaaagaaagaattgcagatcttaagggataatggaatatatattacatcttgctcaacttcgttgaaagaatgggtgggaaaatatatcggactcgacacgaccggcattaaagtcatctacaatcctcttcaaaatgatttcttaaaggacacgcagtacgatgagaagcgcataaaatgcgataccgtattttttgccggaactgtatgtgactggaaaggtgccggagatttagccgcggcttgccaaaccctaaatgagagggggctaaacatctctcttaaaatggctggtaagactggaaactacgggaaagcattgaaagaaaaatataagtccgcatcatggcttaaaatactcggtaaactcccacaaaaggaactcaagacattatattcttcatcagccgttgtatgcctaccttcatggtgggagaatatgcccatggtctgtatcgaggccatggcgcaaggagccatcgttatcggcagcaactcaggtgggatgtctgaaataatagaggatggtcgaagcggctttcttctgccgcctaaacagccggatttatgggcaaataaaatcctggaaattattcaaatgacaactgaacaacggttgaagatttcgaatgaagcaaaacagaggatcagcaatgttttcagccttaataagataatggatcaaacatataattattatcaattcgtaatcggcgattataaaaaatgagctatcccattgccccggttacacataaacgggatccgtattatgacatattaaaggcgattgcaataatattagtggtaggctgccatacttaccatatcaagacgttcgatttaacagctgtgaatatcagccaaattattgttcgttctatctgtaatgctgccgtccccatatttttagcgatttccggctacttagtagtacaatccgttgagcgttactataccgccaatggctttgattatatcaaatatataaaggcaaaagctttacgtgtgtattatccgtgcttaatatattctgccggatggttcatattagacttgcctaatatgaactcatatgtatattatctaaaacaaataataacattctttttatgcgggtacagtgtgtattattttgtgatcgtgataatgcaatgttatatcttaacacccacgctgattaagcaccccaaaacctccttggttgtaacttgcgccatctccatgattacgataatgattacatcgtatatcataaatgttcagagaattagacttccattaatcgcatatgccggcccggcttatctttggataatatttttcatgttaggaatattcttccgaaaatttggttattcaaaatcttgtattacagggggggggctggcgcttatcggactcggattacaaataggcgaggcatattatatatactgccttaatggtagttgtcgtgtcgggataaagccgagttcttttatattctctatcggtgtaatcatgctattattctccaccccggttcgatcgttattgttaaacctattaaataatagatatatacagtggttggggacagtgtcgtttacggtatatctgattcatatgtatccactactgattatgaatcattatattaataccgacagttggttcattgaatgggcattaggcgtatcagtcacggtaggcattgtgtatatccttgattttttgattaagcctgacaaactgagacaattattgggcttataatttaagatattatgagaatactttggctctgccgttggtttggcaattatcgcatcccggtttataaagaactaaatcgcctaacaaacggtcagttctacatggcctattctaaggacgctgtcacgcccctcgttcatagacaaatgagagatgccctcggggataatgccattgctctcgaaaaagaaaaacatttcaccataggcaaactcgatagcaattttgccaacagctatatagatataccttatcagagcggactgctaaatgcaatttcgaaagtaaaccctgatatcataatcagcgatggatttttccagtggacttttgcagcggtactgaaatcataccgcagaaaagtttgtgtattttatgaacgtactgaatttgttgagcgaaatgcccctaaatggaggatattatacaggaaatcaattggcaaattcatagacggcttcctgataaacggaagtttaaccagaaagtatcttgacagcatggggttctcccaaaaaccgaaagtagagggctgcatggtagccgactgcgagggactcagtaaagcggtagaatcctgcccggaatccgttaaatctaatttgaaaaaaagtcttgacattcaggacgaaggcttgattttcctttttgttggacaattggttgaacgcaaagggatcaaggaacttttatccggttggagtgaacatctcaataatttcccggatgacacaattatcgtggtgggacaaggagtgttgggtaaggaacttcagaatatatacaagaacgaaaaatccattaaattcgtaggacaagtttcttatgaccatatcgctgagtatttagccattgctgatatttcagtcatgccgactcttgaagacaattggagtcttgtcgtacctgaagctatggcttgcagtaaacctgtcgcaacgacaccctataatggatgtcatatcgaattgatcgaagaaggcaagaatggatatgtatttgatccacttgagaaatcaagtattgttaagatgctggccgcttttcacaatgccaatttatccaatatggggaaaagatcgaaagaaataatagccaattacaccccccttacggcagctaccggaatttttgaattatgccagaaaatcacgaaataggaaatattactgtcggtagacctccattcattcataaactaagaggcatcgcaaattggatgcggagtttcgttcgattcaagatacgtcaacgttggataaagaccaacgggatgactcgtattcactcgacagtacacttgaacgctccaaacaaaatcataacttttggacatcatgtccaattaggaccatattgtcacgtatctgccgatattcattttgggaattttgtgctttgcgcagctcatgtatccttcatagggaaaaatgaacatcgctttgattgcgttgggcaaaccatatggaactcgccacgaaggattgacaagccaacgattgttggaaacgatgtatggataggccatggtgcaatcattatgggaggtgtgaaaatcggtgacggttccatcattgccgctggttctgttgtaacaaaagatattcctccaatgaatattgtcggagggaatccggccaagatattgaaaaggcggtttgagtcagatatagaagaggatgttcaccgaaaatatttaagatctatatgattaatattctcgtgaatgcatatgccatttccccaaattggggtagcgaacagggtatgggctggaattggataatcaaccttgccaaatattgccatttggatgtgattaccgaaggtgagtggcgcgaggaaattgaatatgtgcttaaaactctgccacaaagagacaatctcacgttccattacctgcccacctcagataaggtgcgaaaaatgtgttggaatcaaggcgactggcgtttctatggtcattaccgcaaatggcaaaagaaagcgttggcttgtgccaaaaatataattgcagaccatcgcattgacgtgatacatcagctcaacatggtagggttccgcgaaccaggttacctttggcagattaaggacattcctttcgtatggggaccagttgggggaatggaacttatgccaatgacatatttaaagggagcgcctgctgaacaaaggtattttaattgtctcaaaaacattttaaaccgacttcaatacaattattcgccacgtgttaaagccgccataaaacgagctgatgttatcatctcggcagtaaagggcgtacaagatgtcatcaagacagttcatcataaagatagtattttgataaatgaaaccggagttgagataatttccgattttgtcaagaaagaaagtaatgcgaatgaaccgttaagaataatatgggtaggaaaatttgatttccgcaaacaactacctattgctatccggtcaattatagcaatgaacaacaaaaatatagaattccatatatgtggcactggatcggaagccgtaacgcgggaaatgcatgaaatggcagcagcgggaggtataggagtgcaatgtttttggcatgggaatgtacccaataaatatgtaaaaagattgatggctgaatctgatctcatgcttttcacttcaattatggaggcgacctcaacggttgtgcttgaagctgtctccgtcggacttccaatagtttgctttaacacatgtggcttcggcccgatagtcaaaaggtttgctggtattacgatagaactttccaatccggatcaatccgtgatagagttcgcatcaatattggatcaactatatactgacaggtccatacttaacagaatttctgagaaaatactcttacaccgtcagtccttgacatgggaatcaaaagctaaacaaactgtcgaaatttataaagagatcctaaaatgaattatccgaaagtaagcgtaatcgttccgtgttataatgttgagagataccttgacaggtgtatgagttcattggctaaaaacacgtatgacaataaacagattgtatttatcaatgatggaagtactgactccacggcaatgttacttgatagttataggaaatacccttttgtgaaagtcatacataagaaaaatgaaggtgtgtctgtcgcaaggaatacgggaatggaaaatgcagacggaaaatatataatgtttgttgatccggacgactatgtagagcataattttattctacgagcatccaaagagatggaagaaaccggatgtgatatgataatgttcggattcaataccgactggaccggtaaacttgaacctgtaataccgctggagcattatagtttgtcctctaataaacaaataatagagaagctcttccctcggatatacggtctaagccttgaaagatttcataactggctgagtgggggggggaaacttatgcccgataaagaaaccggtcaagtatggagatggatttatagaaaaagtttccttcaaaaaaacaacattgcctttgagaaaataaaggtaggggaagatatggtctttaatgccgaatgtctattggcggccgattcattgaaaagcattgatgactgtctctataattattttccccgcaaggatggactgatgtattccaacatcaacggactcgactctctacggaacaaactcgacgtgcttgaacaacgcatacgtttgggacagattttcgaaaataaaaccggtgaaaaggctctgcctctatttggtggctcttgtattatgagttgttttgaattagcttatcttttatcaaacactgacgattataaagctttcaaatcctatgtgaacaacgctactgtgcaggaatgtatcacccattccaaaattgggttcaaaaacattaaagcactaataccttattttcttctgaaaacaagggctaatctgttgctgtttctcttattctggacggtcaataaactaaacattaaaatgtcatattaagatgagattaggcatctatatcggaggcactcctaacaagcagattgattgtcgccatattatcgaaaatggcaatccgggaataggcggtactgaatatgagtttgtgatgctctccatttatcttggacagtataatatacattcgaatatcgacctcaccattttccaaacaggtagatatactttaccggaccaaatcatctcaataaatggcgtgcatccggccgatatgcttaatgaagccaaaaaacatggcattgaccttcttataatagattctcgttggcctctcaacctaatcaagaacttaattcagttgtctggaataaaagtgattgtatggtgccattgcgtaggctctctttaccgacatttattgttctctcaatgggatgcgataagaaaagtagtattcgtcagtcgtggccactatttgaactatattgataatcccataattaataaatcttcttttgttttcaatgcagtttcagtaaatgacaacattcatagaaatcgggagaatatgccattcaatattagaccccatgatgccgtcttcatgggtgctcttgatgaatcaaaaggatttcatgtattagctaaggcatggcctgaagtacttcgtcttgtacctgacgctcgacttcatgttatcggttctgcaaacttatatggtgggcggttcgagatagggccactcggcattgctgctgaaaattatgaaaaaaagtttggcaagtatttgtgtacgaaaagtggattgcttcacccctctgtaattttacatgggcaattaggtaaggagaaatacgaaataatgacaaaatgtcgagttggaattcctaatcctgatggtaatacagagacattttgcatctgcgctgtggagatgcagttatgcggatgcaaagtggtaacaaaatggagcagcggctatattgacacagttcctttccccaacattatggtaagccgcacgaaagatcttgcctctgccatcgcgtcatcgcttgttgaagataactttgattgcacctccaatttatggaacataagaagccacttctcaattaatgcattcggagataaatggatgaaaattatccattctgtatatgaggatagtgaattttctgaaaatatcactatccccaccaattttaagtcacgcaagattaatgcttcaataagaagattccttccatttatccctccgatcggattgttaagcgatactctttaccgatttcttgttgttttaaaaaggaatatatcccattgatatgaaaaatattacctacaaaaacggagggggggggtactatggtaaaaccgaatctcaaatggttgcaggtattgcaatacttttaatgatatggcatcatctattttcttaccctaattggttgattgatggaattagtgtaaattctgcgttaggtaaatatgtcaactatatagtctggttgaccgcccgaatagggaatatttgcatttatattttcgcttttcaaagcggttactcaatttaccagcgatcggagttgtatgatactacaaggaaacgggctgcaagaattttttcatttcttttttcgtattggatcgtatgcatcttcttttgggtaatcggatggttttttaatgagaatctcccaacgccagccgccgcaatattaaacatgttcggccttgaggttgggttctatacagattggattaatgtcatctttgcttggtatgttctttattatatactgttaatagcagcttaccctatactaaaccggtgtttcaggactaaaagtattaggcttatatgtctgtctactattggttgtctttgtgtattggtagtgctttctcattatgaaatagcaggatattggacaccttttgccgcttctctcatgggaatatttacatcgaaatatagactcttcgaacacttggacaacgccctaaataagtattctaaaaatatctggttttgtttactgacactgtgtggtgtgatttcagtcagagtcatacttctgtatattcagtctcatctttattacagttcattgtttgcagtttttgcatctgtttgcgagggcttaatcgctttcgcttttatttacgttctgatatcttttatgaataatatttgcagaccttggatatcccgtatactttgttttttgggagggataagcatgtttctatggtttcttcattccatattattcaccggatcaagatttcttcaaccatttgtctatttttccagtgagcctattgtcatatttttaactactcttttagtatttgtacctattgctgtcatgtttaggttgttcaataaagggcttcgaaaattataatatggcttatagaaaataccatttctatagacagagaagttcaaacctatctatcaatagtgtaaaacaatggtaataaatatgaagacttttttcaatatcaactatgaatttgacagaatcaaaatacatgattccatcgctgagcgacttacactgccgggttctgattatatatgtgtagctgatggcgttattctaaatacagcaaatagacataagcaatatctcgacattgtaaatggtggaatgttctctatctgcgacagcagttatgtacccctctatatccgctggatttatggaaagcggtatgagcaatattgcggcagtcagattttcatggatattatccgcagtcataagtatcggatgattttcatgggaacctcacaggccatcctggatggtctgaaagccaacttgcaaaaggaaaacaccgatgtcgtaaatatgcagttcgtcgaactgccgttccgccaagtagaggagttcgattatccgggaattgcccggataattgagaccgatggcgctgatattatttggatcgcgttgggagctcccaaacaggagatcttcatgagccggttgaaaccctatttgcatcatggtgtcatgattgccgtaggggccgcgttcaaattcttcagcgggacagaggtttcacgtgctcctcaatggatgatccgttgtcaccttgaatttgtgcaccgtatctttaaggaaccgcgtaaacaactgtcccgatgcataggtattcttggttcgctgcctcgccttctgtggcaggaatggcgacgtaagcggcacagtgcccatacgtgttaatcagaaattttcatttggcgcggacgtttggaaaatagtcctggcgcatctttctattcccattcctgagctataatgcgtcatgtcaatttcgaaagcattgtgctctacccattgcatcatcagcaatatttcataacatctatttcttaaaaaatgaaaaaagccttaatcaccgggattacaggccaggacggttcgttcttggctgaactccttttgcaaaaaggatatgacgtacatggtactatccgtcgttcatcggtagactaccgcgagcgcatcgctcatttggaaggtcatcctcatttccacctccattatgcagacctcggcgactcgatgagcatcctgcaagttgtcaggaaaatcaaaccgaacgaaatatacaacctcgcagcccaaagccatgtccaggtatcattcgacgctccggagtttaccgccgatgtcgatgcgaccggcgtactgcgtatccttgaggctgtgcgccagtgtggtctcgctgaaacctgccgtatctaccaggcctcgacctcggaactctacggcaaggtggaggaagtccctcagaatgaaaagacgccgttccatccttattcgccttatgccgtagcgaaactctatggctattggatcgtcaaggagtaccgcgaagcttacaatatgttttgctgctcgggcattctgttcaaccatgaatcggaacgccggggtgaaacgttcgttacccgcaagatcaccctcgccgcagcacgcatcgcacaagggaaacaggataaattgtatttaggcaacttgtcgtcgctccgcgactggggctatgccaaagactacgtagaatgtatgtggctgattctccaaaacgacaagccggaagatttcgtcatcgccacgggcgaacagcattctgtgcgtgaattttgctatcttgcatttaaatacgtcggcattgaactggagtttgtcggagacggccagaacgagaaaggtgtcgacaaggcgacaggcaaggtgctggtcgcggtttctccggatttctaccgtccgacggatgtggtgaatcttttgggagacccgaccaaggcaaagaccgaattggggtggaatcctacccggacgagttttgagcagctggtccggatcatggtcgatgccgacatggcaaaagtggccgttgagcgggccggtgaagagattcggacgaacctggccgaatatctcgaaaaagggattgtaaaatagcggcgggatggaaaagagtgcaaaaatatatgtggctgggcaccggggtatggtcggatctgccattgtgcgtgaattgcggcgtcagggatatgtaaatatcgtcacccgcacgcaccgggaactggatcttacgcgccagaaggctgtcgagcgtttctttgccgaggaacgaccggaatatgtttttttggccgctgcgaaggtcgggggcatcgaagccaaccagagcgccctagcggattttatgtacgagaatatgattctcgagatgaatgtgatccattctgcatggcagaacgggtgcaagaagctggaatttctgggttcgtcatgtatctacccgcgtatggcaccccagcccatgaaagaaaactgtctgttgacatccgaactggaaaagaccaatgaagcctacgccctggcgaagatttccggattgaaatactgcgaatacctgaaccgtcagtacggcacggattatatcagcgtaatgcctacgaatctctacggtccgaacgataactaccatccgactcacagccacgtgctgcctgcgctgatccgccgcttccacgaagcgaaagaacagcacttgcccttcgtaacttgctggggtgacggcagtccgctgcgcgaatttctgtatgtcgatgacttggcgaatttgtgcgtttttctgataaacaactattcgggcaacgagacggtcaatgccggtacgggcaaggaactttcgatcaaggaactgacggaacttgtggcgaaagtgatcggttatacgggtgaaatccgctgggacccctctaaacccaacggcacaccccgcaaattgctcgatgtgtcgaaagccgcggcgcttggctggagctataaaacggaattggaggagggaatccggttctcatatcaggattttctggaaaaccccatccgggctgaacggtaacacttgttatttattatggcggggg

SEQ ID NO: 321 - DNA, 16295 bp, unidentified
  source 1..16295: mol_type = unassigned DNA
ctgataaccggggtcatacgcatggaatgtcaggcgcggttccgtcaagaaaaaattgtatagcgcaacactggcaatggagcccagcacaccgcaggtgtaaccgctggtagacaatgcggtgaacagcacccccagcatatagagcataataatattatagcgcgcaaagtccagttgcaagaaaatgaagccgatgagcgtgatgcagctcaggatgcctgcggtgatcagcagatcacggacagacggcagaagcggacgggtgaacagcttccgtcctgaaccgtagccgttctctgcagaagcatccgggatgatataaatatccagattaggcgcagtcagcgtcaatttttcagtcagtgacggtccactccagaaatggcggcgatgtacgctggagcgccccagtacgatttttgtaatgccggagatgcgggcaaactctgcgatctgctgcggaatgtcatctccgtagatcgtagaaatgtcggcacctgcctgctctgccatacgaatgtgctgctgcaagcgccgacagtcttcttttcccatctgatccgagtcaggcgtccggacatacagagctgtaaaggtccctccaaacgcctttgccatcgttgacgccgtccgcacgatctttgcattggagggagaggacgacagacacgccagaatatgttcagtgggtgggtcgttctgattcataaagatcacctgccttgcccacagtatagcacaatttgatggtcacgaccaccagccacgtctttttccttcctgtcgaaggatctccttccgcatgtgatccagcgcatctgctgcccggaaaccactcaacatgactccaagaaccatcaataacaaagcgacatccatacgatccgtcctatctttttagagccggaaacacttctggatcgatgcgtattttcccaaaaccagcatactttcatcccggcacagctgcgtatccggcgtaatgctcatatcgagctttccgtcttttttcagtgcaagaatgttgatgttatacttttttcgaatattgatctcgccgatcgtgcgattcatccattccggcggaatagtcacttccatgatggcgtggtcgtcctgcagctcgatataatccaggatgtgttcggagctgtatcggatcgctgcccactttgccagctgcttttccgggtagaccacttcatccgcaccgttgcgcagcagaaacttggcttgtacatcccgctctgcacgcgagaccacaagctttgcgcccagctccttgagcagtgatgttgtttccaacgaactctgaaaattgccgccgatggttacgatacacacatcaaaattgccaacgccaagggaacgcagaaagtattcgctggtgctgtcaccgatctgtgcattcgtcacataggaaagcacagcgttcacacggtcttcgttgctgtcgatcgccatgacctgatgacccagctcattcagttcctgcgcaatatggcggccaaaacggccaagcccgatcaaaagaatcgatttcatacttgtctcctttatccgattgcgattttctcctgcggcagacgagagtgggcagggctgctgccaaatgccgcatagatcaacgtcaatccgccaacacgtcccaaaaacatcagtgcgatcagcaccccctgcgaaaggatgcccaactgcggcgtgatgcccaatgtcagacctaccgttgccacagccgaagcagtctcatacaaacagaccgacatcggcagctgctcggccgcagcaatgacaaaggctccgaggaagaacagcgtcaaatacatccctgcgatcgtggcagcattcttgaccgcggaaccatctatgcgccgcccgaaaaattcggcatcttctctgcggcggaaggtcgcccacatattggccagcagaacggcaaatgttgtggttttcatgccgcctgccgtggagccgggcgaaccgcccaacagcatcagaaccaccatcaatgcctgtgaagtgctgcccatcgcagcaagatcagcggtgttaaagccggcagtacgaggggtaacggattggaacatcgacaataaaatgcgctgccgggcagagcctgccgtgaactcgaagcaataaaagtacagcgccggcagcaccagaagaaacgccgttgtgacaaggatcaccttgctctgcatccgatagcggtgaaagtcaaggcggtatgtacaaatgtcctcccatgtcagaaagccaaggccgccaaagacgatcagggccgcgatcactgtggtaagcaatgggtttcctgcataccgtgtcagcgaaacaaattttgcatcctctgttcccagcaggtcaaagccggcattgcagaacgccgaaatggaatgaaacagtgcataccagatcccgcgcaaaccataatcggcgcagaacgtcggcagcagcagtgcagcaccggccaattcaaacagggcggtgatccgcagaataaagcctgtcagccgcacgatgccgcccatctgtggggcagcggtggcttcctgcatcgtgctgcgctgcttgagggagatctttcgcccggaaagcagcgcaaaggcagcgcccaccgtaatgacgcccaatcctccgatctggatcagaagaaggatcacactctgcccgaatgccgaccagtagctgccggtatcctgaaccacaagcccggtcacacaaagggcagaggtagaagtaaacagcgcctcatggaacggtgtaacgcaccgctgctgtgcagcaatcggaagcatcagaagcaacgcgcccaccagatcaactgccgcaaaacctgcaataatgacctgaaaagaagaaaaacggtgctgcctgtaacgaggatattgaatcataaaagctcctttacctatccgtgtgcataaagattagcatggaatagataaaagagtcgtaaagaaaattgtagaagtataaagattccattaaaattgatcgggcaacaccaaataacaaatgctggacatcaccagttaaaaaaaacagtaatatccagcattcattcagatttctaacccatggctcccggccgcattcttcaaatattcttccggctcgctatccagaatcaaattcgcgtagcccagcggatcattgtagatgaggtagtctaactccgacctctgcgccatggtcacgtccagtgcatcctcgaccccggtgcagtcgatggaaatttttctcccatcccggagcagcagctccacgcagccggtgtccatgttgaaatgacaaactcttgcatcgtagcctagaattcttcccgcatggaagaaccctagggctatcttttttgttataaaagtgtttggaacaaacgcgccgcctgcatcggcacgatgcagaacaaatggggtttgggcacagcccaacaagcattttgcaaagcaaaatagcatttgtatagacgaatgccctgcttgctacaaccgcataccgcttatctcgctggaacacctcttgattttaacacaatcggatgttatcctattcttatagaaatctccgaagggcaggtgttttcatgtacaatcatcagctggaaaccttcatccgtgtggcggatgcaggcagcttcaacaaggcggcagaggaaagctacatcacgccaacagccatcatcaagcagatcaacctattggaagattcccttggtgtcaagctgttcgagcgtactcgccggggactaacactgaccaaagcaggccgttccatgtatcaggatgccaagtacatcattcaatactgccatgattctgtcattcgtgcccggaacgcaatgcaggaggattccaacgtcatccgcattggttcctctcccatgacacctgcccagctgctcatggaactgtggtcgaaagtgcagaccatctgcccggacatcaaattccagattgtgccttttgaaaacaccccggaaaatgcacgggaaattctggcggacctcggcacgaacattgatgtagtaggcggcatctttgatgaaacgatgctgcatctgcgcaaatgtgccggtctggaactggttcgcaggccgttttactgcgcggtttccatccatcataaacttgcggcaaaagaccgcttgcagatcacagacctgtacggcgaaaatctactgctgatgcaccgtggatggagccactatgtagatgaactgcgggatgatttatggcagcaccatccacaagtaaatatcgtggattttgaattttacagcatggacatcttcaaccgctgcgaaaacaccaacgatgtgctgctggcaattccgggctgggccaatgtccacccattgctgaaagtgattccagtagattgggattacggcatcccctatggtatcctgcactccccgaatccaacgcctgccgttcagcgttttctggatgcggctaaaatagccagcaaggaattgtatcgctgatacgccactgcaacgagaagctgctgcatgagaaatcatgcagtggctttttctttttacaaaagatgcacttgacctaaagctgactctaagtgttacaatcagggtgtcaagcgggttgtttgaacctttgagttcaaacaagtgaacaaaatggagattccgggaaatgcagacttgcgctatactggaaccagaaaaagagagtacctcaaaggaggaacgaccaatgaagaaagtcttgattttgtccggcagtccccgcaaggacggcaactccgacctgctgtgcagtgagtttatgcgcggtgcgcaggagagcggcaacgaagtgcaaaagatcttcgtgcgcagcaagaagattgtgccctgcaatgcctgctattactgccgcgaccacggcggcaagtgtgccctgaacgatgacatgagcgaaattctggacgcaatgcaggcggcagatgttatcgtgatggcaagcccggtgtacttctactccattgatgcacagatgaagatcatcatcgaccgcagccttgcccggtggacgaacattccgaacaaggagttctatttcatcatgacctgcgcggacgataaccgtgctgccatggcctgcaccttggagtgtttccggggctttaccgcctgcctgaatggtgccaaggaaaagggggtcatctacggcaccggcgtatatcggcccggcgaggtgatgtcctccccggccatgaaggaagcctacgagatgggcaaaaacgtctgatttcccagttttatataaaggagtgtaacggctatgaacaattttctgtttgaaaacaagaccaaggtttatttcggcaagggtggcgtgaaggaatatctgggctgtctgctggagcactacggcgataccgtgatgctggcctacggcggcggttctatcaagcacaatggtgtctatgatgaaatcgtcggtattctgaacgccgagggtaagcgcatcgtggagtttcccggcatcatgcccaatcccacctacgccaaggtgcaggagggtgcaaagctggcccgtgagaaccatgtggatttgatccttgccgtgggcggcggttccgtgtccgactgctgcaaggtggtgtctgcacaggccaaggtagacgaagatttgtgggagctggaaaacaccaagcatactcgtcccactgcgttcatcccgctgggcaccatcgtcacggtgttcggtaccggctccgagatgaacaacggcgcagtcatcacccatgaggaaaagaagattaagggggccctgtggggtgcacaggccgactttgctttcctcgaccccacctacacgttgtccgttcccatgaagcaggtcatttccggtgcgttcgacaccctgagccacgcgatggaaacttacttcggcaagccggacgagaacaacctctccgatgacatcaacgaagccgtcatgcgcagcgtcatccgcaacatccgcgtcctgttgaccgacaaggacaactacgaggcccgcagcgagctgacatgggcttcggctatggccgaaaacggcatcctgaaaatcggcaaggtcaccgacttccagtgtcacatgatcgagcatcagctgggtgcctacaccaactgcaaccacggtgctggtctggcggtcattcacccggtgctgtaccgtcacctgctcccggccaacaccgcacggttcgcccgctttgcacagaacgtctggggcatcgacccggcgggcaaatccgagctgaaactggcacaggctggcgtggaggctctggcggccttcatcaaggagatcgggatgcccaccacctttgcagaactgggcgtccctgccgacaccgacctcaaggctgtggccgattccaccgtgctgaccggcggctgctgcaagaagctgagccgcgaagaactgctggacatcctcaacgagtgcaagtaatcaaggaacgaaaaatacaaaaggagctatttattatggaattcattactctgaacaatggcgtcaagatgccggcagagggcatcggcaccttcctgctgaccccggacaaagctgaaactgccgtgctgagtgcgctgaaagacggtgcacggcttatcgacaccgccaacgcctactgcaacgaaaaagccgtgggccgcgctatgaagaagtccggtctgctgcgggaggaaattttcctcgaaaccaagctgtggccgaccttctacaccgatgccgatgctgtggacaagacgctggcacgtctggacaccgactacatcgacctgctgctcattcaccagcctgccggtgattacgttgccggttatcgcctgatggaaaaggcttacaaggagggcaaagtccgtgccatcggtctgtccaacttcaacgaggagcagatcaaagaaattctgagcatctgcgaagtcaagcccaccatcctccagaccgaagttcacccctacgcccagcagaaagaactgaaagccttcctcgccgagaatggcatggtgattcaggcatggtatccgctgggccacgctgacaagggcctgctggaagagccgttgttcacacgccttgcagcaaagtacggcaagagcaacgtgcaaattattctgcgctggcacattcaggcaggcaatgtggtcattcccggctccaagaacccggcccacatccacgacaacttcgatgtgttcgattttgcgctgaccgatgcagaaatgcaggagatcaccacgctgaacaaggataaacggtattatgaggtcacggaggataagctggcggcattcgccaccatgtttcctcccgtggaagatcagaagtaaatttcaagcagtttgtagctgggtgcggagagtttttttgcggaaaatgaaccagatgaaagggtaaatgaagatgaataagatcacgcgcaaaagttttctgaaagttcttgccgccaccatggtgggtggtgcagccgcttccgcgctgacgggtgcagcggctcctgtttccattgacgagacaaacggcaaggtaagccgctgggtaaagaacaacctgaacccggacggcccgctgacgattgccaagcaaggaatgttctcctccggcggcacggtcacggcaccggtggcaggcacttatgatgccaccaccaactggctggacactacccgtgcaggcaacaccgctcatgtggatcacgctaatgttctgtatcaaatcccggcagacagcaacggttggccgatggtttatctgcacggctatggacagtcccgcatgggctggataaccaccccggacggccgtcagggctgggccgatctgtttctgcgcaacggctactctgcgttcttggtagaccagccccgccgtggtgaggctggcagtaccgcccagatgagcacggacggtttcctcgatacttggtctgccaactccaaggactacaagcccggcgatcaggcatggtacacccacttccgcattggccgcgttgccccggaacggtacgaaggctcccagttcccggagggcgatgctgcacagaatcagttcttccgccagatgacccccaacaccggcgacttcgatcaggcagttgctgccgccgcactgggcgaggtgatgaaggacgtgcagaccctgaccggccacaagtccattttcgtcacccactcgcagggcggtgcagtcggctgggatgtgcccgccgacaacattgccgccattgttgccattgagccgggcggaacccctgccatcggctcggagcagtacacgaaactgctgagcgcaggtattccaatcgctatctactttggcgattacatcgacaacggcccggaagatatcatgtccaccagcttctggcggcgggtacgggacggcgcactggcctttgccgcccagtacaatgccgatggcggtgactgcactgtggtcgatctgccgaaaatcggcatcaccggcaactcccacttcatgttccaagagctgaacaacaaagagatcgctgatcacatttatcagtggctggagagccgcgcactggcatgagcggttctctgagattcccggcattttacatagatagaggcgtgtttcgtatgaagaataaaatttcccgccgccagtttttgcaggttgctggcgcatctgctgccgccctgctgctggcttcctgctccggcaattccgctagcagtgtgagcagttcttctgtggcttccagtgaagccgcatccagcgcggctgcttcttcggaagctaccagcacggtaacgactacgggcaaaacactggtggtgtatttctccgccaccggcactacacagggcgtagcgcagaccatcgccgacaccgtgggtgctgacctgtttgaagtcgttccgtctgacccctatacctccgatgatctgaactggacgaacaatgacagccgcgtttcccgtgaacacaacgacgagggccttcgtgctgtggctttggaaagcaccgatgtggacggctgggacgattacgacaccgtgttcatcggctaccccatctggtggggcattgccgcatggcccatgagcagctttgttgccgtcaatgacttcaccggcaaaaatgttgttccgttctgcacgtccctttcctccggcatcgggcagagcggcaagctgctggcagaattagcggacgccggcacttggctggacggccagcggttcagccacagcagcagtgaagccgacattgcaagctgggtaaatggcctgaacctgtaagcagagcttttgtgtgaggagaattttctcttgcggtaatttttgaaatagagggtaaatcaaaaggagaatgtttgtatgaaagcattgctcatcaacggcagtccgcggcccaacggctgcacctttacggccctgaccgaactggcaaatacgctggaagccgagggcattgaaaccgagatcgtccatgtgggcaacaaggacatccggggctgcatcgcctgccgccgctgccacagcaccggctccaacaagtgcgtctttgatgatattgtcaacgaagtagcccccaagttggctgaagccgatgcctttgtcattggcgcaccggtgtactttggttccccggcaggcggcgcgatctcctttatggaccgcctgttcttcagtaccctgaacatcgacaagaccatgaaagtgggtgcttcggtcgtgacctgtcggcgcggcggcaacacagcttcctacgatgtgctgaacaaatattttaccatgtgtgggatgccagtggccagcagccagtattggaacatggtctacggcggctctgccgaggaggtcaagaaagatgccgagggcttgcagaccatgcgcacccttggccgcaacatggcctttttgatgaagagtatccagataggcaagcaacagatcggcctgcccgaaaaagaacctgctgtcttcacaaacttccatcattgaggaagtgttccatattcctccttctttgttgcagggaaagccgggacggaaacgtcccggctttcccattttcctgatttttgcgaggtgattttatgcgcagcgtgattttcgcggtttccaccgctttgaccgttttattatccgcctgcaccggggcggcatcctctgtgccagtcaatacggtttcttcggtttcggccagcacatccatcacgacctcgtccgaagtggattcggctgtttcggagagtgcttcttcggaaaccggaaacatccagactgggcttgtccgggagcagacattggacagcactgaggagctcatccattacagctactacctgccggaggattacgaccccacccggaagtaccccatgatggtggtcatgcccggctataacatgatgtggttcggggaatcttcctccggcagcaatctggactggacggggtttaccagctggacgaaccttggacaggatatgatcgtagtgtctgcccagctcaccgactggggcgacacttcggcgcggcaggccatcgctctgacggagtatttcatcaatcactttgccgtagataccgcccgcatttacgccgcaggctactcggctggcggcgaaaccatgtcgcgggcagttgccatgcggcctgacctgtatgcagcttatctgcatggagcatcccagtgggacggcggttttgcgcccattgcagaaaacggcgtggcggtctacatctacatggcgcagggcgatgaatactacggtgtgcagaaagcacgggatgcctacaacggtctgcacgatgcttacgccgccgcaggctggacggatgaacaaatcgacaccgtgctgcaaatgcagaccccggacaacgcctttttcgatgcgcaggggcttcacgtctaccatgctgccgcaaatgttgtctttgatgatgccgatattctgaactggatcgtttccaaacacaagtgataggagagaaattttgaaccgacggcaattcacaaaacttctggcgggtgcagggctgcttctggcaggctgccgggcaggtactgcacccagttcctccaccccggaaagaaaggattccatgcaaacgaccacccaaacttatacccgcaccacgcccatcgaaaccgtacggaatgacccggttttcggtgattatgggcagctgatcttccctgtggaacgctcttattacagcggcgacacgctggagcagctgcatcttacctactataacaacatcgacccggacgaaacagtggacatctgcaacaccctgcgccagcgtgcagcggacgggcagaccatcttttacgatatttacaccgaggacgaaaaagctgctgacccggataaagctgacaccggcttattctacttcaagggtaatcccggcgcaaaattttccatctgcaacgcaggcggtgcgtttgcgtatgtgggggccatgcaggacagctttcctcatgcactggaactttcccgcaaggagtacaacgcttttgcgctcatctaccgccccggcgcacagaccgcctgcgaagatctggcacgggccattgcctttgtctttacccatgcggaggaactggaagtagacaccagcggctactccctctggggcggttctgccggggcacggatggcggcgtggctgggcagctacggcacggcatccttcggtgaacaggcgtatccgcaaccgggagccgtcatcatgcagtacaccgggctgggggaagtctacggcaacgagccgcccacttatgcctgtgtgggtgaccgggactacatcgcagacgaacgcgtgatgcgctggcgcattgaaaccatccgctctcagggcacccctgccgaggttgaagtctttccgggccttgcccacggttttggcttgggcaccggcacctctgccgaaggctggctcgatcatgccgtagcgttctgggaagaaaacacctgaaaccgtgaggaaactgttatgacgaaaaaatggactgcactgcttctcgcggcagtacttgctgtcggcctttcggcctgcgacaccagccgcgcagaagcccccggcagcaatttggaaagcggagtttccgccatcgaggatgctatgacgaaacgaaatgaaaccgaaagcagctcattcccggcaggcagcgacctgcgcatcggcacttctgacgacaccgttgcaacgccggatgatttcccggcagcatacaactacgacactggaaaaattgaggattattcccgtaccgccatgctgcaaaagatgccggaaccagtggacaatgcgaccgtgctgaacacctcggcagaccctaaccatattcaggcgttgtacctgtgggaagaaggcaacgttccggctaaaacgcagttcaccgctgcaatgaccggttattttgacaactgggatttccgcccctatgtgacggcaattcccgtccgcaccggagtacaaccgaaaggtgctgtggtgttgatggcaggcggtgcgtatcagttccgtggaaactataccgattctctgcccacggcagcggctctacgggagctgggcttccagaccttcatcgtagattaccgtctgtcgccctacacgcaggaggaaggcgcgctggatgtagcgcgggctgtccgctttgtgcggcagaatgcggatgtttacggcattgaccctgacgatattgcagttatgggcttttccgcaggcggcattcaggcgggcgaatttctgatgcactacgatgaagatgtcaacggcactgctctggatgaaagctatgtacccgatgcgctggatgctattccggctcacgcttcggcggcgggcatgatctattcgttctatgggcggctcagcgtgggcaacatggacccggactggctggccgagggtgatctgccgccaacattctacgtttacggcacggaggaccccttctaccgccaattccagcagcagtatgatgtgattcggaatatgggcatttccaccggacgcatcgtgctgaatggctggccccacggctttggctcggatggcggctgggtgaacgattacgctgcatggctggaaagtgtttttgcaaataaggaggaattttaacatgaagtatcgtactttggacagcgacctgaccgtttctgctgttggtctgggctgtatgggcatgagccatgcctacggcgcacctgccaacaagaaggaaatgaccgaactgctggcgcaggccgtgggtatgggctatacgttctttgacaccgccgaagtctacggcacaccggataatccccacgacaacgaggaactggtgggtgctgccctgaaaccctaccgagataaaatcgttctggcgaccaagttcggcatccattttgacatgaccagtacggcagtcaacaagccgctgatgccggattcccgcccggaagttatccgtgcatcggtagatgcctccctcaagcggctgggcaccgaccatattgacctgtattatcagcatcggcttgaccccaaggtacccattgaggaagtggccggtgtaatggctgacctgattcgggagggcaagatcactcactggggcctttcggaagccaccgaggagaccatccgccgagcacacgcagtctgcccggtaacggccatccagaaccgttactccatgatggcccgctggtacgaaagcctgttcccggttctggaagaactgcacattggttatgtggcattctcgccgcttgcaaacggttttctctccggcaaatacgataagacttccaagtttgaagcaggcacggactaccgcagcgtcatgccgcagttccagccagacagcattgaccagaactgcgccctgctggaactgttacaccgtcttgccgccgagaaaaatgcaacacctgcccagatctcactggcgtggatgctgtgcaaaaagccttatatcgtaccaatccccggcacccggaaactcaaccgtttacaggaaaacgccggtgcagcggatattgtgctgtctgccgcagaagtggctctgattgacgaagcactggcgcacatggaaatgtcgcatgtgtttggcgggagccgcattgtgaaagagtaagacagcagctttgacgatgagcttcaatagatcatgcggaggtaattgtttttgataatgaagaaagcaaagagtatgaacctttgagtactaacaggtgaacaaaacggagattctgctcagggggtcaaacggttataatgaaaccagaaagagttccagcgcggcagggagcggaaaagcaggattccgctccccgatctgaaacaaatctaaaaagaaaaggagaacacgattagaccgcaacgatgacggcaccggtacgctggaacgctacaaaaaggattccttttactgatatcagaatgtcatcaaaaccaacggcgcatgcctgaatgaacaggtaaaaaagataacaaggcattttgtcttgcggaaggagaagattgttcatgaaaaaagttgaagtcatcgtccgtactacggaggacaattttcctccgcaggaaaaagttgttttgaaattcacagagcaaacggtttcttcggcagaaaccgatgccgtgctgagttatcccggattggaaatccatctggagcatcatcgagtattcaaaaatggacaggaagtgtatatgagccgttatgaatatggcgttttaagtttaatggcacggcatccggggcaattgttcacaaaagagcaaatatttgaagctgtctggcatcaggatagtgaaagctgcctgacggccgttaccaatgcaattggacggcatccggcagaaaattgaagatgacagagctgcacctgtttatatccgaacgatttccaaccttggctaccaattcatgccgactgtttccgcagaatccgtagaaaaagattcctgataacgataaaagccatactcaaagggcagtttagaccttgggtatggcttttatcattataatgtggacgactgaaaactgacatccttgcaatcgaaaacaatcttttctaaaatacagaaaaaagattttaggaggcgataagatgttaacgcatcaaaaaaagcctgtctgctgccgtaagccagaccgccccgaagcaagcacaatcgttccgttccaccatccacaatcgtgccgatgtgttatattgcgccagcttcccgccatgggaggctggcgtttttgcgcttttggagccaaagtgccgcagtccaccgtttctcctatgatacagcagcaaactttatatttgggagggaaagtcatgctcgatcataagaaggaagcgattacggaacactggcagttttgccccaagtgcaatataaagctctatcgaatgaccgccgactgcactggattcatccacataaaatgctggcgttgccgggaaatgttatggctcaacctttccattcgagccaagtaagcattggtttcataaaaatcgggtgcaacgcactctgaatatggactgttagcaccgagcaacgggccattgccacatggcaatgtatgaaacgtagcaccaaatggccgggcagcagcttgactgaaagattttcgcttgaaaatccttcggttggctgttgtccggctattttttatagcttcagatggcctgctcccgaaaaggagcaggttttatgtttgccctcttttcgtggctgccccaagcggcgaaatatccgtagcatctccgaattttcgacttctcacgttttatcgaaaatttggaggttacacatgggctttaattatggtttggaaaagaagaattttgaccgtcagtgggctatgttgcgcaagcagtacgaggacgctggcatgagcatcgaagcgattcagacaatgtacgaatatgactggtctgttttcaatgctgcgcgttcttaccagaaccacacgcaggaaatcaccgctccgtcctttgaacagggcgaagaatcctactcgccccttatgaacaagtatcaggaagcaatttctgttaccgaacactaccgcgaaaccaagagccgcttcacatggattggcgaaattgagaatgaacggctgttgtctgctcttgaaaatttgtcggacgcagacctcaaccttgtcaccatgtatgcctatgaggggtacaccgtcactgaaatttctaaagttttaggtgtcgcgcagcctactattagtatcaaaatcaagagaattactaaatttttgaaaaacttcaatttcaatgctacgaattga

SEQ ID NO: 322 - DNA, 7463 bp, unidentified
  source 1..7463: mol_type = unassigned DNA
atgaaaatacatattattggttgcagtggttcaggaaaaacctatctagcaaatgcactttcaaagaaatataatatttctcatttcgacttagacgatattcaatgggataataacgccaaaggatatgggaaattgcagattctgtggtgcgcttcatagcgtaaatgggcatgtataagcgtcctttcacaagtcattcacagcgtaaataaaagaaaaacggtataaacaaatattattttctttgtgagctatggagataagactctttagaggcttatcggaatgtccagcgaacagaaacataatatttcgtttataccgttttttcttttcataaacctataaaatcacgacttgtgagaggacgattatatctgcccttcacgccctaggaaagcaccgcggaatctgcgacactacgctagttaaactccggtttatttaccaagttcagtctttaaagctgctgtcaatgccggaacgatcttatttaagtctccaacaagaccataatcagctacatcgaagattggtgcatcttcatctttgttgattgcaatgataagatcagaatcttccatacctgctacgtgctggattgctccggaaataccgattgcgaagtaaatctgtggacgaactgttttacctgtctgtccaacctgaagatctactggtaaccagccattctctacaacagcacgggagcagcttacagtaccgccaagaacttctgctaagtcctctaacagtttgaagttctctttggaacctactccacgtccaccagataccaaaatcttagcttccatgatatttgctgtagattttacagcttttacaacattgaggatttcaacatatctgttgttaggtgtgaatcctggattgaattcaacaacgtttgcttttgcaccagcgattggagcaatcttctgcataacacctggacgaacggttgccatctgtgggcggttatccgggcaagcgattgtagcgattgtgttaccaccaaatgctggacgagtcattaacaactgattgtgtttctgctcagattcttttcctggagcagcaaccaatgggaaatctccgatttcaagagaagtacagtctgctgtaagacctgttttaactcttgctgatacagtaggaccaagatcacgtccgatagctgttgcaccaactaacatgatctctggtttgtactcattgattacagatgccagtgcatgtgcatatggctctgttctgtattcttttaattcaggatcgtctacaacgataacacggtctgcaccatactctgctaactgatctgctaatcctttgacgccagagccgatcaatactgctgtaacttctgtatttaagtcttttgctaaatctttacctttgccaagcaattcaaatgcaacaccgtctaatacgttatctacctgctgtgcaaagacaaatactcccttatattcttctaatgacatcttattcaccacttttccttatttttttagataatgtgtttctctttgaatttaccgatcaagtatgctacggattctgctggatcaagatttactttctcaccagctccttttgctactttatcagatgcttttgcaatctttgttggtgatccttttaatccaaggtcagaatcatcaacatcctttaagtctgctcttccccaaacagtcacttctttgtcacatgcatcaaagattccacctggtgtcatgtaacgtggctgatttaattcagaaagtgctgtcactaagcaaggcatttttgcttttaattcgtgatatctgtcttcatactgtctcttaacgataacagaatctccatcaactttgatgtctgctgcgtaagagataactggtaaaccaagatgctcagcgatctgtggtcctacctgtgcggtatctccatcgatagcctgacgtcctgtgatgataagatcgtaatctaagttacgaagagcaccagcgattgtagtagatgttgcccatgtatctgctccacctaatactctgtctgttacaaggattgcatcatctgctcccattgccattgcttcacgaagaactgcatcagcctttggaagtcccatggtaagaactgtaacttttgctcctgtctcatctttgattcttaatgctgcttcaagacctgctttgtcatctgggttcatgatagcaagcattgctgctctatcaagtgttccatctggattgaattttactccaccctttgtatcaggaacctgtttaatacatactacgatattcatgtattttccactccttatgttattatattttcattaatcgcggattactcgaaacacttcgtgtttctcgtgcgcgttgcgctctcaaatgtctgtcagaaatatttcattctcgcaagcgtgattctatatttcttccattcattttcaatccgctagatcacgtctatttaagcaatgcacctgagataaccatgcgctgtacttcgcttgttccctcatagatctctgtgatcttagcatcacgcatcatacgctctacatcgtactctctgatgtatccatatccaccgaataactgaacaacttctgttgtaacagccattgctgtctctgctgcgaataattttgcttttgcagcttctacagagtaaactttctggtttgcttttgccattgctgctttataaactaacatctgagcggcttcaattcttgttgccatatcagctaacttgaactgtgtattctgctgctgtgcgatagaacgaccaaactgttttctttcttttgtataagcgattgcgcgctctaatgcaccttctgcaataccaagtgcctgggaagcgataccaatacgtccaccatctaatgtatgcatagcgattgggaatccttttccttcaggtccaagtaacgcatcctttggaattctgcagtcttcaaaaattaactcataggtagaagatccacggatacccatcttcttctcttttgttccgaaggagaatcctggagcacctttttctacgataaatgcggagaagttctttttctttcttcctctcttgtcctctgtaatgcttgtgatagcgattacaatataaacatctgcaactttaccattggtaatgaagcattttgatccgtttaatacccattcgtcaccgtctaaaacagcttttgtctgagcaccctgagcatctgtaccagcacctggttctgtcaatgcgaaagcaccaagtttctcgcctgtagcaagtggtctgacatatttctgtttctgttcttctgtaccgtaagtcataattggatcgatgcagagagaagtatgtgcggaaacaacaacacctgttgtagcgcaaacttttgataactcttctacacacataacatatgttaatggatcacatccctgtccgccgtactcctttggtaccgggattcccatgaatccatattttgccattttcttaactgtctctgctgggaactgttctgtctcatcagtttcctgtgcaagaggttttacttcgttttcagcgaattctctgaacagggaacgcgccatttcatgtttcttgtctaaagtgaaatccatgatttcaaatcctcctaaaccttaatatctgttaattactgagcgtcaactggtgtttttgtgcggtcagcattgtatacatagaatccttttccgctcttagcaccaaggttaccaccacgaaccattttgcggatcaatgggcatgcacggtatttgctgtcgccagtctctttgtaaagaacatccataatagcaaggcagatatcaagaccgatgaaatctcctaactctaatggtcccattggatggtttgcgccaagtttcatagctgcatcgatacctgcgatatcagatacaccttccattttgatgaatgctgcttcgttgatcattggaattaaaatacggtttacaacgaatcctgctgcttcatttacctgtacaggtgtttttccgatctcaacagagattttcttaatagcttcaacagtctcatccggtgtatttacaccagcgataacttcgatcaatttcatacggtctgcagggttgaagaaatgcataccaaccattggacgtgtaagaccatttccgatctctgtgatggaaaggcttgatgtatttgaagcaaagatacactctggttttgcgatcttatctaattcctggaatgttgttttctttactcccatatcttcgaatgctgcttctacgatcagatcgcagtctgcgcaaaggtcttcttttaatcctggagtgattttagcaaggatagcatcaacagcttcctgtgtcatttttcctttttctacaagtcttgcataacctttctggattttggcttttccgccgtcagcccattcctgcttaatatcgcagagagctacctcatatccttctacctgggcaaatgcttttgcaataccctgtcccatggttcctgcaccaataacaccaactttcatgttagtacctcctgaatttattctgaatttttaatatgtaatggaaacgcccggaaaagcagtcacccgctttccggacagttttatctgaattaattatctctcaacgattgtagagcatcccattccgccaccgatacataatgtagcaagacctctgtgggaatctctcttctgcatctcatgcaataatgttacaaggatacggcatccggaagctcctactggatgtccaagtgcgattgcaccaccattaacgttaactttggacatatcgaaatgtaaatctcttgcaactgcgatagactgagctgcgaaagcttcgtttgcttcgatcagatccatatcatcgattgtaagtcctgtcttagctaatactttcttagtagaagcaacaggtccaacacccatgatctctggctcaacaccgccaagtgctccagctacccatgtagccattggtgtaacaccaagttcttttgctttctcttcgctcattacaacgattgctgctgcaccatcgttaataccggaagcgttacctgctgtaacaagtccaccctctttgccagagcagcattttaattttgctaaagactctgctgttgtacctgcacgaggtccttcatctttcacgaaatctacgatctcttttttcactttaaccggaaccggaacgatctcatctgcaaatttaccttcagcgatcgctttttcacatttctgctggctgtttgctgagaactcgtctaattcttctcttgtgattccatatttatcacatacgttctctgctgtgatcatcatatgataatgattgaatgcatctgtcaatgcatcgttaaccattgtatcgatgatcgttgcattgttcatacgatatccgaaacgagcttttgtcatagcatatggtgccattgacatattttccataccacctgcaacaacgatatcagcttctcctgccatgatcatggtagctgcatcattgacacatttcaaaccagaaccacatacaacgttgattgtgattgctggaacttcgattgggagtcctgctttgatagaagcctgacgtgcaacgttctgtccctgagctgcctggattacacaacccattttaacttcgtcaaccatctctggtttaacacctgctcttcttaatgcctctttgataacgattgcacctaagtctgctgctggagtattgcttaatgctccacccattttaccaattgctgtacggcatgcgcctgctaaaactacttttcttgccattttgaattctcccttcggttttgtggtacaaaacaccgctcataatatgcagtatattttgtttccttcataataaatctgccgaaaaacgttgttatttttttaacaatcttttagtaaaaaaaataaatctaaaatctcttcttttaaatttaaattttctttttcctgattttctacgtttttatgtattcggcttttttattggcttttcagtactttctcatgctaccatattttattttcaaatgcaatagctttctttttttttcacacttttttcagtatttaaatttggtttttacctattttatatactgtttttcgttaaaaaattatcatgcgcaaccgctcaattccacaaaaaagagacgttttttgtatatttcttacaaaaacgtctctttttctatttggtttcaaaaatgatttttatgtaatttgcgcattgacagccgtattagtagaatatgtgatgtccgatgatcgttccttccaatccgtcgatcacagttctgaaatagagacagctgtttgtgatgttcccgttaagcacctcctgtgccgcctgcatacaggtattatttaccccctgctcgaggcggagcgcatatcgtccactggctaccggagaaaactgtccgctctgataaatcacaccggatacggtattcgggaaataagagcttcgcacacggttcatgacaacacttccgactgcaagctttccctcatatggttcaccgtctgcctcacactggatgatcgcacctaacaggtaaagatcactgtcacttgggacataagaaaattcgccgttgttctcagcctcctgacgcttgatctccgccattctcgcagcgtcttcttttgccttctggatctctaactgtttttccagttcttccatccgtgcgatctgactgttgatatcattgacttttccctgggcgctgctcaattcagaattggtctggctgatatttgcctgtgttgaactgataaggctgtttacagaattctgttttaccttcatgtcatcctgcatggcgagcagttcctgctgctcactctcgagatccttcttctgttcttcaagagaagcttcctctgccgcaatctgttcctgcacctggataaactcctctaatttctgtctgtcatacgaattgatctccgaaatatactccgtccggttcagaaaatcagaaaaggatgatgccgataacagcatctcaagcatcggtgtatttccattttcatacatatagcggatacgtatcttcatatcctcatactggctggctgactgctgctttgcagcttccagattatcctgcgtctgatcgatctcatcctcaagatctgacagttcttttttcttatcattgatctgtgactcaagggcattcatggacgaaacaatgttggtcatctgtccatttaaattgttcaggtcgctctctagctggcctttttttccattgatatcatcgaccgcatcctgtgcatctttctgctggtttttcagattgttgatctgattttttgcattgtcaatatcttcctgcgtgacatctgcataagctgttgtcacggtaagacagcacactaatgctgccgctgcaaatattctttttaaggggatttttttcat

SEQ ID NO: 323 - DNA, 8830 bp, unidentified
  source 1..8830: mol_type = unassigned DNA
ttatttgtcgttgttcttgttcttctcgttcatcattgcgcggactttcatggacagaccgaacaggttgatgaatccggttgcatccttatggtcatacagctcaccggtagtgaagcttgcaagactctcagaatacagagaatatggagaagttgttccggctttgatgatgtttcctttgtacagtctcatcttaacctgaccggtaactgtctcctgtgtcttttcaacaaatgcctgaagagcctcacggagagggcagaaccactttccttcgtatacaagatctgcaaacttggttgctacgagcttcttgtatgcaagggtttcacgatccagagtcagctcctctaactgcttgtgagcttccatcagaattgttccgccgggagtctcataaacaccacgggtcttcatgccgacaacacggttctcaacgatatcgataataccgataccatgcttgccgcctaaacggtttaattcacgaatgatatcagaaactttcatctttgtaccgttaatagcagttgggatacccttttcaaaatcaagtgtcagatattcatcctcatccggtgccttttcaggggtaacaccgagaaccagaagatcatcgtagtttggttcgtttgcaggattctccagttccagaccttcatggctgatgtgccagatattacggtcacggctgtaagaatgagcagcatcaaacggaagattgataccgtgtgcctgacagtatgcaatctccgcatcacgggaatccagcttccattccggctgtctccatacagcgataaccttgatgtcaggagcaagagccttaattgaaagctcaaatcttaactggtcatttccttttcctgttgcgccgtgacagatcgcaacagcaccttccttacgagcaacctcaactaatttcttagcgatcagaggtcttgcgaaagaagtaccgagtaaatatttattctcatatacagcatctgcctgaacagttggcatgatgtattcatcacataattcatcaacaacatccagaatgtataacttggaagctcctgaatattttgctctttcatccagtccttccagctcactttcctgtcctacgtcgatgcaggcgcagataacatcataatcataagtttcttttaaccaagggatgatagctgttgtatcaaggccgcctgagtatgcaagaacaactttgtcttttgccatttctaaatcctccttaaaatccgtctgtgtggaatatgtacatttctgatatatcataattccatttgttgaataaaggacatatcgtcctgtctgcaaattaatatataacggtagtgaatattatgcaagtgttttttgaatagaaaagtggaaaaaataaaaaagaaacaaaatggaagaaaacagaatttacaatatagaagagggatagaagaaaaaatacgatcatgaaacaaaaagaataaaatatgaatattacatatacaaatatgaataatattcatatacgcattgaattacaggaaacatcggtttgtatataatgaatagaaagttgtaacaaatcagaaaaaaatagtagaaataagaaaaaataggaataatgtttgagtatcttgtagaaatgctatataatataatagactgtggatactggttattatagactgtgaatgggaaatcctgaagttagaaatcacagccagatataataattcgggtgaaagaatgaaaagttttttgattaacaggaggaataagagatgaaaggcattattttagccggaggatctggaacaaggttatatccgttgacaaaagtaacatcgaagcagctgcttccgatttatgataaaccgatgatctattatccgatgtcagttctgatgaatgcagggatccgtgatatattgatcatttcaacaccgcaggatactccaagatttgaggatctgttgggagatggaagtcagtttggtgtaaatcttacttatgctgtacagcctacaccggatggacttgcacaggcttttgttattggtgcggattttattggtgatgatactgtggcaatggttctcggtgataatatttttgcaggccacggacttaaaaagagattacgtgcagctgttcagaatgcggaaaacggtaagggtgcaactgtatttggttattacgtagatgatccggagcggtttggaattgttgaattcgacaaagacggacgtgcgatctcgattgaggaaaaaccggaaaagccaaagagcaattactgtgtaacaggtctctatttttacgataataaagttgttgaatatgcaaagaatctgaaaccatccgccagaggcgagcttgagatcaccgatctgaaccgtatttatcttgaacatcagcagttaaatgtagagcttctcggacagggattcacatggctggatacagggacacatgagagtctggttgatgccacgaactttgtaaagacgatagagcagcatcagcatagaaagattgcatgtcttgaggagattgcatacctgaatggatggatttccagagaagaagttcttgaagtatatgaagttttgaagaagaatcagtatggacagtatctgaaggatgtattagatggtaagtatctggatgtgcttgcatagcttttgcagataaaaagataaaagatagattgaggagaaagataaaaatgagtaaaacaatcatagtaacaggtggagccggctttatcggttcaaattttgtattccatatgcttgataaatatccggaatatcgtatcgtatgcttggacaagctgacatatgcaggtaatctgtcaacacttgagccggtaatgaagaatccgaatttcagattcgttaaagcggatatttgcgaccgagatgccgtttaccggttatttgaggaagaaaagccggatatcattgtgaactttgcagcagagagtcatgttgacagaagtatcgagaatccggatatcttcttaaagacaaatattatgggtacggcagtgcttatggatgcctgcagaaaatatggaattgagagatatcatcaggtatccaccgatgaagtgtatggagatctgccgcttgacagacctgatctgttctttacagaagaaacaccgattcatacaagctctccttacagcagctcaaaggcagcagcagatcttctggtattggcataccacagaacttacggattgcctgtcagcatatccagatgttcgaataactatggaccgtatcatttcccggagaaactgataccattaatgatcgcaaatgcattgaatgacaagcctcttcccgtatatggtgagggcttgaatgtgcgtgactggttatatgtagaagatcattgtaaggctatcgacctgatcattcataaagggcgtgttggcgaagtatacaatgtcggtggtcacaatgagaaacagaatattgagatcgttaagatcatctgtaaagaacttggcaagcctgagtctctgatcacacatgttggcgatcgtaaaggacatgatatgcgctatgcaatcgatccgacaaagatccataatgaacttggatggcttccggagacaaagtttgaagatggaataaagaagacgatccggtggtatcttgataacagagaatggtgggagaccattatctcgggagaataccagaattactatgagaagatgtatggtaatcgttaatttgtggaaaagaggtagagaaataagatgggacagattaaagttacaaaagcaccgatagaaggattgtacattattgaacctgcagtacatggagacagcagaggatattttatggaaacctataaccagaaggatatggaggaaaatggtctgaatatggtatttgttcaggataatcaaagtatgtcgacaaaaggcgtgcttcgcggactccattttcagaaggaatttccgcagggaaaactagtacgtgtgattaaaggtgcagtttatgatgttgctgttgatctgagatcaggaagcgaaacatatggaaaatggtatggtgtggagttgacagaagagaacaagaagcagttctatatctcggaaggcttcgctcatggatttttagttttatcggatacggcggaattttgttataaggtaacagatttctatcatcccggtgatgagggcggtctggcatggaatgatcctgaaattggtattgagtggccgaaggtctttggtgaatatcagggaaacgcaagtgcggaagggtatcatctggaagatggaaccgcgctcaacctgagtgataaggaccagaaatggctgggattaaaggaaacatttaagttctaataaagtttttagttgcagagaggatgtctttcactaatggataataagactacacagtatgataaacgtctatcggaatacagagacagactgttacaacggaataaggaaatgacagcggacgatgatgagctgatcgattcgatcatcaatcagaatgaaccggaaaatagcaaagctgacggtaaagcagatggtacatctgaggagaaaatggcagattctgtatcagatgcttcttcggcgaaagaaacaccggtatcggaatcctataaggaatatgcagacaaattagagtcggtattaaaagaggttggggttgcgacagcggagaagtccgaatcgaagcagccgacagagagaataaaagaagaccgtgtagccgaagaacggaaaaggcttgcttataagaaactcggttatgaagaacagacgcaggatgataccatggaatctgaggcagatatggatgaatcggaagaagatggacatacatttgctgatgtatttgcaaatctgagagaaaatgtccgggatgcagtaggtgaggctgagaagaaggtcagaagccggaagcctgttagatcagaagtgggtaatgatgaacagaaacgatcatttcgactgaatacactcggtaaatgggcggttacaggcattgtattgttcgtagtattcctgatccttacgatcggttatgtatcggcgaataaatcttataagtataatcagatggatattcgtccgatcaagaacagtgatctggttgtcaacgaaggtgtaaaagaacagacaaagggttataccacgattgcactttacggagttgattccagagattcaaatctggatacaggaacaaacagtgatgcgattattttactcagtatcaataaagatacaaaagaagttaagatggtttcggtatacagagatacattgttacagatacagagcgactctcagacaactcataaggtcaattacgcatatcagctcgggggtgctttaatgtcgatcaatacgttaaatgcaaatctggatcttgctatatcggattatattaccgttgattttaatgctatggcagatataatcaatgcgctgggaggcgtagaggtaacggtaacagaagatgaggtaaataatctgaacaagaatcttgcggaacagatcggtatttcgggaaaatattccgagggcgttcatgaggcgggaacgaaggtattaaacggacagcaggcagttgcatattccagaatccgaagcacgggtaaaggagatattaccagaaccatgagacagcgtaccgtattacttggtctggtaaataaaatgataaatgcagacagtaagatgatatcgaatctgatcgatgtatcctttagctgcatatcaaccagtcttacaaaggatgaagtgacttcgttggcgaaagatattgctgactataagattacaggaaatattggattcccgttcgcttatacaccgatgtccttagatggtaaaggcagtgtgatcgtagcagcggatctgaatgcaaatgttacagcattacatgaatatctgtatggaacatcgggttatactccgtcgacttcagcatcatctataagcacagaagtatcatcggaaacgggagtggcagcaacagaagcaattgatatagataaggtatcaggcgaaactgctgttacaacacaggaaagcagtgaagcttcgagtgaatcggcaacaaatggatctgaaacaggttcgacaacagaagtacagacgatcacgacacctccggcgggaatgatagaaaatgaataatatcagaatccgtctgagacttttcgcagggaagattccggtgctgacagtgatcatatgtgtgatagtattatttttcgggaaatacagacagatggaatatgtccgggcgaatgaaaccggagtaatagagatagaaaatacagagatcttaccgaagcaaatattttgcaggcgcaataccaatgacagcttccctgtgtgcggtgtagtgcttcatgactggattaaagatataagacagaatcttgcatgggcaggtatgacagaacgatatatcgctcatatgggactgcatgaaaaggtatgtcagatgatgtttgtaaatcctgagaatctggttttaagtcatgatgtgaccaagctggataaggaatttaagtcggcgcttaagaagtatcctgtcggtgggattatgctgaaatcaaaaaacatacagacgaaaaaacagctgaaaaagctgttgaagaaaatgcaggataattctgatattacactcttccttgctgtagatgaggaaggcggaacggtcagccgcgtaatgcagaagcttggcaatatagatggcggcgatatcggatcaatgtatgattacagaaatctgggtggagatattgcgtatgagaatgcaagacagatcggagataatctgtcgtattatggatttaaccttgattttgctccggtagcagatgtatggtcaaatccggggaatacagtcataggaaagagagcttacagcaatatctatagtgaagcggcggaattaattccatatgcggtgcgtggttttcacgcaggcggagtgctctgtactttgaagcattttcccgggcatggcaatacaaaagaagattcccattatggaaatgcatatgtatatgagacgaaagacgatcttgaaaacaatgaatttcagtcgtttcgggcaggaattgatgcaggagctgactttgtgatggtagggcatatgatcgtaaccgatatatcgaatatcccatccgatctttctaaagaaatcgtgacagatattcttcggacagaacttggtttttccggagtgatcattacggattcattgcagatggaatcaattaccgatacatattcagccggggatgctgcgatttatgcggtggctgcaggaaatgatatgatattggaaccggaaaatctggaacaggcagttgaggggataaagcaggcagtaaaagatcagattattgcagagactcagatcaacgaaagcgtaagaagaattttggtgatgaagcatactgctattgagaaagaatagaccgattgggcaaatttaaacacaaaacgcacaaaatgcggattatatattttaaaagtaaaagacacgatttcaatggaaagaccattgcaattgtgtctttttgatttgcaataatttatattggctatacaaaacactttataaaattaaatttacaaactatctgacaatttgacgaaaaaagttgtttacaaacggaaaaaaagatagtatgattacaaatcataaaaagcacagagccgcatttgagaattactatcagataacctgactataagatctctacaggtactggcaataagttggaaaggaaaacgagcatggaagataacagaaacgtagtaaatccagggttatacagtgaagaatacgaacatgataactgtggtatcggtgccgttgttaatatcaaaggcattaagacacatgaaaccgtaaataatgcgttaaagattgttgaaaatctggaacacagagcaggaaaagacgcagaaggaaaaaccggtgatggtgtaggtatccttcttcagatttcacataaattttttaagaaagcagttgcggagctcggatatgatctgggtaaagaacgtgattatggtattggtatgtttttctttccgcaggatgaactgccaagaaaacaggcaatgaagatgtttgaggttattgtcgagaaagagggacttgagttcctgtgttggagaatggttccgactactccgggaatccttggaaagaaggctgttgatgttatgccgtgcattatgcaggcatttatcaagagacctgacagcgtgaaaacgggacttgattttgaccgaaagctttactttgtcagaagaatatttgaagaaagtaatgatgatacctatgtaccatcactttccagtaaaacgatcgtatataaaggtatgttcttagttggagaacttcgtaagttctataacgaccttcaggatccggattatgaatcagcgatcggacttgtacattcgagattctccacgaatacaactcctagctggcttcgggcacatccgtatcgttatctctgccataatggtgagatcaatacgattcgtggaaatgaagataagatgatcgccagagaagagacaatggaatctacgatcatgcaggacgagatgtacaaggttatgcctgtacttgatccaaatggttccgattccgcaagactggataactgtcttgaattccttgtattaaatggtattccgcttccgctggcagttatgatcacgatccctgaaccatgggaaaatgatcgatttatgagccaagagaagaaagatttctatcagtattatgcaacaatg

SEQ ID NO: 324 - DNA, 7272 bp, unidentified
  source 1..7272: mol_type = unassigned DNA
ctcccgtaattacagctattttttcatttaacataaaactctccatactgtttttattttaatatgctctctccatatgatttacaaacttttcgtcatagttttttatcataatatttataaactgatttcctttagtttatctaaatcatctaccgtgctaatattgatgcatttaacatttctgtctatttttctaataaatcctgctaaagttttaccagggcctatctcaacaaaagtatcaacaccattattaatcatatttcttacactttgctcccatttaacaggtgaagaaatttgtttaaccaaaagttcttttgtttttgaaatatcgcttacatattcccctgttacatttgtaacatatggaatttctaattctgttaaattaattttttccaactccacagacattttttctccggcagttttcaaaaattttgaatgaaacggaccgctaacattaagttctattactctttttgctccactttcatttaaaatttttgctgctttttcaactgcaggttttaaacctgtaataacagtctgtcccgggcaattgtaattagctatgtccacatcttctatgtctaaaattaattcctctatcttagatgtttccattcctaatactgctgccatagctcctgcttttttaggattgtccgttggaaccgcttcatccataaaaattcctctttttctaacagccacaatcgcctctttttctgtcattccatgcgctgctacaattgccgcgtattctccaaggcttaagcccgctgctacatcaggctttataccaagattttcaacttcttttgtaattgcaagacaggttgtaaccaaagccgcctgtgtatattttgtgttatttataagttcattttcttcaaaacaaatattttttatgtcaaaatccaaaactttatcagcttcatcaaaaattctttttgcattaggttttgtttcataaaaatcttttcccatgccaattttttgagcaccctgtcccggataaataaatgctatctttcccattttatgcctttcttaaaatcttgttttaaacattatttcaaatcaatatttaattacaatcttcgttatattgtaattgctttgtgtttcaacttctttttattgaactagaattttaatcaaatcctttgcttaaaagttgttctccttgtgtcataacttttgtaatcaaatctttacaggaacatatttctttaacaagccctgcgctttgacctgccattacactaccattatctacatctccgtccacaactgcttttcgcaaaccaccaagcgtaagtttttcaagctgttccagacctgcaccctctgactcaagtttaaggtatgtattagtctgtttgtttctaagatttcttacgggatgtcctgtgcttctgcctgtaacctttgtgtcaatatccttagcttttacgattttggctttataattgtcatgaactgttgattcttttgttgccacaaaagaagttcccatttgaacaccactggctcccagcataaatgccgctgcaaaacctcttccatctgcaattcctcctgccgcaacaacaggaatgtttactgcatctacaacctgtggcacaagaaccattgttgttatttcaccaatgtgtcctccggcttctgttccttctgcaattaccgcatctgcaccgcacctttccatcattcttgccatggctactgaggcaacaacaggcattacttttattcctgcatttttccacatttccatatattttcccggatttcctgctcctgtagtaacaaccttcacattatgttttgctactactttcgcaatttcatcagcttgtggattcataagcattatattcacgccaaaaggcttatctgttaatgtttttgctttaataatctgatcttcaacccacttagcatctgcgccaccggctcctataattccaagcccgcctgcattagatactgccgctgcaagattggcttcagcaacccaagccatgcctccctgaataatgggatattcaatttctaaaatttctgttaaagctgttttcataatcgcctcgttttgttttctgattttctaattatttttagttatctcctatttttttactagcttttaattatctttctgactatttttatttgttcttttcaatgtaatcacaaacatctccaactgtcttaatattttcaagttcttctgttggaatctttacttcaaattcatcttcaaacttcattactaagtcaaataagtctaatgaatcagctcctaagtcttcatcaaaagttgtttcctttgtaattgttgctgcgtctgctcctaattcttctgctattaattctttaatcttttcaaacattttattttttcctttcatttttcatttttattttgtatgtaatccggctaaccggtaattacctatgttttataatttgttttaaaattttctaaaactccaaataaactgctgaccatgtaagccctgcgccaaaacctgccattattattttgtttcctttttgaatctttccatcccttaccatttcgtcaagtaaaattggaatgcttgccgatgatgtatttccatactcgctaacattttcaggaattaaatccattgaaacttttaatcgttttccaatgctttcaagtattcttttgttagcctgatgtaacaaaaacaaatcaatttctgatttttcaattttcatctttgaaatcagttcttcaatacactcagggacttttcttactgcaaatctaaaaacttcctgcccattcatagatacgaatgtttttttagaatcatttattcccctgtactgtattgaattctcacatgttaatgcacctcccattgaaccatccgaatgcattactgtttcaaatcttgctttttcatcttttttaataattgcagctcctgctccatctccaaaaagaattgctgttgttctgtctgtccaatcaactatttgtgacaagccttcagctccaatgactaatgccgtttcaaccaagcctgcgtttatgtaactttgtgcaatgttatatgctgtaataaaacctgtacatgccacattgatgtcaaagcacatggcattcgttgcctttaactcatcctgtacaatacaggctgtacttggcaaaacagtgtccgacgatacagttgatacaattatcaaatcaattttttcacaacttattctggcattctctattgccttttctgccgccctgcacgccatataacttgtactctcatcggtcataatatgtcttctctttattcctgtccgctctcttatccactggtcatctgtttcaaagaactcttttaagtcattattacaaacaacattatccggtgcataagaacctgttcctataatctttccaaacataaactcaaaaatcagattgaattcccaaagtaattcattatcctttcaaaaattattcaaaacactttaatcaaaataggttaagcaatcacatttatttttatttaaaattattttgtattaaaattttttgattgtaaagtgttttgactttcaaagtatattattaaaaaaataatttgtcaacaacttttttaagatttctctcctccttttctgtacaaagtcgcccgggacgttgtctacgctcattggatacaataaatctgcccttctagtgtcattacgtgtcatatgataaaaatgttgtagctttcgtaatccccaagcttcacaaaaaagccgggctacgcatttgtaccgatctccaatcgttagatttttaggtctaacttttgggggtcggtacaattttcaatgcgtctcccggctttttattctatctggtttatggctattccctgccatctctccagacttatattctaatagccataaggtgttcccttaccgcttccttcctttaatcttgccattgctcttgctaatgatgcctttgaaatatgatattcagcaatactttgcttctgacgaagctgttcttctgctctttctttggcttcctcagctcttcttaagtcgatttcttcaggatattcacaagtgtcaactataactgtagctcgattgtttaccatctgggcaaaaccagtccctgttacacctacaatagtgctaccgtcttcctttgtgatttttatttctcctacctcaacagaaaataccatattttcatgatgagcctgaatggcttttgagccatcacgaagaggtaaaactaactgagtgcatcttccactatagaatatcttatcgcaagcaataacttttataccaaatgaattactcatagctcattcctcctagtttgcggaactttctcctgccattgtctttgccttttcaataacatcatcaattgttccaacattgaaaaatgcagcttccggataatcatccatttcaccatcaattatagccttaaatccacgtactgtttctttaagtggtacatactttcctggtacacctgtaaagttttcagctacatggaatggctgtgaaaggaacttctgaatctttctagctctatatacaacaagtttatcttcatctgataattcttccataccaagaatagagataatatcctgtaattctgtatatttctgaagaatttcctgaactcttcttgctgtttcataatgttcttttcctacaacatcttcctcaagaatacgtgagttagattccaaaggatctaccgcaggataaataccctgttcaacaatctttcttgaaagaactgttgttgcatcaagatgggcaaatgttgttgccggagcagggtctgttaagtcatcggcaggcacatatacggcctgaactgacgttacagaaccattctttgttgatgcgattctttcctgtaattcacccatttctgttgctaatgttggctgataacctaccgctgatggcatacgtccaagtaatgctgaaacttctgaaccagcctgtgtaaaacggaaaatattatcaatgaataacaatacgttctgatgttcttcatctctaaaatattcagccattgtaagacctgtttcagcaaccctcatacgtgctccaggtggctcattcatctgtccaaacactagggcagttttatctaaaacacctgattctttcatttctgtccataaatcattaccttcacgagaacgttcaccaacacctgtgaatattgaatatccaccatgctgtgttgcaatgtttgtaatcaattcctgaataagtactgttttacctacaccggcaccaccgaaaagaccgattttaccaccttttgcataaggtgccaaaaggtcaataaccttaatacctgtttcaagaacttctacaacaggactctggtcttcaaatgatggtgggtctctgtgtatacaccaatgctgttcaccatctaatttttctccattatctaaagtatctccaagaacattaaataatcttccaagagtcttttcacctacaggaacagatataccacttcctgttgcaacaacttccatacctttatgaagaccttcacttgctgcaagcataatacatcttactgtattatttcctatgtgttgcgcaacctccattacacaacgctttccattattgtctacttcaagcgcatctttaatatatggaaggttgttgtctgcaaattctacatccactacaggtcccataacctgtacaatctttccttttaacatatggtttcgattccttcctatttcttcttctgtgccttagcaccaccaataatctcagtaatctgctgagtaatggctgactgacgcacacgattatattcaatcgacaactgttgcaacatatcttttgcactatctgttgccgcctgcattgccatcatacgtgagctatgttcacttgcaaatgattcaactaatgctccgtaaatgaaacctgttacacagtttggaacaatatgctccagaacttcctttactgatgtatctgtcttgatttcttcctgatacatatctataggaggtctgttcttttcaaactgttctctgtaacatggaagcaaacgcattttttccgtaaccatagatacagaattttccatttttgtgtatataacatagatttcatctaattctcttttgttatataactccaaaactctctctgcaattacacgtgctctatgaagtgatggattctgaactgtatatttaaattctgaatcaacctccatgccctcttttgcaaaaaactgacgaccaagctctccaactacaaagagcttattattttttccctgcttaaaaagttcattagccatcttaataacattgtggttatatgctccggctaaacctttatcagcagtaataactatataacctctcttcttttcctcatcaggaatattggaatgagggtcaaaatacttacttcttgcatcaggcaaatgacgaagaagtctcgcaattgccgactgtaattcatagaagtaaggctctgtgtcttcaagtttctgttttgcacttctaagctttgcagaagaaatcatatacatggcatttgtaatcttcatcgtatcctggatacttttcattcgtttctgaatttccttagtatttgccattatctatcacctgcttctaaattctgctcttatattctttagctgcttcaactattctttctgtaagtgcatcatcaagaactttcttttcattaatttcatcaacaatatccttatgttctgccttaaagaagtctaacattcccagctgtacttccttagttttcttgacatctacatctaagaatatacggtttgttgctgcaaccaatgtgataacctgttcagcaagactcatcggattacaaagtggctgctttaataattccataagtcctttaccatactgtaactgttccttagttgtatcatctaagtcagaactaaactgtgtgaacacttccatttcacggtactgtgccaaatcaatacgaatagttcctgccgcttttttcatagccttagtctgtgccgcaccacctacacgggatacagaaataccaacgttaatagccggacgcatacctgagaagaataagtcactttcaaggaaaatctgaccatctgtaatagaaataacgttggtcggaatgtaagcggatacgtcacctgcctgggtctcaatgatcggaagtgca

SEQ ID NO: 325 - DNA, 17016 bp, unidentified
  source 1..17016: mol_type = unassigned DNA
  misc_difference 11630: note = a, c, g, or t
  misc_difference 11631: note = a, c, g, or t
  misc_difference 11632: note = a, c, g, or t
  misc_difference 11633: note = a, c, g, or t
  misc_difference 11634: note = a, c, g, or t
  misc_difference 11635: note = a, c, g, or t
  misc_difference 11636: note = a, c, g, or t
  misc_difference 11637: note = a, c, g, or t
  misc_difference 11638: note = a, c, g, or t
  misc_difference 11639: note = a, c, g, or t
ggctgagcggcgcaccgctcacgcagcgggccgtggaggtcgtgcgccgcatccacacccgttcgggcggcaattttccgatcatcggcgtgggcggcatcatgacccccgacgacgcgaaagcgatgctcgacgccggagccgacctgttgcagctctacaccggctatatctacaacggtcccggactggtgcgcgacatctgccgcgccctcgtcgccgacgccgaagcgaaagccgcggaggaaaaggccgcagcggcgcaggcgacagcagaacagaccgcagtgcagcaggcagcggcggaacaacccgcaaaagaacagcccgcgccgcaatctgccgaaacacagccggaagccgaaaacgccgaaccggcgcctgcggaatcccggactccggcgcaatccggtcccgactccgaacagccggagtcctgagtcaaaaacaccgcttatgaaagcaacgatcatcactatcggcgatgaaatcctcatcggtcagatcgtggataccaattccgtatccatcgcccgccacctcaacgccgcgggcatcgtcgtgcatgaaaaagtctcgatcggcgatgacagcgcgcagatcgtcgggtgcgtggaacgcgccctcggccagtcggacatcgcaatcatcaccggcggactcggccccaccaaggacgacatcaccaaaaagacgctggccgaaatgttcggcagcgaactcatcccgaaccaaaccgtctccgaccatgtaaaacggatgctcgaagagcggggcatcgaattcaacgacctcaaccgcggacaggctctggttccggcctgctgcacggtgttgttcaacgcgcacggcacggcgccgggcatgtggttcgaacgcggcggcaaagtggtcgtctcgctgccgggcgtaccctacgaaatggagcatctgatgcaggacgaggtcatgccgcggctcaaggcgcacttcgaactgcgccagatcgtacaccgcacgatgatcaccgccggactgcccgaatcgatgctcgccaaagcgatcgaaacgtgggaaaacgccctgccgccctacctgaagctggcctacctgcccaatccgggcgccgtgcggctccggctgtcagcctacgaggtcgagggagaaagcgtatcgaaggagatcgaacggcagttcgaagcgctgcgcaggatcattccccacaacatcatcggctacgaaacggccaccatgcaggagttgatacacaagctgctcaccgaacggcgacagaccctcgccacagccgagagctgcacgggcggcaccatcgccgcgcgctttacggccatgccgggcgcttcagcctacttcctctgcggcgtggtttcgtacagcaacgcgtcgaagcaggctgtgctgggagtcgatcccgacacgatcgcccgttacggcgccgtcagcgaacaggtcgcccgacagatggccgaaggggcgcgacgcatcagcggcgccgactacgccgtctcgaccaccggcatcgcaggccctacgggcggaacgcccgaatatcccgtcggctcggtatggatcgccgtcagcaccccgctacgcaccacgacccgcctgatccgtgccggcggcagccgcaacgccgtcatccgaaaagccggaacggcggccatcgaactgctcgaagaagaattgcgggcggcaaatcaggctaattaaccctatcaatagactgaatagtttgctttatagcatatacttacacatctttgcaactattcagctcaaaaactaatgaaaaaaagccctgcttttattgatgctgtttacccggattccgtccggccacgcgcagaccgaaacctacaaaaacgtagacagcacgctttacgcctattaccgctggtgcaacaacaacatccgcgattcggtcgtcctgctcaaggccgacacgctgttccggctggcgggcgaaaaaaacgacatccgcatgcaggccgtcgccctctcgttcaaggccgaccactattacttcaacaacgaactggattctctcaaggcgtggattccccgcgtgcaggccttcgcacgcgcaaacgagcagccgacctactattttttcacttggtcgcggcttattctctactacacgaaacacgggcaatacacgctggcgcagtacgagctggaacgctacatggcgcaggccgaacaggacgactacaagcccgccatcgccgaagcctacaagcagttaggccacatctaccgaacccgcggactcaaagagaccgccgccgactactaccgcaaggcgatcggcttcatcgaagagaacaacctcaacaaattctcgctgccgattctctattccgaactggccaccgtcctcatcgacaccgaacggtacgaagaagccgccgaagaactcgaaaaaggcaaggcgcggctcaccctgcccgaatacatctggccgctgaaactcaaacaggtgatcctctacagccggaccggccggagcgccgaagcccgcacgctgttcgaccagatccggcagggacacgacggataccttacgacggccagcctcaccgaagcgcagcttgccatcaacctcgccgagcacgaattcggcagggcgctgaccacgctcgacaaactgatcggcctgtccaaagagaccgggcacagcgaaacctatttctacaaactgttccaaacccgtgcggaaacctatgccgaaaccggcaattacgaagccgcctacaaaagtcagaaacactacctcgacctctaccggaaaaaggtcggcgacgacaacgaaagaaacctcggcgaattcgccacgctgctcgacgtcagccgtctcgacgtcgaaaaggcggagctgcagcggcagacgcaggaagtgcgcctgcaccgcacgcaactgggcatcgcggcgctgagcgtcatcctgctgctgacggtcctctttcttgtcttcacggcgcgcatgaaccgtcgtctggcgcatgccaaacgggccgcggaagcgagcaaccggatgaaaggcgtcttcatccgcaacatcacgcacgagatcaacaccccgctcaattccatcgtaggtttcgccgagctggccgcggccccggacgcggacgacgaaaagcgtcagtcctacatcgagatcatccgggaaaacagcggctacctccagaaactcgtggacgacgtgctctatatcgcaggcctcgaatcctccgaccccccgcccgcattgggtccggtggacatcaacgtctgctgcatgcagtgcattcagaccgtcagggactacagcctccgcaaactcgacatccgcttcgaacccgaatgcgcacaacttccggtcaacacctcctgcctgctgctctccaaggccctgaccgaactgctgcgcaacgccgcacgcttcgcccccgacggccggatcacgctcgcctacaccctgatctcgtacaaaaagcggatcgccttcacggtcacggaccgtggccccggcatccccaccgcagaagccgggcgcatcttcgaccgtttcgtcaaactcgccccgttctcgcagggcatgggactgggcttggccgtctgccggctgatcgccggcgcattgggcggcggggtcgaactcgacacttcctacacggaaggggcgcgtttcacgctcacaattccaatcgtttaaacattgactatcaacacaataacattcagcattaaaaattaatcgggcaacttaatctttagttctcattttttccttatatttgcactcccttacgggaataatattaatattatcgaaaacaaaaatgaaagtttgcgaaatcacaggcaaggtggcgatcgtgggaaacaacgtctcgcactcgcaccacaagaccaaacgcaaattcagtcccaatctgaaaaccaagcgtttctggtctgagcaggagggccgctggattaccctgaaagtatcggctgccggcatgaaaacaatcaacaagaagggtcttgcagtcgctctgcgcgaggctgccgcacctaagtccgtttactaaaacaccgaagtaacaaatggcaaagaaaggcaacagagttcaggtcatcctcgaatgcaccgaacagaaagagagcggagttccgggaatgtcccgttacatcacgacaaaaaacaagaagaacacccccgaccgtctggagcgcaagaaatacaacccgtttctgaaaaaggtcaccgttcaccgtgaaattaaatagttttgaagctctatggcaaagaaagtagtcgcaacactgaaaaccggcacgggtaagaactttacgaagtgcatcaagatggtcaagtcggacaaaaccggtgcttacatgttcaaggaaggcatcatccccaacgaccaagtcaaagaattcttcgaggagaagaaataagtattttaagagcgatcttaaatacaaagggcatccgacagggtgccctttgtatttatactctccgaagaaaagcacaaattcggatgtccgtttgctatttcagggcgaaaagagtaactttggtcaaaaatacacgacaatgcaactgcaaaccatcgctttcttcaattggctttatccatacggcggagcggaaacggtaacgcacaatctcgcctccttctttcacaaacagggttaccgcataattctgtatatcgagaagttgaaccgcgaattattatgtgatgaagagcgggcaatatttcaattcagggagctgccggccggacccgatccgaaaaaaccggcgaacgtcgatttcctttgccggtctctccaagaggagagcgtagattgcatcatcgtccaaggcatagatgccattccgttcgcagagatcaaacgcaggacccggtgccggatgattttctgtctgcacaacattcccttctgggaagagtacgcatggcgcgaactcaaatccacggaaatccccaatccgacatttctgcgccggctggaatttctgttcctgcgccggccgctcgaccgcattacccgcaaacgcctgcaccggacagagaaaatgtacgccggcatgatgccccatctggatcgcatgctgctcctctgcgaccaatacaaagaggacttcatgcaggcgctcaaggcttcaggccatcccggaagcgacgctcccgcatcgaaatacggagccatactcaatccgctcctgcctgcggcggccgcccccgtatcgcccaaagaaaagatcgtcctgtacgtaggacgcttccacagagctcacaaacgggtcgatcgcctgctgaaaatatggaaaaccgtcgaacgcaggaatccagactggaagctgattctggtcggatgcggcgaggaagacgagaacctgcgcaaattagccgtaagactacggttgcagcgggccgaattcgccggctatcatgccgatgtaacgccattctaccgcagggcgacattcatgtgcctgacctctaatttcgaagggctgcccatgagtctgatggaaggccagcaatacggcgtcattccggtatcgttcgactcctatgccggaattagggaaatcacctgcgacggagcgtgcggaatcatggttccctcctacagcctgcgcaaatacgccgcgctgctgaatgcggcgcttgcggacacggaacttcaggaacgtatgcggacgcgcgcgctggaagcttcccgcagatacgatctggaaaatatcggcaaccaatggctcagccttttcaacgaaatgtaaacccatgaaaaaaatagcatttatcaacgtgcgctacggagccggcatcaacggcggatcggaagtgcattgccggatgcttgcagaaagactgcgggataaatatgacgtcgaggtattgaccacgacgctcaaggacttcaacaacccctcggaccaatatcctgcaggcgaaagccatgaaagcggaataaccatccggcggtttgtaccgcatcccggcttcaacggcagggaaagccgccggctgcttcagaaatccaaacctgtccgcagactccgctattggttgtcgcaagccggcgtgttgcgtctccttgcggcaattcacccggtctggaatctcggcttcgacaaggaaaccgcctaccagcattcgacggtctcctacgcccccgacctgctgcgctacatcgaagaacatcgggacgattatgcggcattcattcccatgtgctatttccatgcacagaccattttcgcagggctgcaggttccccaaaaaagcatactgattccgatggcacacccggaaaaatggcttttcccggccatttacacccggttattcacgcaggttcgccatattgcgttcaacaccgaagcagaacgcaggctatgcctgcgcattttcgggccgcgattggcgccgagcagcatcgtaggcaccggcatagaactcgcgcccgccgcagcgtgggagcatgtcaaagcgaaattcaatcttccggataaatatgcgctttatctcggacgggtcacaaccggcaagataaacacattgctgcccgattttcagacttacaaccggacatacaagcagcagtcgaaactggttttggtcgggagtctgtctccggaaatcaaatatcccgacgatccgaatatcattttgacgggattcgtttccgaagaagaaaaaagcgcgattatccggcacgcaactctgatggtcaatccatcgcgtttcgaaagtctctccttgctgctgctcgaagccatgcaaaaccgcgttcccgtattggtaaacggagccagcgaagtactgaaggaccattgcctgcaaagcggcgcggcactttactacaaaggacgcagggacttctgccgccagcttcacaaactctttacggatgagcggctgcgacgcgaaataagcgaaaaaggaccggcttatgtcgaacagaattacagttgggaagtcatcgtccgtaaactgagcgccctgatcgaaagcatctgattgccggtaaagcaaaaaaggagtacccatcgaggatactccttttctttaattgacgaaagctaaaacttccgcaccgcccgcacgaggaatttgttgtacttgggaatctcgatcacatagggaggttcgatgcccgtatgggtcgtataggcttccttctcgtccttctcggtcgaggagaaatagtagaccagacggtccatgcgcttgccgccgttatccttgagcgcgtcgttgaaacggttgcgggcctgacggttggaatgtatgcgcgtgccgccgttgtagttgtgtccgatggtcagcagttcgtcgatggccggcaggtaccagccctcgcccttgtcgcggcaccacttgaaagccggaaaatcatcccacgcaaggttgttttcggcgatataggcggctaccttctccatatttcccatgccgtcgatccggtcgtcggcgcccgcaacccgcaggtcgggcttccggaattcgctccacggcaggtatatttcgtcgagcgaaataatcagtccgtgccggcggtcctccgtcagcatgcagaccacgcccttgacgccgttctggtcgtagaactcgccgatctgatactctttggcgacatactgcaccggcgcagcctgctgtacaggcgcctgcgcagcgggagccgctgcgaccggagcctcaccgaccggcgtcgcaggggtcagcggcgtcgcaggcacagtttcggcagcccggaagcgctccttttcgccgttggcatactgaatgtagtcgatatcggcgacaggcagcacataggtcggtccgtcgggattggagaaacgcttataccgtactgcatcgggtgttatttcggttactttggcctcgaccttcgtcgcatcggtcttgacgatcaggtcctgagccgcggccgtcaatacgccgcaaagcgctgccacaagcagcagaatcgtttttttcatcatcgttgaaaatgtatatagtgcaaatataacatttttttccaaacattcttattatctttgtacggatatagagatattagacatggcatttttcgatattttcaaaaagaagcaggacaactccgccgcgcaggcttccgaagagcgcaaacagcagcaggaagagcttaacgccgggctggaaaagaccaagacgggacttttctcgaagctcgcccgcgccgttgcaggccgttcgacggtcgatgccgacgtactggacgacttggaagaggtgctgatctcgtcggacgtaggcgtggaaaccaccgtcaaaatcatccggggcatcgaagagcgcgtggcgcgcgacaagtatatgggcacctccgagctgcagtccattctgcgcgaagaggtaaccgcgctgatggaggagtcgcacggctccgaaaagcatttcggactcgacgccaaagagggcgaaccttacgtggtgatggtcgtgggcgtcaacggcgccggaaagaccacgaccatcggcaaactcgcggcccagctcaccaaagccggacaaaaggtctggatcggcgccgccgacacgttccgcgccgccgccatcgaccagctcaaggtctgggccgaccgtgcgggagccacgatgatccgtcaggagatgggttctgacccggcatcggtggcgttcgacacgctgacctcggccaaggccaacggcgccgacgtggtgctgatcgacacggcgggccgtctgcacaacaagatcaacctgatgaacgagctgaccaaaatccgcaacgtcatgggcaaggtgatccccggcgcgccgcacgaggtgatgctcgtgctggacggctcgaccggacagaacgctttcgagcaggcccggcagttcacgcaggcgacgcaggtcacttcgctcaccatcaccaaactcgacggcacggccaaaggcggcgtggtaatcggcatcagcgaccagttccacatcccggtccgttacatcggcattggagaaggcatcgaccagctgcgcatattcgaccgcaaagagttcgtcaaggcgctcttcggcgacggctccggccaaagctgacgggccgccggcggttccgcacaataggcggacggccatatcggaacgacacctatatattaaaagcacaaacatcgcgctccggactccccgacagagtccggagcttttttgtatatatgtatcgtccggttttttccggcgcggcagtcaattatacgcaatttgaggattcaaatacgcaaaccacgcccaccaacaatttacagatacataattttgaatatcgattttgcacatactgcaaatcgacaccaaaaccgcgcctatttttaaaatatttaaataaatatctgccaaaaccgagaattaccgagcctctctacacaattactattaatattaaccttaactctatgaaaatgaatttgacaacttcggagaagaacaggggcttcgtccgctttcttctgatgagtctgctgctgagcatactcattcttccggcccatgcgcaggatcgggtcacggtgtccggacagctgaccgacagcagccagactccgctcatcggcgcttcggtcatagaaaagggcacgaccaacggcgtcaccaccgatgccgacggccgctaccagatttccgtgaaaccggacggcgtgatcgacttttcgttcatcggctacaaaccgcagtcgctggccgtcatgaaccgcacggaaatcaacgtcacgatggaagaagacgccacgatgatcggcgaagtcgttgccatcggttacggctcgcagcgtaaagaggacctctcgatggccgtctccaccgtcaaagtggacgacgcggcccgcagccgcgccgccgacctcggaaccctcctgcagggccgcatgccgggcgttacgatccagcagtcgggcgacccgctgcagaaagcgtcgttcaccgtccgcggtcgcggctcgaagggcaacgacgacggcacggacaagagcgccgcatacagccgcgacaacgtcggcccgacttcgggcgacggcgtgctggtcgttgtggacggtgtccccggcgctccctacatggccgaagatatcgagacgatcaccatcctgaaagacgccgcctcggccgccatctacggtgcttcggtaggttcgagcggtgtaattctgatcaccacacgtcaggcgcaggccggcaaaacccgcgtcaacgtcaacgtatcggtcggcttcgaacgcgccatgaacctcccgacgatgctcaacgcacagcagttctgcgacgtctggggcaaggccgtcgagaactcgccgggcagctcgctgcccaatctggccaacccgcaggtctatgcaggcgccaacgtcacccgcaccgactggctcgacgaaatcttccgcacgggtctgacgcagcactatgccgtgtcgattaccggcggcagcgagacgctctcgtcgatcctctcggtaacctacgacaaaaaggaaggcaccctgctcaacacatggagccaagcgctgggtgcgaaactccatacggaattcaagccggtcaaatggctgaaattgtcggagcgcgtaaacttcgaatactccaacggacagggcaacatcagcacctcgcacacgggccccatctacggcgccatgtggtttcccgcttccgcatcggtttatgaccgcgacgcaaacggcaacatcgtctacggaaacgacggcaaaccgaaatggggcggtatcgcttcgtcggccgacatggccagcggcgtcgagggtcccaacatcgtgaatcccgtcgcccagctcgaaaccatgcaccgccgctacccgcgcaccaagatattctcgaccacctcgctggaaatcaagccgatcacgtcgctgaccctgaaatcggagttcacggccgacctcgacatgcgcgaggaggacgaattctcgcccgtcatcgacgtgccgggcggatcgagcacttcgagccgcgagcagttcaactacaacaacttccactatctttgggaaacgacggctacctacgcgcaagtcttcggacgccaccacatcagcgccatggcgggtttcaccaccgactacaagaaactacatttccgcgacttccgcacgcagggctacggctccaacgaagaccacaatctggtatggggcgccgcaggctcatggaccaagaacccgaacgaagatatagtagactactcgatggtctcgttccttgcccgtctcggctattcgttcgacgaccgctatttcctcaccggcagcatccgccgcgacgcatcgtcgaaactgcccgcagcaaagaactacgactggttcccggccatttcgggatcgtggaaactctcctcggagaaattcttccagaatgcaggtctcaacaaggtcttcgacctcgtgaaattccgtgcaggctggggtaaggtcggcaacgtagacctctacaacctgcccaacccgaccagcattccgctctccatctacccggacggttcgcttatcggcggcacgacccattacggaacctatctggcgaccatccccaatacggacgcacgctgggagaccaccgtccagaccagtgccggtctgnnnnnnnnnnctttccctacacgacgctcttccgatctggacctgacaatgctccacaacacgctcgaagtcagcgtcgattattacaacaaggaaacgaaggacctcgtcgattacctcacgattccgccgcagatgggtgtagagaatgcgccgctgggtaatatgggccacgtaatcaacaagggatgggagttctccgtatcctatcggaacagcgccgcacaaggcaagttcaactacaatgtctggggcactttctcgaccaacaaaggttatgtagaggactacggcccccagcccattgtaatgcacaaataccccacattcaacggcattcagctttttgcttcaggagcaggacacccatggtactcttactatatctaccgcacggacggtatcttccgctcgcaggacgagatcgaccgtcatatcagtaaggatcccgacaccggcgaggtcaagatgctgcagcccgatgccaaggtcggcgacctgcgtttcatcgacaccaacggcgacggcgtaatcaacgacaacgaccgcgtattatcccgctcctatactccgaaacaaacctactcttttggaggatcgctcgattggaaaggttttgacttcagttttatgtttcagggcgtcgcaggcaattatgtctacaacggcacgaaacagttgggaatgaacggtcgtcaagacttgggtaacctaacaaccgatgtttacaacacatgggatttcaaacccatgaccagcaaatatccgcgactcggcctcagtgacgacatgaacggcaactacctcaaggtttcggacatcttcctcgaaaagggcgactacctgcgtctgaagaacatcacgctgggttacacgctgcccaagcatatcagccgccacatcggcatggagaagggttcggtccgcgtctacctgagcatcgacaacgtggccaccatcaccggctactccggcaccgaccccgaagtaggcaactacggtctggacagcggtatctatcccacgtcgcgcttctttaacttcggtgtaaacatcaacttctaacaactacgaccatgaaaaaaaccatattcagcctctgtctggccataagcgctttctgcctttcgggttgttccgatttcctcgacagggagccttacggcaaagacgctacttggaagaccaaagaggatgtagaccaagctatctacgccctttaccacttcgtctcgccctattggagcgaggagatctgcggccgcggccatatgtggctcgaatgcgccagcgacaacatactgatcggccgcgcccgtccgtcggtcgatgaaatccgcgaattccgcatgtcgccgtccaacgacaacgacgtctcgcgtgtttgggaggtgatgtaccagaatgtcgccaaggccaacaacatcatcaagatggtccccgacatgaaactggatcagggatacaaaagccaagccgtaggcaccgcctatttcttccgcggtttctcgatgctctggatggtcccctactacggcgacgacaccaacggcggcattccgatcatcctcgacacgactcccgccgccgaaatcgactccccgcgtccggcgcacgtactgcagaactacgaccagatcatctccgacatgcgcacggcaggcgagatgcttccctacctttcgcagctcgacgcctcgcagatcggacttccgcacaaggccgcagcttggggatacgcagcccgcgcagccctctatgcagcgcagtacgacgcgaaatactacgacatcgtactggagatgtgcaacaagatcatggcgcttaccggttcggacaaacgcgaactctacatcgatccgtctaacaagctcaactcgtacgccaacctctggcgcaaggagcagaaccactccaaggagtacatcttctcgctggaaggcgactataccaacggtgcccgctaccacggcgtaactttcgtcaacgcaggctggggcctctacaacacgtgggggtatttcacgccgagcaagaatttgtgggatgcgttcgaagagggcgaccagcgccgcgacgtaacgatcctctatccgggccagcacgtcaaattcgtaggccgtgacatcaccttcggcggttacaacaccgacggaagcgtctcggactacacgaccggccacgtatcggcaggtctgatctgccgcaagttcatctccccgtgggaaggcgccgactgcaagggcaaagaggtgtccgcgctgcgcgacaaactctggaactcgctcaactgctgcctgctgcgctatgccgacgtgatgctgatgaaggccgaagccctgatctggaccaaaggcgagggcgacgccgaggccaagcagctgctcaaccagatccgcgaccgtgcaggtctgccgcagaacagtcaggccaccaaggcccagctgatgaacgagcgccgctgcgagctggccttcgagttccagcccagccgccatatcgacgtagtccgctggggcatcgccacgacgacctacgccaagccgctgtacagcgtcatttcgaagaaggtcaacggccagatcgttgccgaagaggtggaagtttatccgggccgcaccttcaatccgacttacaacaaggtgttccccattccgcagcgggcattcaccggcacggtctacctgaagcagaacaagggttattaaaccatatttaagaacagaaacgattatgaaaatcaacaaatatatcctcggagcaggcgcactgctctgcatgatgctcccggccgcgtcggcacaggcacaggacgtcaagctgaagtgcatggagtggaacatcaagtcgttcgaatacgacgacaactccaatgcagtctatttcgaaatcgccgaggccatggaaaagatcaaggctgaaaaccccgacatcgtctgcttcaacgagttcgaaaccgcgaccggacgcatgagttcggtcgagaagctgaccgaatgcgcacagtcgctcggcatgttcccgttcttcgtcttctcctacaacaaggacaacggcgcctacggcaacggcattctgtcgaaatacccgatcgtcaattcggcttcggtactgctgggcatgtacaccggcgccgaccagcgttcggcgggctgggcagacattctggttccgaccgactccaaacccgaaggggtgaaggtgcgcatcgtctgcacccacctcgacgctttcggcggcgacgagacctgcttgggtcaggccaaagaggtcatcgaacacgcgatcgctccggccgttgccgaaaacatccccgtgctgatcatgggcgatatgaactgcggtcccagctccagcgcaatccgcgagtatgagaagacgggcacccggctctgcaacaacgacggcacgttcggcggttacagcaagttggactacttcatcagcttcccgcagggcaaatggagctgcagcgactacaaagtcgtcaagggcgaccggctcaatgtcatttcggaccactaccccatcgcaggcacggccgtactgaagaattaagcgcgtatcaaacagctaaaaaagtacagagatgaaaaacacgaagagatatttatccatttttctggcgctcgcccttgccgccccggtcttcacgggctgcgacaacggtctggacgagtacaagtcgggagagacgatcgctcccccttcggacaagttcaaagccgaaatccagttcgtatcgcgtctgaccgacggagcgctggccggcagcgatgcggattacgccgccatcgacaactacatggtcaatacgctcgaaggccgcggcaagtcgtggctgacggtgctggaccgcgccgacggcgccaaccagcccaaaacgatgcagacggccctcaacaccaagcgttggacggcgttcgcattcaaccgtatcgccaacaagagctcctatcagggcagcatgctctatttcaacggtcccacgaccgaggtcaagggcactccctccggttcgggatgctacgtcacaggtttcgcaccgacgctcaacggcacccgcaccgacaaggacgaggacggcaacgtcacgggaacgaccaacgtatcattcgccatcagcttcaacacggcgcgtttcgaaaatgccgaccagatcaacgctttcggcggcaagaacggcgtgctgagcggactccactacaagaagcagaacctgctgatgatcggcaccgtgaaaaacgacctgctcggcgcgctgcagtccgcagccgcgaatacgaacgaggcgattcaggtccgcgaaatcgtgaaaggcccggcctatacgatcttcatgctggccgactcgcgcttctggggctatgtcgacgtcgcttcgacctcgctcggcaacggcatcgaagcatacggcatccatgtgatgtggtagtatcccaccgactccctgcagcagcggcgcaccgaaagtgcgccgctctttttgcgataaatccgggaataatccatacctttgcggaggaaatacgaaacgcatgaaaaaaatcaacgtcataacgctgggctgttcgaaaaacaccgtggacagcgagcacctgatggcccggctcgccgcggcgggttacgcggtgctcttcgacagcgaccgcaccgacgccaaggtcgtcgtgatcaacacctgcggattcatcggcgacgccaagcaggagtcgatcgacatgatcctgcgggcggccgcggccaaaaacgccggcaagatcgaacggctgttcgtcgtcggctgtctctcggaacgctacgccgacgagctgcgggccgaactgcccgaagtggacgaattcttcggcgcccgcacgtgggacggcatcgtccgggcgctgggcgcggtcgaagacccggcgctggagaccgagcggcacctgaccacgccgaagcattacgcctacctgaaaatctccgagggctgcaactggaaatgcggctactgcgccattccgctcatccgcggaggacatgtctccgtcccgatggagaggctcgaagaggaagcccgcaaactcgcggccggcggcgtgaaggagctgatcgtgatcgcgcaggatacgacctactacggactcgacctctacggccggcggatgctggccgaactgcttcgccggctctgccgcatcggaggcatcgagtggatacgcctgcactacgcctatcccacggcattccccgacgaggtgatcgaagtcatggcctcggaacccaaaatctgcaagtacctcgacattccgttccagcacatctccgacgcccagctttcggccatgcagcggcgccacaccaaagccgacgcctatgcgctgatcggacgcctgcgcgaagccatcccc

SEQ ID NO: 326 - DNA, 11322 bp, unidentified
  source 1..11322: mol_type = unassigned DNA
tcatactatctcacctgccgtttcccgatagatttcaaagaacttatcctcaagtggcatttccgccgtcacatgggaaagcgtgtcacacaaaaccatttttccgttgatgataatgccgacacggtcgcagatcttttcgatcagtgaaaaaatatgtgttgatacaatgatcgtttttccttctgctttcaattcctgcagaaaatcggtcacaaccttcgccgtgataacatcaagtccgtttgtcggctcatcaaaaataatgatctgcggatcatgcaccagtgaaatgatcagggatactttttgtttcataccagtggagagatttgcaaccttcacttccgcaaactcatccacaccaaatttctgaaacaggatacgttttctctcatcccgctctgcctgatcgacaccgtataattctgagaaaaaatcaaacagatagttcggagtaaaaaattcttccagttttaattcactcgtcagaaatccgatctttttccgaacaccgttcggatctgtcacaatactgcttccgtcaatcagagcatcacctttatccggtttgatcagcgttgctaacatgcgaagcgttgttgtctttcccgctccattgggccctaataatccaaaaacttcccccctgtaagtacaaaaggaaagatcatccaccgcaaccttaactttttccattgtcttttctaatttctgctgtttttttgacaagtgaaatgtcttggataatccactgactgtcaataactcttccataaccctctccattaaaaatttctatatcatgatcgtgatctacactcgcttcgctcggcagtcttattatatcgttccgtcatccatactgtcttcaatatcatcatagatatcatcgtaaatatgatcatagatgtcattatagctgctataagatccaagtcctgtaaaaaaaatcaggatatacagaataatcgatgctgcaaaaccgattccacctgtgatcaaaccaacgatcgccattccttttttgtttccttttacaagctgtatgataccaaaaataatcgcaagaataccggtgatccagctgatacaggtacagaacagcaaaaccgtaatgattccaagtactaacgacgcaataccaaagccttcactttctgacttattacttccatacctgccagccggttgtccgtaattatattctgtacttccgtttgactgtccatagttataacctgcactgtcatttgactgtccgtaattataatttgtattgccgtttccatatgacgtatttgtataatacggattgtctgtcatagtcttttctgaatttacacgctcttcatttccggtcacagtcttctctaaatttacacctgctgtaccatcagtcgtacttttctccaggctgacaggatttccctgatttacattcggctcatcatttccataattccagttattttcttcactcatactctcactacctcttaattaaatccgaccactttctgtgacagtcgatatgccgcaaccgaaatctttctgcctcccttgcccggcagattcattgcatttcccataattccggcgcgcagatgatggaataaacggatgtcttgatccttaatatatttccacagttcacgttttttcagaagattttcctcagtgccggagcggatcagcataatcgtggaaatgaccgtgatgatttccagataattaaacatgtaatgacgcagttttcggtttggaatcttccagagatcaaattcatctaccataatcttatttacattgatctgctggtcgatacggctgatcatcactttctcattgaccgactgatcttccctgccaataaagtaacggtaaaaatctacatccatataatacagtgtttttacacttggtaatggtttgtacacataaatattatccacataaaatgtatgtttcggcaactctaatccacattcacgcagcagttttgtacgataaatcacagaatgcatcaaaatgtactgaccctttctgaaacgtgacacatcattccaggtaaaaatctgattttggggcaggttcgtgtagtgcatcacttttttatgatgcgcaccttctttttcatatacataattggcaataaacatatccagggtctgattgccgccggtcagctcacgaagtttatctaaaatcttcttataagcctcctcatctacccagtcatcgctgtctaccactttaaaataaagtcctgtcgcattgcggattccagcattgacagcctctccgtgtcctccatttacctgatggattgcacggatgattcccggatatttcttctcataggcatctgctatgtcaccggtgctgtcttttgacccatcatcaatgatcaggatctcaacatcatcgccacccggtagcagggatttgatacagttttccatgtaatcctgtgaattgtaacacgggatcgcaaatgtcagtaatttcatatatgaatcctccgattatctttttgtattttctgccatgatcgcatcagcaagttccatcgcctttttcgtcatcgcatcgatattatagtatttgtattctgccagtcgtccgagcagataaaaatgcggcagtccacctgcaagcgcatgatatttttcatagagttcctggttctttggctctaatatcgcatagtaaggaatttctccctccgctcctgtgtaggcaaacggatactctttcacgattgtggttccgtccgtgttcttttgtccggtcagatacttaaactctgtgattcttgtaaaatcctcactgaccgtgtaattgaccacgctgtgtccctgataagattctttctcataatgttcaaagtcaaatcttaaggaacgatatggaagccttccaaactgacagtcaaacaactcatccagtgcgcccgtatagataacctctccgtcaaacggtgttccatcaaaataaatctgattttcttcaaaacgtaatctctctttacagtcaacacctgtctcaaccgtgatgttctcatggtctaacatgcgctcaaacatcggtgtgaaaccttccttcggcactccctgatatttgtcctgaaaatagcggttgtcataagaaaccagcaccggcacacggcctgtcacttccgggctgatatcctccggtttttgtccccactgcttcatggtatattttaaaaatacattttcgtacacaaactgtgcgatctcgcggatgtccggatcttcattttcccgcagtttcatgatcggcacgcggcttccctctccgtatgcagcaatcagtttctgctctaatgcatctgctttttccttttcatataccatatgaagcgtatttaaattaaacggaaccgggatcagacgatccccgacctttgctaccacctcatgtccgaatgcataccagtccgtaaatcttgagagatactgatatacttcttctattcctgtatgaaaaatatgtggtccataattatgtattaatattccatgttcatccggctcatcatagcagttacctccgatatgactgcgtctctctaaaaccagtactttctttcctgcttcctctgcaagctttctcgcactgacagcacccgcaattcctgcgccgatcacgatacaatcgtacatgtaatcctccttgttttgcggagcaaaatccgagtccattgacgaggagaggattttcctccttgttttccactttgttttaccatagccattctattatacacattttcctaccgcaaaccaatcaaatttttctttagatattcttaatttctgccaaagtatgtagttgttcatattttatttacataattctcacaaacagggcatacggcggtcacaattccccgatatactaaattcaaagttaaggcaacaagttaaaatttttcatagaactttttttcatacctgatgtaagtcaggtagccttgcttatccgataagcaaggttcctcccagcaaatagtgaattacttcacttttcatacacactctttttcataatgaatagccggtgctgttgcaccggctccctctttttataaatattttcttttaagctttcttttcatttccaagaagaatgttcatatatttcgcatacgcagcaaaagcggacggaatagcatatttttcttttgcatcttctgcttccacaaataataatccatctgcacgatttttttcacactgcacctgtggatgcatttccggctcctctacacggactgcataacctgtcatgtgccattcgatatgggaaaaaatatgtttcgcctcacctaacggctgaatacggatcggtgcataccccatctcttttaccatggaaagtacttcctcctgtcccatatttccttccacattcggaagctcatacagtcctgccaaaagtccctttgccggtcttttccggattgcaaccttctcatcatcccttaaaatcagaaccgtttttttctcgatctttcgcggttttgccttgctcttgactggtatctgtccgatcagttcctgtttttttgcctcacaaaaatccttccatggacattcggtacaaagcggtgcaccgtttggcacacagatcgttgctccaagttccatgagtgcctggttaaacgcaccggcaagattctgatgatatacctttgccctcagatcatctgcatcctccatccatggaaatacatttttttcatttctgccgtctgccccatgcatcaatttttctaataatttttccatctcattacggaatgactgtttcatgatatccgtatcatccgcagaaacgcgcgttaaaacacggagcacatttccatcgaccgccggaaccgggattccgtatgcgatagatgcgaccgctcccgctgtataatggccgatcccctttagtttcaacagtttctcataatctgccggaagttgtccaccataattttccacaacttccacagccgctttttgcatgttcctgacacggttataataacctaacccctcccaaagctttaaaagttcatcctccggacacactgcaagtgcctttgcatccggcagtgccgtggtaaaccgctcaaaatacggctttaccgcctccactctcgtctgctggagcatgatctccgaaacccacacccggtatggagtcggttcctctcgccatggcaatacacgggcatgatttaaaaaccattgcaataatggggatacaagttgctttaagtcgtaatcttttaacatgtatgtctcaaactttctttgttatatagcagccttcatgtctgcgcttatttttttcaaaccagtaccttatttgaggtcaaactggctgacaaatactgcgatcttctctaaacatttcttaataatgtctttggaataagcataagagcagcggatgtaaccctctgcacaacttccaaatgcgtctcccggaatgactgccaccttctgttcctgcagcagacggttacaaaattccatgctggtaagtcctgtttttttgatcgacgggaatacataaaatgcaccttccggttctgtcacatccagtcccatattccggaacccgtccaccatgatctttcgtctctcatcgtattctttacgcatcacatcgatctcttcgtcacgaaccggactcgtcagtgcttcaagcgccgccacctgtgacgttgttcctgcagacatggtcgtaaactgatgaatcttattcatatgaaaaataacttccgcaggacccgctgcaatacccatacgccatccggtcattgcaaatgcttttgaaaaaccatttaataccacacaacgctcatacatatccggcagcgccgcaatagatgcatgctttttgccataggtcagctctgcataaatctcatctgtaatcacaaaaatatcatgtgcggtcacaacctcacggattgcttctaaatcctctttttccatgatcgctccggtagggttgttggggaatgagatcagcagtacttttgttttatctgtaattttttcttcaagttcttccttcgtcaggcggaatttattctctgcctttaacgggatggaaaccggaatgccgccacacaattccacacacggaatataggaaacatagcaaggttctacaactaacacctcatcccccggatccaccagtgcacgaagcgccagatcgattccctcactcgcccccattgtgatcagaatttcattttccctgtcataatgaagtccaaacttttccagatactctgcagatgccgcacggagttcgaccgtaccgcgattatcggtatactttgtctcacctcttttgattgaagcaatcgctgcctccctgacatgttccggtgtcggaaaatccggctcgccgacaccaagtgacaatgctccctccatcgtatttgcaatatcaaaaaagtccttgatccctgaatccggcatctcctttactaccttagataagtatgatttgcttgtgtccatggtttttcctcttttctgtgtctttgtcaaagtatcataccacctatcatagcactttttctaccaaatttatagtgaatttttcccataatctattgacaaattcagggaaaagctgtacgctattaataacgtatattgttaattttttatcaaactattcaggagggttccaaacgatgagcgattttaacaatttaaaactggaagttgctgaggagattgctgttcttacaatttcaagaccagcagcattaaacgcattaaacagcgagacattagacgagttaaacacagcattaactgagatcgaagcaagagacgacatcaaagtcgtaatcttaaccggcggtcctgacaagaaaggcaacgaattcaaatctttcgtagcaggcgctgatatttctgagatggtaaactttaccgcagcagaagcaagagctttcggtatgagagcttccgtaccattcttcaaattaatgaacatgcgtcaggtaacgatcgcagctgttaatggttttgcacttggcggtggatgtgaaatttccatggcatgtgatatccgtatcgcatctgacaacgctactttcgcacagccagagacaggtcttggaatcattcctggattcggcggtacacaaagacttgcccgtttagtaggcatgggacgcgcaaaagagatgatctttacctgcgattccgttgatgcagcagaagcttaccgcatcggtcttgttaataaagtagttgctccggaagagttaatgaacacagcaaaagctatggctaagaaaatcatctccaaaggaagctacgctgtttccgttgcaaaagcagcaatcaacaacggttatgatatggacatcaagaacgctgttgagatggaagcaaacttattcggcgtaacctgctctactcatgacaaaacagaaggtatgactgctttcttagagagaagagctgctgatttaacagatttctaaaaaaacatatcaaaaaaacgggctgataattcagtccgttttttttgatatactcatattccaaatttaatgtgcaggtaatctctgattacctctacgcatttttcacgcccccatcaaaaccgacaccaccggcatcgtcaccgcagcaagaattgccgtaagcgcaactcctcttgccgccagatcataatttccatcatactgctgtcatactgccgacaggcgttgcgagcatgaccatacacacgcctaaaatcatcggatcatcaacaaactgctttatgatccatgtgcctgcaatcaaaaaaagcgtcagaaccctcttagttccaacgcctttgtcaataatttttatcatttgtatgtaatatagtcgatagctatatttttgtcaatatcccgctgtttctatatttcagtggagaaatgccatatgtttttttgaaacttctgataaaatagcttacattctggtatccgctctgcatagctgtctccgtcactgaaagatcggtgtcctgtaacaactgttttgcattctccaaacgtaaatatgttatatattgcgacaatgtaatatggaaatgttccttaaaataccgcgatatatatttttccgaaagatgaaactgttccccaaattcctttagcgatatctttcctgtaaaattctgctgtatatatgaaaccatctctttttctacaatatttctgccgcttgtatcattttctattacaaatcctttcttccacatttcaagaataaattgtaaaagaattatttttgtctttatctgcgcagttatttttgactcagtttcatcattttctgccatatatatatcaatcagctgctcacacagttcttttgccgagtcttttactcttgggtttatcatcaaatgaccgctatttaatggttcaagcaatttatcatctaacatgtcatcggtccgaaaagatatatattttaacggaaacaaaaatgtaaaataatccacagtgccggtctgtgagcccataagatgcagattgcccggcgatacaacgaacgcatcccctgcttttccaatataactctctcctgatatacttaccgtcagcaaaccactttttacatatataatctcaagttcatcatgccaatgtaccggtatctgaaatgaccgccccgcattctctatgtgatatatactaaatggattgtcctttgtgccatgtggtttattttcctttaattcaaagtacatactctctcctacaattctacaaggctcttgcttttccattttccgctcttccatctaagcaccattccaacagctctcgcgcactcatcacctgccatggcaatatatgctcctactgcctgaagtcccatatgtattccaagaaaatatgttccaccaactgcaaacagatacataaatatcgcacccattataaccggaaaaaccgcatctccactggtttttaatgcctgaccatatacaagatttgtcacccttccaaattcaaggaatatatctactattaacagccttaccacaagatttatcatttgcgcatcatccgtaaatatatgaactataaaatgtccggacatcgcaaatgtcacagagaagcacgtcgctgttataagaccatataccacagctttccgcgtacccctgtcacattcttcaaactcctttgatccaattctccagccagtcataatagcattagcctgtgcaagtgcagctcctatacaatacgaaaaatttgctatctgcatagcatatgaacgggctgtaacattcattccgactgcatccatctgattcatgaatcttactataagcgtcattgcaacattataaagtgctgtttcaaatgcagaaggaaaacctatcttaacaatctgcgcaagtatcttccgtggcggaatgcgctccggactctgctttgcctttatcagtacagcacccatgcctgctacaatgataaggttcacaacttttgaaataactgtggcaatagcaacgcccattactccccaatgaaatacaaacaggaacactgaattaaatattatattaatggcatttcctgcaatcgttcctatcaaggaatgctttgtatatccaaacactctgagatagctggaaaaaatgggaataagcgcatttaaaacacatgcacctccaacaattttaaggtatgtttctgccggctcaagcaaagccggagaaatacttacgattctaagtatttctccagaaaaaaaggcaataataaccgacataaggatacctgtcagtgcgttaaacataagtccaagctgtctggcctgatatgcaattccaggtctccccgctccgatattttgtgacataactgctaccataccggatgatattaccccgaacatgatgataaaaacacttatatacgtatttgctgttccgacagctcccacagcctggtcgcttacagacgataacataagtgtatcgaccatgcctgaaagcatataaaataaagtctctaagcatattggcacagccagctgtgtcaatgtttttctttcagttgccatgtttttctcctatgaaaactaatataacatacattatcaataatatggtatttttctgcatatttcttgtataatattatgcaaaaattgcattatttctacttatttacgaagtgaatcagcaagtctgttaattttgccctgatctgcattatcataggaaaatattttatgattccacattctcatctctgcataaaatgttgacgtttccccccaaatagactaggatagaatttgaatgataaatacgcaaaacaaggaggaaaatcctctgctcctgcaatggcagtcgcattttgctccgcaaaacaaggagggaaatcctctgctcctgcaatggcagtcgcattttgctccgcaaaacaaggaggattttatgttagataaaatgattggttttatcggtgccggcaatatgggaagcgccatgatcggcggtattctggatgcatctttagtgacgaccagccagatcatcgcaagtgcacactctcctgagacacttgataagatccggacaaaattttccatagagacaacccagtcaaacgaggtcgttgcagaacgaagcgatattttgtttctcgctgtaaaaccaaataaattttccgaagtacttccgcagatcaaaggtcatttaaaaccggactgtatcgtagtttcgattgcagccggacagccgatcgcaaatatcgaggcgctgctcggtgaggtcagactgatccgcgccatgccaaacaccccggcgcttgtaggcgctgcgatgagtgcactctgtccgaatgacaaggtaacaccagaggaagtaaagctcgttgagtccttattcaacagcttcggccgtgcagaagttgtaccggaaagcatgatggatgccgttgtcggcgtttccggttcttcccctgcctatgtctatatgtttattgaggcaatggcagacgccgccgttgcagacggcatgccgcgcgcacaggcttataaatttgctgcccagtctgttttgggcgccgcaaaaatggtattagagaccggaaagcatccgggcgaattaaaagatgctgtctgctctccgggcggtacgaccattgaggcagttgcagctttagaacatggcggtttccgtgatactgtgatcagtgcacagcgcgcatgttctaaaaaatcatatgatatgagtcaaaaataa

SEQ ID NO: 327 - DNA, 14853 bp, unidentified
  source 1..14853: mol_type = unassigned DNA
  misc_difference 10: note = a, c, g, or t
  misc_difference 11: note = a, c, g, or t
  misc_difference 12: note = a, c, g, or t
  misc_difference 13: note = a, c, g, or t
  misc_difference 14: note = a, c, g, or t
  misc_difference 15: note = a, c, g, or t
  misc_difference 16: note = a, c, g, or t
  misc_difference 17: note = a, c, g, or t
  misc_difference 18: note = a, c, g, or t
  misc_difference 19: note = a, c, g, or t
  misc_difference 20: note = a, c, g, or t
  misc_difference 21: note = a, c, g, or t
  misc_difference 22: note = a, c, g, or t
  misc_difference 23: note = a, c, g, or t
  misc_difference 24: note = a, c, g, or t
  misc_difference 25: note = a, c, g, or t
  misc_difference 26: note = a, c, g, or t
  misc_difference 27: note = a, c, g, or t
  misc_difference 28: note = a, c, g, or t
  misc_difference 29: note = a, c, g, or t
  misc_difference 30: note = a, c, g, or t
  misc_difference 31: note = a, c, g, or t
  misc_difference 32: note = a, c, g, or t
  misc_difference 33: note = a, c, g, or t
  misc_difference 34: note = a, c, g, or t
  misc_difference 35: note = a, c, g, or t
  misc_difference 36: note = a, c, g, or t
  misc_difference 37: note = a, c, g, or t
  misc_difference 38: note = a, c, g, or t
  misc_difference 39: note = a, c, g, or t
  misc_difference 40: note = a, c, g, or t
  misc_difference 41: note = a, c, g, or t
  misc_difference 42: note = a, c, g, or t
  misc_difference 43: note = a, c, g, or t
  misc_difference 44: note = a, c, g, or t
  misc_difference 45: note = a, c, g, or t
  misc_difference 46: note = a, c, g, or t
  misc_difference 47: note = a, c, g, or t
  misc_difference 48: note = a, c, g, or t
  misc_difference 49: note = a, c, g, or t
  misc_difference 50: note = a, c, g, or t
  misc_difference 51: note = a, c, g, or t
  misc_difference 52: note = a, c, g, or t
  misc_difference 53: note = a, c, g, or t
  misc_difference 54: note = a, c, g, or t
  misc_difference 55: note = a, c, g, or t
  misc_difference 56: note = a, c, g, or t
  misc_difference 57: note = a, c, g, or t
  misc_difference 58: note = a, c, g, or t
  misc_difference 59: note = a, c, g, or t
  misc_difference 60: note = a, c, g, or t
  misc_difference 61: note = a, c, g, or t
  misc_difference 62: note = a, c, g, or t
  misc_difference 63: note = a, c, g, or t
  misc_difference 64: note = a, c, g, or t
  misc_difference 65: note = a, c, g, or t
  misc_difference 66: note = a, c, g, or t
  misc_difference 67: note = a, c, g, or t
  misc_difference 68: note = a, c, g, or t
  misc_difference 69: note = a, c, g, or t
  misc_difference 70: note = a, c, g, or t
  misc_difference 71: note = a, c, g, or t
  misc_difference 72: note = a, c, g, or t
  misc_difference 73: note = a, c, g, or t
  misc_difference 74: note = a, c, g, or t
  misc_difference 75: note = a, c, g, or t
  misc_difference 76: note = a, c, g, or t
  misc_difference 77: note = a, c, g, or t
  misc_difference 78: note = a, c, g, or t
  misc_difference 79: note = a, c, g, or t
  misc_difference 80: note = a, c, g, or t
  misc_difference 81: note = a, c, g, or t
  misc_difference 82: note = a, c, g, or t
  misc_difference 83: note = a, c, g, or t
  misc_difference 84: note = a, c, g, or t
  misc_difference 85: note = a, c, g, or t
  misc_difference 86: note = a, c, g, or t
  misc_difference 87: note = a, c, g, or t
  misc_difference 88: note = a, c, g, or t
  misc_difference 89: note = a, c, g, or t
  misc_difference 90: note = a, c, g, or t
  misc_difference 91: note = a, c, g, or t
  misc_difference 92: note = a, c, g, or t
  misc_difference 93: note = a, c, g, or t
  misc_difference 94: note = a, c, g, or t
  misc_difference 95: note = a, c, g, or t
  misc_difference 96: note = a, c, g, or t
  misc_difference 97: note = a, c, g, or t
  misc_difference 98: note = a, c, g, or t
  misc_difference 99: note = a, c, g, or t
  misc_difference 100: note = a, c, g, or t
  misc_difference 101: note = a, c, g, or t
  misc_difference 102: note = a, c, g, or t
  misc_difference 103: note = a, c, g, or t
  misc_difference 104: note = a, c, g, or t
  misc_difference 105: note = a, c, g, or t
  misc_difference 106: note = a, c, g, or t
  misc_difference 107: note = a, c, g, or t
  misc_difference 108: note = a, c, g, or t
  misc_difference 109: note = a, c, g, or t
cattattaannnnnnnnnnnnnnnnnnnnnnnnnnnnnnnnnnnnnnnnnnnnnnnnnnnnnnnnnnnnnnnnnnnnnnnnnnnnnnnnnnnnnnnnnnnnnnnnnnnnggcatagaaaaagcccggaaaatggcgtatttccgggcttttttagcattattaagctgtagattatcgcttgctgaactgcggagcgcgacgagcggctttgaggccgtacttcttacgctccttcatacgaggatcgcgggtcaggaagccagccttcttcagcacaggacggttctcgtcgctctgctgcagcagggcgcggctcaggccgtgacggatagcgccagcctgaccggaaacaccgccgccggaaacgcggacgacgacgtcgtacttgccctccaggcccagcaggaccagcggagaacggacgatcagcttcagggtctccagaccgaagtagttgtcgatatcacgatcgttgatggtgatcttaccggtgccggtgtaaacgcgaacgcgggcaacggaatccttacgacgaccagtgccgtagaaataaggtttggtttcgtacatattcgattgcctccttcttagaactcgatcttctcgggcttctgagcagcgtgagcgtgctcggcaccctggtagcagtgcaggcgggtcagagccttatcaccgatggtgttggaagggatcatgcccttgatagcgtaggtcatagccagatcgctgttctcagccatcagcttgctgtactggaccttcttcaggccgccgatgtacttgctgtgggtgatgtggaacttctgctcggccttcttgccggtcagaacagccttgtcgcagttgatgacaaccacgaaatcgccgcagtccacgttgggggtgtaatcgaccttctgcttgccgcgcagcagaacagcggcctcagcagcgacgtggcccaggctcttgccggtagcgtcgagcaggtaccacttacgctcgacttcagcgggctttacgagagtagtgctcatatctatttcctcctgataagctttttgtacgtttcaggcacccttttggggcgcgagtgtcagtatacaacacaaaaacgcgcctgtcaacatgatttttggattttttcggcggaaatttttgaacctctcaaaatcgcttgttttctctcaaatcctctcgattcctgaattccgatttttgtaaaagttttttgcccgccccggcatatttttgccatttgcccgctacaaatcccgctgcggttgtggtatactataaaggatatgggcggtgcacagctgcccttgccaacacaaggagaacacatccatgccaaatgagatcgaccgcacttcttcggcgcagcgccgcagctccaagctgctgacggcgatggccattttcatctgtctgggcatcgcagcctacatggtgctcaccctgctggtgaaccggcagacccccgcgacgcctgacacccactataccggcacgaatggcatctctgtctactacgacagcagcgtgtggagcgtgtgccgcatgaccgaggacgcaacccttggcaccgtgctggagctggctaccgccgacacggcagacagcgaggactatcaggccgtgctgttgcagcggggcaccgccgacagctacgaaagctttatcgaggactcggaagccgacctcaagcaggcctacggcgtcatcaagccccgcaaggtcaacctgaccgtggagggtgcagcggtggaagcggtgcgctgcgatatccgcacctactacgccgtgctggccaccatcacctacgacagcggcgatgtggtctatgtctcggcgctgacaaagctggcgtccatcagcgatgtggtcaatctggtagaaagcgtgagcctgtcatgagcgaccttcgtgcaatgcagcggctctgcggtctgatgcgcaaggccgtacaggactatgaaatgattgcccccggcgaccgggtgatggtgggcgtttccggcggcaaggacagcgtggcgctgaccatcggtctttccatgctgcgcaagtatatcggcttcgattacgaggtggtggcggtcacgctggacccgcagttcgaccatcagcccatggactactccgcgctggcagagctgttccggcagcacggcatcccctacgaggtgcgccgcaccgagatcggccctgtggtgttcgagtaccgcaaggagaagaacccctgcgccctgtgtgccaagctgcggcggggtgcgctgcacaccgccgcgcaggagctgggctgcaacaaggtggcgctggggcatcatctggacgatgccgtggagaccttttatatgaacctctggcgggagggacgcatcggctgcttctcgccggtgacctacctctcacagcgggatctcaccctcatccgccccatgctgctggcaaccgagtacgaggtgcagtgcgccgtgcgggaggcggacttgcccatcgtgaaaagccgctgccccgccgacggcgttaccgtgcgggaacagaccaaagaatttgtgcaggagcgctgccgcaccgaccacgccttccgccaaaagactctccatgccttgcaggagagcggcattgacggctggcgtcccgtccacacgggccggggcagctttatcgtaccaaaaaaggaaacagatcatgcagaaacaaccgtttgaaaaacacgtctgggccgagatcgacctcgaggcccttcggtataatttccgggcagtaaaggcccgggcagggacgctgcccctgtgcgcagtggtcaaggcggacagctacggccacggcgcggtacagtgcgcccgggtgttcgccgaggagggcgccgcatggctggcggtcagctgcctgaccgaggctgtgcagctgcgcaaggcggggcagactttgcccatcctcattctggggcatgtgcagcccgcctacgccgccgctctgatccagaacgacatcactgtggcctgctactcccttgcgcaggcacacgccctgagcgaagccgccgtggcggcaggcggcagggtacacatccacctcaaggccgacaccggcatgggacgcatcggctttgccctgcgcaccgattttgacgccgccatccgggagatgctggaggcttgtgcgctgcccgggctggaaatgaccggcctgttccagcatttttccgtggccgatgataccgccccggagaatgtggcctacaccgccgagcagcacgcactgttcgtgaaagccttccacgcactgaaggccgccgggcgggagcctgcccttgtgcactgcgataactctgccggggtcatgctgcacccggactggccggagggactgccccgggagcgctgcatggcgcgccccggcatcatcctgtacggctacgaccccagcgacgaggtgcgctttggccgctttaagccggtaatgacccttaagaccgtggtgagcatgatcaaggagatgcagcccggccagtgcgccagctacggccgccgctttaccgccgaaaagcccaccaaggtagccaccctttgcaccggctatgccgacggctatccccggcttttgagctgcggcaagggcgtggtggagatccacggcaaagcctgcccggtactgggccgggtgtgcatggatcagatgatggtggacgtgaccgatgtaccggaagtgcgcgaggacgatgaagccatcctgtggggcggcaccgtaagcgacaccgcagagaccattgcccgcaagaccgacaccatcccctatgaagtgctgtgcggcgtttcccgccgcgtgccccgcgtctaccgcgaccacggacagatcgtggccgtggaggactggatcttagaagcataaagctgcccggaggaactacatggcaagagacaacatccgcaacttctgcatcattgcacatatcgaccacggcaaatccaccctgtccgaccgcattctggaactgaccaagagcgtggacgagcgcaccatggaagaccagatcttggacaacatggatatcgagcgcgagcgcggcatcaccatcaaggcgcgtgccgtgaccatgaactatactgcaaaggacggcaagacctacgagttcaacctgatcgacaccccgggtcatgtggactttgcctacgaggtcagccgcagtctggccgcctgcgagggcgccattctggtggtggacgccacgcagggcgtggaagcgcagacgctggccaacacctatatggccttggagcacgatctggagctggtgcccatcctgaacaagatcgacctgcccagcgcccacccggacgaggtggcgcaggaggtggaggacgtgatcggcctgccctgcatggacgcgccccgcgtctccgccaagactggcctgaatgtcgatcaggtgctggagcgtgtggtcagcgatatccccgcccccaccggcgacccggacgcccccttaaaggcgctgatcttcgacagcatctacgacagctacaagggcgtcatcgtctacatccgcgtgttcgagggctcggtgaagcccggcgacaccatccgcatgatggccaccggcgcagagttcacgctggtggaggtgggtcacatgggtgccacctccctgaccccctgcgcccagctgcaggccggtgaggtaggctacctgaccgccagcatcaagacggtgcaggacacccgcgtgggcgataccgtcacgctggcagagcgccccaccgcagaagcgctgcccggctaccgtcaggtcaagcccatggtgttctgcggcatctatcctgccgatggtgccaagtaccccgacctgaaggacgcactggaaaaattgcagctgaacgatgcctccctgacctttgagctggagaccagtgccgcactgggcttcggcttccgctgcggtttcttgggtctgctgcacatggagatcatcaccgagcgcctagagcgggagttcgatctggacatcatcaccaccacccccagcgtgcgctaccgcctgaccttgaccgacggcacggtggagatgatcgataacccttccagttacccggaccccagcaatatcgtcaagcaggaggagccctttgtggatgtgcacctgtacacgcccaacgactatgtgggcggcctgatggatctgtgccagagcaagcgcggcgtgctgatcgatatgaagtatctggatgatgtgcgggtggacctgcactacgcgctgccgctgggcgagatcgtgtacgacttctttgacgccatcaagagccgcagccggggctacgccagctatgactacgagttcaaggagtaccgcgagagcgatctggtcaagctggactttttgctcaacggcgaccccgtggacgcactgtccatgatcgtgttccgggacaacgcctacgccaagggacgccgcatctgcgaaaagctgcgggataacatcccgcgtaacctgttcgagatcccggtgcaggcagccatcggcggcaagatcattgcccgcgagacggtcaaggccatgcgcaaggacgtgctggccaagtgttacggcggcgatatctcccgtaaaaagaagctgctggaaaagcagaaggaaggcaaaaagaagatgcgtcagctgggcagcgtttccctgccgagcgaagcttttaccgccgtgctcaagctggacagcgacgacgattgatccgcaaatatgcaaaaagggatgctgcgctgcggcatcccttttttatgggaaactctcaaatgtgaaatccgctcatggcagagatgcactctttgctttttactctaaatatgttataatttattcatatatcagtttttgtatccgctcaattccattcccggcagaaaggatgtggcctttatcaaagcaaagcacggaaaaggcgcagcgcaaaacggcagacacagcggcagctgcgcacaggcgccggcttcccggtggaagcaggtgctgctgaccctgctgatctttattgctctgctcgccctgatcggcggggcgctgtggcagaatatctgctataaccgtacccactataccgcagagttttatcaggtgcattcccgcaagctgacccagagctgccgggtcgtttttctcaccgatgtacatctgcgggagtatgggcaggataactgcgagctggtgcaggatatccacagccttgccccggatctgatcctgctgggcggcgaccttgtgacctacggcgaaggctccaattacgacaatatgctctccctgtgcagtcagctgagcgagatcgcgccggtatgcggggtgctgggcaaccatgaggacgagctgtattttctggacggcgatcaggctttggtggaaaagttcaccgccgccggggtgaccatcctgcgcaatcaggaagcgcgctataccgtccgcgacaatgtcatcagcattctgggcgtggagggcagcccggaggacttttataattacggagcaagcacctttatggacagcgtggagccgcagacagactacgatctgcgcatctgtctggcacacgttcccacctactttcctgagcatctggaaaattattcctttgaactgggtctggccgggcacacccacggcggcatcgtccgtctgccgaagatcggcccgctttatagcgccgaggagggctttctgcccgactatgccggtggcagctatgggcttgccaacaacgccaccctcattgtaagccggggactgggcgattccagctgggtgccccgcatcaataacgtgccggagctttcggtcattgacatcgactaagcagtctgcaccgcgcgtgcaggccgctgaaaaagggtagaatgccatggatgacatcaaagaaaagatcaaacaggcgctgcgccatatctggatcaataaataccgtctgtttttctgcctgctgaccttgtgctgtctgttcgggctggttcactatttcaaaagtgcggacagcgccaccgccagcatctccttcaattactccgaggcggcgcttggcatgaaccccaacaagacccgcttcaacgcctacgagatcgtttcggacgaggtgatggaacgcgccatccggcgggtgggcttgcaggacagcctgactgcatctcagctggcggagtgtctctatctcagcccggaaggcaccggcagcgccaatggcagcgagtatatcagcaccaactactatctttccatcaatacccgcaaactggagcttggcagccgtaagcccatggatcttttgcagagcgtgtgcgaatcctaccgggagatctttcagagcagctactgcgacaaccagagcctgctgaaggaaaagctggaagtgaccaccgattgcgagccttacctgcggctgaacgagctggaggtgcgcgctgaggggctgaaccgctacctgaacacccgcctgcaggagaacaaaagctttacggacgatgcgaacccggattcctccaccaacaactttactacgatgggcaaaaagatcaacaatctggtggattacgatctgcccaatgccatggcctttgtgatcgaaggcggcgttgcccgggatccgtccatgctgaccagtattctggaatacaagaacaagatcgacgatattgccatgcgcaagaaacaagcctattatgatgcagacaaaaagggaatttccatctacgaaaaatccatgacttccatcatgatgatccccaccgtggatgaggacagcgaatactatatgtcccgtaccaagaccgccatggacgcgctggcgcgggcggcagatagtgccctgtccgatgccaccggttaccagaccgagatcgtgagcacgaattatgtgaaccagaagatccgggagctggatgccggacagccgcgtctggccgaagcacaggccatggtgaacaagctggaaaacgccatcaacgagatctcggaggagctgtttgtactggataaagcgtatatcaagtacaaatcccagaactatatcacctttagctatggcgcagtctccttcctgcagcgcctgagcctgaaaaagaccctgatggagtccgttgccgtcatgctgggcggcgcatggctgctccagcagcgcaaacgcagaaaggcaggaaaacgcaaatgaaaaagtttgagatcctgcgctatctgaagcgtttcagcatcctgatctttctggtgtcgctggcaggtgccgccgccatctatctgtatgcggatggcaagcaacagtacaccgcatcggtcatcatccgctataccaacgacggcatttccgacggctacaccccggacggcagcgatctggatgtcaacgagatctattcctccacggtcatctcgcaggccatggacgcgctgggcgcttccgggcggctgagcaccatccgctccaacatttcggtgaccccggtgatctcggacgagcagcagaccatcaatgatgcactgctggataagggcgaagaggtgacctatttccccgatacttacaaggtgagccttgtggtggacgggtcacagggtgcaggctacgcccgcaatatgctggatgccatcatccagagctactgtacctattatacggaaaaatatgtggagcagaagctttcgctcaacccatcctccggcttgctggacaacggctacgactactacgagtgcattcgcattctggaaaacgataccaatgagatgcaggcctatctgcagaacaagcaggaaagttacccggacttccgttcttcccgcaccggctacacctatgcagacctgtgcgatatctataccgatttcaaaaaatacaccattccggaactgtacgcctatgtgctcaatggcccgcaggtgcgggacggcacagtgctgcaggagtatctggccaactgcatcgagactgcaaagcagaccgaacagatcaccaccgagcagcgggacagtctgtggggactgacggatcagtatgtgtacaagaacgccgacctgctgaaaaactactttaccgaccggggcgaggtggtgtccgcagaatacatcctgaacaacatcgagctggagggcgcaggcgaaaaggcgcagaccacctacgacggtctggtgctgaaactggtgtcactggaacagcaggtggttgccagccagatcgaccggcagttccaggaggagatcctgcaaagcttccgcaatatggattttggcggcacggacgagcagcacgccaagatggaaagcctgatcaatgattacgagacagagctgaaaaaatactacgagatcatcaataccagcagcaaggaactgaacctgtacattagcgcggattatctgaagatgatcagctcggtgcaggtggctgccgctatcaacgtcaagctgtatctgatgctggcgctggtgctgttcttcgtcatcggctgctgcggtgccgttctgctgggccgtatctccgatatcgtggattatctgctgtatgtggacaaaaagaccgggctgcccaaccgcgaaaagctcaatgtttatatcagcagtatggcagaccgcatcctgccggaagattatacctgctttgctttgcagctggataatctgtccgatatgagccgccgcttcggctaccatgtaggcgatggcatcctgaaggatttttccggtctgctgcagctgatgggtgataccgacggcgtggttggctacaacggcgtgggcaagttccttgccttctttggtgagtgcagcagccggaaggcagaggtcatgatccgcatcctgcaaagtcaggtggacgagtacaacaagctgaacccggagtaccccatcctgttcaccgccgcatgggcgacctcctcggaggatgatatctataatgtgcgggatctggtgcgcacggcgcagaaaaagatgtccctgatcgcagaggagggcggctctgcccttgccgggatcgaaagaggtggcgtatgatccgcaaccgacgcgcttaccagttgatccaatgccgcacccacagccgtctgctggcgggtgctgccgccgtgtgcgccgccgcctgcggtcacgcagaccttgcgttgtaccatctgctgcaccggggcggtgcaccgctgccggacagcacacaggccgaccgtgctgcgctgacagcattgtgtccgaagcccgcagcggagggggaatgcccgccgctgccgccgcaggacccggcggtgacgctttcggtcatcgtgccggtgtataacggcgaagccaccattgctgcttgtctggacagcattttgcagcaggataccgactgcaccgtgcagctgatcgtggtggacagcgattccaccgatggtacagccgctgtgctggaacgctaccgggcacagcccggggtggtgctgtgcaattgcatcgcaccccgcagcgctgctgccgcccgcaacgaagggctgcgccatgccgtggggcgctggctgatgttcgtggacagcgatgatctgttattgcccggtgcaatccgtaccctgctggaggccgcacagcgccttgatgccgatgtggtgcagggcggctggcagtacctgtacacggatggtagctacggtccggtgcagtgctacccggcggcggtctacatcggtaacgctgcgccggagcgatttgagctgcccggaatgccatggggtaaaatctaccggcgggagctgtttgcacaggtgcgctttccggcttactatacctgctttgaggataccatcatccattttctggtgttccgtcaggcaaaagcagtggtctctgtgccggaggtcgtctacctgtggcgcaaaaaccccaagggacttaccgccaccagccagcaccgccctgcagccgtgcagagctactggatcatggagcagctgctggcgcaggatgccgcgctgggcttgccccacgatgccctgtaccgctgcagcctgacgctgcagctttcggctttttgctatgccaccatatctggattgccgcaggaaacgcagcaggccgttttccggctgtgctgcgcactgtatgccaaggcgctgccgcaggagagcgcactgccccgccgtgctcgctggggcacccgtgcgctgcggcagcaggactttgggctgtggtgccgctacggcagaagatttcagttgttataatgtgaggagtaccccatgatacgagtgctgcattcggtcagcaatatggaccgcggcgggatcgagaccatgctgatgaactactaccggcatatcgaccgcagcaaggttcagtttgattttatcgtcaacaagaaaaagcccggcgactacgatgacgagatccgccgtctgggcgggcacatctaccaaagcccgggacttgacccgctgcattacccggcgtatctgcgctttgtgcagcagactgtgaccgcagatccccgcatccgcatcctgcacgcccacaacgaggcgatggggctgtacgccctgaagggcgccgagaaggcggggctgcaagtgcgcattgcccatgcccataatatctggatcgtccgggactacaagtggccgctgaagatgttctgcaagcggctgctgcccggtgccgccacccacctgtgggcctgcggacgggatgcgggcatctactactttggaaaagcagactgggagcaccggggacagatcattcccaacgccatcgagccggagactttccggttcgactccgccgtccgcgccgaaatgcgggcgcgctacgggctggaagaccgggtggtgctgggccatgtaggacgctttgacgtccgcaagaaccacgagcgtctgctggagatctttgccgcctttttgcagctggagccccgggcgatgctggtgcttatcggcaccggcaggctggagcaggctgtccgcgcacaggcacagacactgggcatcacagaccatatcctgtttgccgggctgcaaagcaatgtggcagactggtaccagctgatggatctcttcgtcatgccttcccgcttcgagggtctgccggtggtgggcatcgaggcgcaggctgccgggctggggtgcgtattttcggacgcagtgccggaggaagtgctgctttcgccccacgccatccagatcccgctttctgccagcaatgcagactgggcggcaggcttgcagcggatgctccaacagccctgtgaccgttctgccggcatggcgctgatccggcaggcaggctacgatatcaacatcgccgctgcccgcttacagcagcagtacctgcaactgggagggcaggcgtaaccccccggcggctgcgggaacacccacaataaaaggagagcccttttcatgcgcacattggatcagatcctgaccaaaaaggattacagccggaaaactccggcctctttgttttataaggacagcccgctgtggcaaaaactgctgaccatcggttgcgtggtctttttggccggtgccgggctgggagagtggaaaccaatcaacagcgcagtgggcggccttcccaaagccatctctctgggggtgatcgggctggcaatgctgtacaccctgttttacccggacgaaaagcgtctccgggagttatggaagcctaccctgctttatatgtccctgatggcggcgctgtttttctggtcgatggtcatctggatcgaaagctttgccgcagtgtcttccatgatccgaagctgctccaagatcgtgttccagagtattgccatcctcactgccgtggcgctggtctatctgttccgggaaaaagccatcgagctgtttaccatcagtatctgcattgccaacacggccatcatgctgctgagcattcctggctacggttttgcagccagcatccagtctctcgttacctgtctgatcaccttcggtgatgcggatggctatgcgctgcagctggagattcacgacctgacctttgtgttcgggcagatgatcttgtactacgccgtttttgctcctcgtactacccggcaggaaaagcgcaagcgctggctgtatctgctgctctgctgctggttttttctggtcggcatgaagcgcatcgccatcccggcggtggttctgttcgtcctgatcgctctgcttctccgcaagcgcaaagtccccggctggttttacccggcagtgggcgtctgctgcatcctgttttttctggcattcctctactgtgtgcgctacggtgttatttcaaggttgctgaacagttttggcattgacatgatgggacgggactatctgtggagcatggcgaatccctactatgaattttctatcacctatatcggccgcggttttgaatatgtggacaccatcatcgcccagtggtataatgacgggctcatcaatcagccttaccccttccacaacgacatcctgaaggtctttgtagaggtaggctttccgggttttctgctctggtccagcatccagtatgttctgactccgctgttctggcagcgctatgcagaccaagagaccacgttgctgtatctgtccgagctaggctatatgacggtgacctacctgaccgataataccgccttttatttctggagcacgatggcgctgcgtctggtgacgcttgcctacgccatggagcgcaaaaagcccccggaacccaaggtgtggatgccggacagtcggcaggagatgcgggaccgcatccatattctgatgaaggaagtgtgacggcaaggagtgaaaacaatgccctgtatctcgtttatagtgcctgtttataatatggagcgcctgctgccccgggcgctgcgctcactgcgggcgcagactttgaccgacttcgaggccattctcatcaacgatggctccaaggacggcagcgccgcgctgtgtgcacaggctgctgccgaggatgcgcgctttcgcttcatcgaccagcccaacggcggcgtagccgctgcccgcaacgcgggtctggatgcagcccggggcgagtatatcttctttctggatccggatgactgggtagagccggatgcggcagaagtgctgtatcatgccgcccggaatgctgatgcggactgcgtggagtttgggctgtatctggacagctatgatgaaaatgaccggctgctgcacacgcagaccagcggcagcaccctctccggcgtgtaccggggcgcgcccttcaaggaacatttcgacgagacggcgtcctcgtatctggtcaccaataagctgttccgccgggcgtttctggagcagcatcagctgcgtttctcctgccatcagctgggggaggacgggctgttctttgtagccttttatcgtcaaaatcccggctgtctggtggtgctggaaaagccgctgtaccactacaccgctgcccggcggggcagcctgtccaacagctaccacccggagcgtctggaggataacttttatctcagcgatgcagtgtgggacaccgttgccgcgtggggcttacaggacagccccatgcaccgcgcaaaggcgagctactgcacgatccgcgacctgatgatgggaatcaagaatcttggatgcagcccgctttccctttccgagcagactgcttggctgcgcagtaccctgcaaaagccccgggtgcgcacggcggtgcgcagcaccccactgcacgccatgcagagccggaacgaccaggtaaagctgttgctgctcaagctgcggctatgccgcgcggtgctgctgctctcgggcgcaaatcagcgtaagaatacctgaagagaagtcaaaaccaccggctgagccggtggcttgagtaagccctagaagggcataat

SEQ ID NO: 328 - DNA, 18854 bp, unidentified
  source 1..18854: mol_type = unassigned DNA
tgactgatttcttactctactgctgctacaacacgaatttcaaggctgactatctcggtgcttctaagaaagctaagtttatgaacaaccgccttatcgccttcttcgagtggctcagaaaggatgctagagatgagctggctaagagcaagcattttgagccaaccgctcacgtgcaggatctcgcagagtatgcttctcctatcgtttcgtgcggtaatcagaccggtgagggctggttcttgacaggtgagatgcttgagctcatcaatgagggcgtcacaaacatcatctgtgcacagccttttgcatgcttaccgaaccatattgtgggtaagggagttataaagaaaatcagacatgatcatccggatgccaatatcgtggctattgattatgatccgggtgcttctgaggtaaaccagctgaaccgtattaaactgatgctttctacagcacagaagaagcttaagaaataaaaattcgcccatgcattcatgcatgggcgttatttgttttcgtatacaattctacagactctaagcagtttttaattaagcttggatttaatttcttccatccttgtatcatccagcttataaaacctcttaaatacaaatatgcccacaatgagcaggataacagacggaatcgtcatccacatacgaagagcatcaagtgtatcctgtgtctgtaccgcagccgcggtatccagatgtatccagtcaaccaccagcccagccagaaataccgctacaccggaagcgagctttaccgtaaatgtctgcattgagaaaatgaccgactcctctctcgtgccattcatcacctcaccataatcaacagaatctgaaagaaatatagtcatgataacattgagcataccgtagcccagataaatcaaaatacccggcaggcagagtatgtaccagctctgcggcgtgtagagctttgcaaatgccatgataagtatcactgcaaagcctgctatctgaataataaatcctgatataaaaagctggcttttgctgaatctcttgcgaagcagcggtataaccatcatgacaagcacctgtgctgcaaaagcaactgcagcaaatatagaatatgcaccctcgtttcccacatcaaaccggaagaaataaagcaccaggttaccacagatattgagtgatgtatacacgagaatgattgataccacaacagtcatagcctggtcgttcttaaataaggctttaaacatgtcggatatctttcccggcttctcatcacaggcaaccggtctttcaggcacacatgccacgcatacaagctcagaaatcacaaatactaccgctataataagtgcccaccacttaaatccaatcctgtagtcagccatagagcttcctgcaccaagaataggcaccactgtcatcgtgagcaccgtagggatagcatctccaatgccagagcatgtcctcgcaagcgatgtaagctgctccctgtcgctgcccggctcagtgattgcgggaatcatagaccagaacggaatatccataagcgtatatgtgatgccccatgcaaagtaaaacactgtaagccacactctctgcgctgaatcacccatagactcaggagtggcatataaagcatatatggtcacggcattgagcaccgtgccggcaaaaatccaaggcctgaacctgccccacccggtacgcgtctttgctacgataatgcccatcacagggtcattgaacgcatcaaaaatcctcgccgccatcatcaccgtgccgataaacacactgctcatcccaagcactacattgtagtagtagagcaaatacgatgaaataagcatatacacaatatcttttccgaatgcgccaaatccgaatgcgcacttttgtcctgttttaagcttcataaaaacacctccaaaataatccgctataccagcctctggtataaagtaaaaataatttacagcttctcaccaaccaccctgcaccgcttcctgcaaaaagcaatgccataggctaaaatatcacaccgcccctcatcccgcagagcctcatcatagcgcttattcttaatctgtgccatagcagtctcgcatgctgcgtcaagctccttcatctccttagcatacttcacctctataacgatcccagcatctggatcctccggctcaatcaaaatatcactaaagccatctcccgactcacgattggacttaatcagccagtccggattgctgccacgcagtagaccgagaagtaagccatgatagaaattctccttcatagcatcaggcgccttggtatcgagtatgctaatcatgcggctcataacgatattgagctgcctggtaatctgtttctcatctttatccagaattgcctttgataaaagcttcatagtatcatcatcatttgcaacaacagccttgaaccactcctgaatctgaagaataaacacctcacgcacctctttattaggaatcacaagcttataggcatagctctcgctgtcaggcaccttgacctcaccaattttggtgagataaccggtagtgaaaagcacgctccacagattgtcaatagtattgtcaatctcatcatatgtcagatcaagacgaagctgcttctccacaaatccacctgccacgagcttttcaatctcatccctcgtggtctggtcagccttgtccacaaagcgcttcaccatatcgttgccactactgttaatccagaacgcactcggtctggctgacggatctgaaacaagcttcttggcaaaattaatcacatcccacggacaataaatatccgcattaccaaaatgatagccatcataccattcctttgcatccgggtacctctcgctcctgtcatagtctaaaagcagcttcataacttcatcatcagtgaagccaaactgctcatcatggtcgatatccacaatagaattgatttcaaaattattgagccctgtaaaaatactctcctttgacaccctaaggcagcctgtaagcaccgcaaactgtaaaaactcattggtcttgagcgcctgcccgaaaagccccctgatgagagaaaccatctccttgtagtagccattctgaaaagccttgtcgagtggaacatcatactcatctatgagaataactactttctgaccatagtgcttatacaacagctttgaaagcattcgtatactatcctcaatattgtcatcctgcccatgaagcatctttgtaaacagtgttctatcctcatcagtcaatacatcactggtcttcaaatagtaatgtctgtcaagctcatcctttaaaatagcacacagcatacgtcttgccgtaataaagtctaaaccatccacacccttgaatgaaagaaatatgacaggatacttacccatatgctcatcacaaagctctttattgcctgaaatatataagccatcaaacaaggtcttatctgtgcctatctcaaagaagctttttagcatgctcatattgagagtcttaccaaaacggcgagggcgggtaaaaagagtaaccttcccccatccctgtaagagctgctcaataagccttgtcttgtcaatataatagaaacccagttttctaatttcctcaaaattttcaattccaaccggtaacttcaaagtacttgccataaaagcctccaaaaaataatccgctatacttaatactagtatagcggattgccatgtaaaatacaatttaattcattgcattgtatgcacaatttatttaacggaatagcctacaatatgcctcaactacgtttctttccaaacgattctgtttatatgaaagacgaatattatttgcgacagggactaccgcaacaacgatttcactagccagcattcctacaccctcactgactataaatccacctgcctcttttactactgctggcaaaacctcttccactgcaacatttccagtttcttctttggtagcatcaatgaaatcttttaatttatgtttgtccattgcaaatcatccctcactttccaatataataattcacacacatgtatgcaataattgttaaagtggggtccagaggtacgacctctaggtgtagtttcgtttattaacgctttattcttcgcttagctgttttgttcatgtaagtgttggctacgaaccccacatacacccgtaggaaatcccatctgaacccacatatacgttacaatcaaactgttcatcacagcacctccatcaatctcaatgtctttgacaaatcctttggtttcgaattttaacttcatgcaactcagccaagttccaaataaagcaataagcgacaagttattttcacatcttcgtcgatcataagatcgttgcctactgctcaccacgaagaggtgtgtgattattacgagcagcgtagggagctaccgctccaagtatatcacaagtctgcaaataaatcagccttgtacactccatccgccaacatttttttgaagctgtcctttacagctgcgacatcttcatagtaggtcatgccgtaccaggtgacgttggtcttcagaaccttcacagacatcttgcagataccgcgagtcacgccgcagttatcggacagagtgttgttcatcagaacaaaacatgccatacaggacttgccgccatttaccagatactcatggacagctttgaagccttccttgccatagtaatcatctgcattgatcacaatgaacagagttttaattacgtccttcgctgcaagcacggcctgaccggttccccacggttttgtacggccttcctgaagttctcccggaatatcgttgatgtcctggaaagtatagtcaaagtccatgttagaatccctgaatctcctctctatcacttgcaaatataaaagcaccatcaaaccaaacgagaaatacgggtcaactatagtctggattctcctctttatatctgttaaaattgttttttctttatacacccagtctgctgccaaaaagaacagcagcatatggaaagaatacagccaattataaactgcaccatttgaataaatatgctctattgcaacaagaacaatacttacagattgttgacaaaagcctatacctttttcgtaaggacataggctttttattgtatataggcaattttcgaaatgaaattgtctttttttgtatattttgaaggatgtattgaattttttgatggctttcttctatattttcctctccaaagggacattttcttcagattatggcacgcaaaaatcaaccaagcattctgttgttttttcttcaagccttttaaccttgtgaaacggagtccattgttttccttacagtccgcaaatactcgttcaatagtttcttttctctgtggataaatttctttccattccatagtatgacggatctcatcggcatattctctaaactcttcccataggtgacgttcgataacttttgtcatgttcttactctttgtacatttgtttctaagaggacaatccttgcagtcttttggatcagatttatattgtctgtatccatttcttgtagtagttgtatacattaggatcttatcatttggacatagataacagtcgcattcttcatcatagacatattcgtattttttaaagaagccttttttggtcattggtcttttatatggcatataaggaatctgatcattctgtacaatggctctgcatattgcgggtgtcatgtatccggcatctaacgaaacattcttaatcaggtatccgtattttccattgatcaattcttcataggcatcaaaaaaactaacactatcatgtacatttccaggaactgttgtaactgccagtacgaacgaattcttatcgcagaaagtttgatgcgagtacgcaaaacatttctccttctcacctttatggaaacagccactttctggatctatagtgctttctgtaattgttttagttgaagtttttttacttcttcacccgtttcttcatcatgtacatattctgtatgtaccattgaatcaaaggcctctttacctatacattctctatcctcgttgatttcaaccaacagatcatcttcgtatttctttttgaggatctctacttcttttttgacactttttcttttattggcatttgccttctgatgcgtactgtctccaaataccgttgtgaaatcgacaaagccataatcaacggcctgttctagtatttccataaagatttcctggaatatagttgaatctttatatctacgaatatagttctgagaccatgtagaaaagtttggaatcttctcatcaatacttaatccaagaaaccagcgatatgccaagttgacttcgatctcctgacatgtcttgcgcatagaattgattccaaacacgatatttatgataagcattttaaaaagaaccacaggatcgatactcggtctgccgtgacgactgtaaagatgctgaactttcggataaataaaccgaaaatcaagagcctcctccatcttacgaaccaaatgatcctgtggtactaattcatctaatgtataataaatcatgcaatctaattttgcattgtttctgttagtcatagccattgtgatatcctccataaaccctctataattatatcatttttggcataataaatggcagaaacgtcgactatttttgggtttatgaagtacgtttctgccacagatattctatcagattttaaaaagactgtcgacagtcactttgtcaacagtctgaatacttatttcttttaatacatcaagccatgataatcgctctgcttgcttataaattgtctttcttcaatcattttcagccaatatcatttatataattttccctttatctaaatcaaaaccatactcattatacgttcttgaaatgttttatcccaacatttagaatataaatgaattccttattttttgtcaaataagatacaccagcatagcttaaaacaccagtcagaatttgaataactactttaacatagatatttaattctattttaccaataaagacaacaatagcagccatcatcagggaaagtgtaaatgcagtaaagcaatctgatagttcttcaaagatactatagtttataatttttttattaatgattgtattaatagtcaaatctagtaaagtattcgctggaaccgtaagtgcaatagcaaatactccatagttcattgctacaaccgttgaaatcatgaaaaaaatcttttttataatttcagatttcagcattaagtcgcttcttccaacagctttgattggctgtagagcaattgttgccggaaccgatataatagtttccacacacatcacatagacatacggaagcatgggcaaccatttttcagtaaaaagaacttctataatagtatctcctgccgccataagtcctaacgaaataggaaatacgatataagccatgattcgcacactttttctggttatctttttaactgttatcatattatcattaacagcagctataccgggaaataagacgctgattaatgttgtgtaaatattggttctaaacagctgcggcaactgctttccttttgtataataagcaagatttgcagagttatactttgcaccaataatgaaatcaccaagattattacatagtgtgccaagcaaatctgtcatcattactttccagctatacttgataagtggaacggcagccttgattgaaaacatttttttaggtatccacttaacagttgcccacagcatcattgtatctataacagtattggttaagtattgtccaattaaagcccatacacccattcctttaatggccattgcaataccaactaccgctgataaaattgttcctgtaattgttgcaaaaaagaacttcttaaattgcatctttttggaaatatatgcaacctgaattacttgaaacgctgaaacaggaattcttaatgcaaaaactctaattgtgctttttagtattggcatatcatacgcttgtgcaataaaaggcgccgttccaaaaagcaccaaatacaatgcaagactcaaccctaaatttagataaaatatcgtcgagaaatcaaggtcatcagcatctcgtttttgaattagagaagtgttcaatccactactcagaaacacatctgcaatagaaataaaaatattaattattgcgactgcaccataatcttctggcatcaaaatacgagccaataccatagatactacaaacgaaacaccttgtgcagcaaaacgttccgcaaatttccatatcataccagaggtcatctggctttttaatttctgatcgttcacctttttctccttctgtcatatcaaatcaattagttcttcgcattctaatttctggaaatctacagttttactttttttaattttcagaaatttcatggcatctgacacccacgttagccttcttttcagataggcttctcgaagtttgtttttatagccttgaacgacctcatctttgctaacaccaacaattaaataatcgcaaagttcatttgcttttttcaatatgttaagatgttcaataatgaaaatagttctcatcaagaaattcgaaaatagatttaatacttgatataacagcgatacagaagaattaatcgttaacattctttgtccttgatctcccttcattataacgtatccttgacagtcaatttttttcaactttatgaaagaacatttatttgccatcgctaaatctaacatatagcggataatgtgttcttcacttttcaaccgtaggaatctccatatagttagaaccgaataattggttcagaaacttcttatattcccttggaacgatgtattttctcccgaataatattaaattgtttctcgcattgcaagtttaagctttatcaaaaacttatatgcagaacaatctacactagtattctccatttcatgcaaataaaaatactcttcatcatgtggattgatttcaaaatacacatcacccttagctttcttcattccatattccttgaaagacttcgtaaaataatgatttagctgcatggaatgtgcatttccttttgcacaattataattttcaaaacacaccttatcctgaacattcaccggtggaatattcaagcctctataatttgcccagaataaatggtgtaaacaattattttttttaaaagtgccatcaaaatcaaaattagtattgtagaagcatttgccaactgaataatacttcggccatgaaactgaaaatttttctgtgactaatgtatctaaatctctttccaaaagcccagatgttccaaacattttccaatacagttttacagcccctctgtttttctcaaatggctgcagtatttcatatatactattcttttcaattggcacaataaactcatcaatgtcaatgaacccaagccactgggtttgttcactataccttgaaatacaatcgttatagcattccatttgtgcctgactcttcggccattgaactaaagttacaagacctttttttatatatggcgcaataatttcttcgtagttatcttctgaattattattatataaatagaaatgttccacacctacaatacggttaaattcaatccattctttcaaataaggtgcttcattcttaaaaatcgcacaaacagaaactttgtattgtttaggcatactttcaacccgaatcatattcattcgtaatttataataaaaagccttcgtacaatttaaaacaaatttaattccttccttaggtttactgatttcatttttatcaagtataaaatactttgtacttattttcttcatagctatcccttccttcttcaactacacatccgcaatacaatttttaatcctttttaaaaccttattcttaaaaagagcatatggtatgttacagataatagccggatagctataatttttttcaattgcttctttgtagttttgaagatcataagacgactcttgttttttaattacgtattcgtataataaaagactcacaaaatacgacatatctttttttatatattcaaaggtagcagaactaattttcttatcatctagtagtcctcttataatatcaatatattctacactgaatgctgtaaatagattataattccctttctttgtcggcttagattgaatttcagtaacaagtcttcgatcatcaataaagtagctatttgcccctgtattaccaaacaaaaagactgtatgcggaaaagtcagactatatggttttagtaaatcaattttttctaaatctgaacgccagattgaaataccagctgaccaggaagaccaatagcccagagccttaataaatgaatcgaaattttggagcttcttatatccattttttaattgcaattcaccatttgtgaaatatgttacaggcttactttttaggtttttttctgcaaaagaaattaaatactctaaagccccttttaccaaaggcatcctatgattaacaaattttatcagctgtcccttagctaatttaaaacaatcaatctgatttgtgaagccttgggctttcgtcttttcataacacaggttttgatagcgggaacaatactcttgcattcgattatagaaatccaaattgtttccattatcagttacaacaacttcaaatttttgaaggctatttgcctgctcataaatactatccaatactggaaagacccattcggatataccatttgttgggatgcaaagagacaacaacagctcattcatttcattcgcctccttctctgccaaaaacgatctttgttttgcaaaaacaaatcttacttataaataagaatgctaaaacataattagctttagaaaactccatatcagtaaaactataaataacgccaatcattatcaaaatatatatcgatatattttttatagttggataatttagcgtatttttcaggacatttttgcaaacactcccccaaagtagcattccaattacaattccaacaattctgccatcataatataaataccaaaagcaacttgtgtatgcattacatctatacgaagttcctaatgttacccaattattgaacgtattttcaatattctcgtatactgctgcgcctaatggaatcttagtaagacccaaagaattttttacaatgtataaaaatggataaataaatccgaacagcgaggctgcaccataggcatactgctcattgattttttcagcccaatactgaaacattttcggttgaatagcaaaatccgtataaaaattaaatagtggttcaaatcctttcaagactgtaaaatggacaaatatcgcacaagccacagccaaagccacgagaaacttaatattagaaaatactttagctaacttttgttttgctgatgttttcagtgacatgcaaataataatagaaacgagcaatctaataacagcaattcttccaccgcttaccaacatccacgtaaggcacatgaatgaagttagtataattaaccatttatcttttcttccaaagaaaaagtcaacaactgtaacacagacaaaagtgttgtataatggatatgcaataaactcatacagcatattggccagtttcgaaccatattccactctattcaattctccgaaaagtgtaatgttggaaaaatcaaatcccaaatctttaagtttatatattgttattaatatacagcatatcaatgctacataacacactctataatttagttccatatcgtcttttttatcgaaggaagacgtatcagccaaaattctatttattactactctttttttccctttaggcaatacaaatccgacaaaaaaagaaatcaatccgataaaaattaagtaataaaatttttcatctgtagcattaagcccgtacaatcccattctggaaagactgatgataataacccatataattaaaagtatcgatgccggatttacccatttttttgtttttacaatactcagaatagtaagtattaaaagaatcgcttccatcatccattattatcctctagtgcgtcatttgctttgagggccttatacatattttcgagatacccgtatttattaatcgtatctggttcgagatatcccccttcgccccattcattccatgcaaaaataaaaatataattcttcttatattcatttttagctttttgaataagctgtgaaaaatattcaccgaatttctcaggtgttgctcccatatatacctgtgctctttcatgataacgaggcgaattatcccagtcagtaaaagctcccggtattaacttgtcatcatctacttttctagaaataatcttgttccatgtatcatcatagcttggaaattgatttttctccattttttttcggatattttgaccatagccactaagatctatagcaaactttttttctaaaatatcaagaaccctatgccgaacctttttcaatagcttatgttcattctgattaagcaacttatttgcaactccgggctgatattctatttcataatcaatcctagatttatcgaaagacttatccagaagaaaatacggactttgactcatgataacaatccctggcaaaccatgatctgaagccaacttcttccagtagtcaatcatttcatttaaacactctatcacttctggtctgtaaatcacaaagattggctttccatcttctttaatatatctttcatcttcaaaaaacggaatcaaatactcaaaatgttttttccagctttcttctctcccatatttttgaggcataataacctttttttctcctgtccactgcatcgaccatgcttcattagcccagcagaaacagaatggaaaatccaacgttttatcctcaaggatttgttcacatggtttctccaacagcatttctccatcaaaccagtaatgatagtagcagaaaccatacaagccgtatttctttgccagttcaatctgccacgccttcgtatccctatctaacaaattgtaataattattatttagtggcactcgcggttggttatgtccttcaaactcaggctttgcatttctaatattaacccactcagtaaatccttccccccagtatttatcattaagaggtattctatgatattgagggacaaaaaaagctattgttttcataaatattcctttctcataaactcggcagtcttctttattccttcctcaagactaaagggattaagctttccataatatttttcatatctgctaatatctaaatagttaaccggtacatctaccgctcttggcgctgtgtaaacaacctttaatttaagattcaaggctcgctctatactattcaatacatctttgatggacgttccgtacccacatcccaaattaaaggtgcgatgtttattctctccgttgactatattcaaaatagctctaatcgcatcctcaatataaataaaatctcttatgacagagccatctccatatacttgaatctgttcgccttttaaagccttatatgtaaatgtagtaactgctcctagaacaccatttggtctctgatacggtccgtaagggtttgccaatctaatgattctataatccaatccatacatataattgtatagatataatagtttttcaattgttatcttctgaactccataggatgatataggatttgttggtgtactctcagatagtggacactttgactcttttccgtaaacggttccaccagaagagataaaaacaacttttttaactctatatctaacacatgcttcaaacaaatttgacgaaaataatacatttgcctttatatcctggctaatgtgcagatttgaagttgttggaatattagtactgactagatgataaacaacgtcctgccctttaagtatagaaaagtcctcattttcatctaaagaagattcttttatttcaacgtttgaaaattcatatttcaatatgtttgagaaataattagcatctttgtcaacaagcgttaccttatcacttttattatcggccaattttatggctaaatttgttcctatgaagcctgccgctccaagtattaatatattcattatttttctctcacttctctaataacttttgcaggagctccaaccgctatgcatttttctggaatgtcatgtgttacaactgaattagctccaataacagttccgttgcctatcttaactcccggcattatacacacatttcttccaatccatacattttttccaatataaacaccctcaccaatttctaatggtctttcaatcggtggaatatctaattcccaccatgaatttgagccgtgaaaattatccgtaataaatacgttatcccccattaacacgccgtcattcacaataatttcattagcacatgaaatctgacaattactcatcaacgatacattatttccaattactattgatggtctattttttaattcctgtccgttatattgattccaagtctgaagttttaaattctttcctgccgaaaaattatcgccaatcgatatggttttttctcctataatctctgagttcactgatatacacagattattgccaacagacttaaaatttttatgttttagtgatccgtatatattcttaattactgtccttagcatataatcatccttcttttaatacatattcaaagccttcaaaatacttttccaaaccaatatcctctttaaatttgtttcgtatggatgtatttaaagctgcactattcgctgcactattttttatttgtaaaatgcactggcttatatttttaaccaaatccttatttctatctaacatatatgctaattcagcaggtatatattcaggaattcctccagaatttgttgtaatcaacggtaatccactaactattgcttccaccatagtcatccctgctggttcctcccacattgacggaagaaccgcaacatttcctaattggtaaatagaaggcatatctttataatctatatatcctgtaaatacaatcctatcttttataccttctgcttccttctgaagctctaatgtgtagttatcaactatgtcactgctataaaaacccgctccaacaataagcaactttatatgttcatctttacattctttaatcgctttgattgtttcaagcgcacctttttcatctaccaaccttcctgcaaatatcacaacaaaatcattatctttaattccatacttgtttttatattcttttatttttctttcgtttcttgttgtgaatctttcagtatccacaccatttttaagaacatagcattgttcttttcttaatgttggaacctgctttctaaaagagtcatttacaaattcacttattcctattagacttctaattgaagatgcttctttttcacatttaaacagcgaacggacctcattatggagataatagattgtctttccttcatatttctttgcaactttcttgttttttaacacgaagaaaagcgtagaatttgttaccaaaacaagtctatcgaagtcattttttagtaaaatctttggaaactttgacatcacatacagtctacgaagaatacaacgatatgaaattaaatttggtttttttaatagattttttgcaatccagtatattgctttatcaaaacaattaaccgcttccggagacttcacaaaataaaagttgctgtttttatatttttttgcttgttctgctgccttttcttcgtatagactaaaaaccgaaaagtcaaaactatgtttcttttcattttcatcaagtaagtcttctatcagattttcaacagctccaccctttgttgctggaactggtgaaataccactagttaaaaacgcaaccttcattctttccatgctatttcctctatctcctcatacttgctcaaacagtttcccgtgttcttctgaaactctccgagcgttaaacctgttatgtacatcttcaaatccatgtgtcaccaatctatctttcaatccatcttcttgatagatccgcaacacagcattacttgctccagtatcgtcatccacttcaacaagtaagccattttctccatcccggattatattcggaatggcatccactctgcttgctacaataggcttgcctgccatcatatactcaggcagtgccagtccaaagccctcccagcgactcagtaaacatgcaacatcgaaaagctccacataactcatcggatcatcaacccatccagtaacatgtaaactgtccgaaaagccgttgtccttcgcatactttctgatttcgtcttcctgatttccattaccaacgataataaagtgtgcatttagaacttcatctttcacctgctttgccatcttaataaagacatctggtgctttttgctgacttattcgcccaaccataccgacaacaaatgcatcttctggaatattcaggtcttgccttttaactgcaccatgtgctccattttcataggcttcgatgtctacaccgttaaagatgacttgcagcttatcttctttacaaatcttcttgtctaatgccgattgtttctctgcatcagaaatacaaataatcttttcacaaaatggagcagcaatcttttcaatagccgtgtatattgcttttttctttgcagaacaacgcatgttaaatgcccacccgtgtgggttatatacacagtaatttttcaaaccgatatcggcaacacgagcaacggctccagccttactggagtgagcataaacaatgtcagggttatatttctttatcagatttctaacttctttaattgcttttaagtcgttgccgccaatggctctggtcatttcgattcgctcaaaagaatcaaccaatcctctataatcttcctcaaggaaatcctgtgagcaaaccagtacattctcaaatttttccttatccaaatacttgagaagcattcggatgtagcgatccacgccgccagcagcttgcgccacatgcagtattctgattctattcttcctcatccctcaaatactcctcatcatttttctttccgcaaatctatgttatactgctccctcattcttcatcactcttataatagtttgaaaaataattcttatatcatttttcaaaccccactccctaatatactgggtatccaatctcacaacttcttcaaagtccgtgatattgctcctgccactcacctgccacagcccggttaatcccggtctgaatgacattctggctctgtggtgtggttcatacttctcccactcatcaagtgttggtggtcgtgttcccaccaggctcatatctcctttgaggatattccaaaactgtggcagctcatctattgatgtcttcctgataaactgtcctatgccggttttctttgttccatccgacagtatcttattgcctatgattctcgggtcgaagtccatcttaaacatcattccgtcgctcaccttgttttgtgccatgagctccttctttcgctcctcggcatccatgtacatgcttctgaatttgtacatcttgaactttcttccgtttctgccgattcgctcctgtgcgaagaaaatcggtcccggtgatgctatatagattgctggtcccacaaatatcgtcactatcaaggtgatgatgcatccgaccagccctccgagtatgtccatgattcttttggcaagaagctgtgtggttctcgcatagttcaagctggctgtgatgactgtgtagtcacctattttttctatctgattaaaactgcctgtcatgaccttgtttttggtgatgcctctgtgaacagctattcccatctccaggaatatgtctgccatttcgtagggatattcgctctccgcacacggtgggataagcacctcgtccacccattcctcacaagcgtagtccactatcccgtcatggtttgcaactattggtatttcacatattgttttgccattcaggtcggcatctgttgccgctgccactatctgtgtatatccaaagccattttcctttagtccctgaagtgtctccctaaggagcttttccggtgctatgacaaagagtgattcttttgatgaagcaaagcctctttttttgattattttctttaacaccactctgcctaagtacgacacgagaatatatattggaatcatgatgtagtaagacatacgcgaatatatctcacccatctgtgtggtaaacaggaagaaggtcgttattatttctacaagtgccacatgcttacatgtagcaatgagctcatcgagatagtcgcgcttcaatacatttttgaaggcatctgatactatttccacgaagaaatctatgaacagaaatgctactgccagtatcctgtagtcttcatctatgtatggattgccaagtccaaagcgccatatgtatgagaatatgaatgctatctgcatacacaggacatctaagagcatgaaatctatatgctttgtccagcttcttcctttctttctgtacattttttgtgtctccctgtatttcttgattaccctatttccagttcatccctatactatcgagccttgctatgcgctctgtgtcgagcaccatgccgctggccttcgggttttttcttttacatctgatatttgatatccagcgtcccagcttcactccgtctgtggaatatgataccggcacgtctagattgccgtttttctcgtaatatgctttcgcaagctcaaactttctgttccactgtatagcggtcttgctttctgacctg

SEQ ID NO: 329 - DNA, 25591 bp, unidentified
  source 1..25591: mol_type = unassigned DNA
actgcaatcaaatccatactgccaaactccgcagggaaagtgcgctgcccgtacagggccatgcataacagggagataccggcggaggcgatcatagcaatgacggcggggcgtagcccgatcaagatgccctgcataacgctaaggccgcggaaacggtaatacatgtaggccagcgccatgacgatgacgcaggacgggaaaatacagccaatcgtggcaatcagtgccccgggcagccccgccacctgaatgccaacaaacgtcgcagcgttcaccgcgatggggccgggcgtcatttcggaaatggccatgatgtccgcaaagcctgtcatcgtcagccaggggtgaatatccaccacttgattctgaatcaagggcatagccgcatagccgccgccgatgctgaacaggccaacttggaaaaagctccaaaacagttcaaggtagatcatttgtcgccctcccgcttttgcagatacagggtatccagcgcaccgatgacaccacagaccagaataatcaggatgatgttcaccgagaagaagcgggtcgccacaaaagccgccagcatgaccgtaatgggaagccagcgtttctttttcagaataggccacatcatattgatgacgacgtcaaagatgactgccgccaccccggccagcatgccggccatcgccatgctcacgtacttattggagcggaacgcctgatagaacacggagatgatggaaatgatgataagcggcggcagtgctgcacccaccacagtaatcagtgcgccggggatacctgccacatggtaacctaccaaaatagaggcattgatggcgatggagccggggctggattgggcaatcgccgttagatccagcatttcttcctcgtcaatccaatgtagttctttcacgaagcgctcccgcatcaaagggataatgacgaagccgccgccgaaggtgcaggcgctcagcttaaaggtagagagaaacagctgccagtatttatttttcttgtccaatagaatcggtctccttttcagtgatacatttgaacagcgcggatcatttcgtacaggcgcggttccgtgtaggcgaaaaacttttgtagggcgttgcaatagcaactgcgctgcgctgcagctgccgtatttcggtcgcgcttgcagccaccacggcacagccgtacccatttgcattgctgacattctgcaggtatctgccagccatccgtgataaacgttcgcattttttcgccggtaagcagcgattgcagggtatcgttttgaatcgtaccaagtttataggcatccaagcagaagaagtcgcacggatacactgcgccactctcctccacgaccatgtagacaccgcaggttccggtcgtggaacaagttcccgccgggccacccaaaagtagctgaatataatcttcaaacaggcggatgctgacataggtgatggttctccagtcgcggtaccatgcgtcgaacagtgcgcacaggaactgcgcatacagttccggtgtgagggagtagggcatcatgcacatccggggtgccgtccaagctgatacctacgagaaagtgttctttgctgaaaaatcagcccatccatcggtaatggcaagaccatttgtctggatagcgtattgcacggcaacgtgcttttggttgtactttcgcaccgtcttcgtaaagaaacaaaagaaatccagtccggtcagcgttggctcgccgccctgaaaggcgaacgaaacaaagccgcccggctcaagttccgcaaagcagcgttaaatcagcgtttccgtcgttgcctgtgacatcatacagtcgtcggggttcacgcaattctgctgctcatctcggtaaaagcaatattggcagcgcatgttgcagtagcccgctgcgggtttaatcaggaattgaagctgcttcatagcacctcggtatgctgtaatacggtcacgggtgttttgcccacaagcagggtgtacccatcggtgtaaccctcttcacggttttttagagcatcaatcagcagagtgcgcagcgccgtcacgcgctctgggttttcctccagcacgttcttcgtctcattcgggtcgtcgcgcaggttgaagtacagctctcgcccggtctgagagtaccagatatatttatcctttttcgtcaggataaagtgcatggaatcctcgcccagtgtatgctcaccgtgcagatattcgcgttcgacggggtgcaacaggctcgtgccgtccacggtttcgggaatcggtgcgcccgccagctccagcagcgtgggcatgacgtcgcgcagttctgccaaatcagtgcaaaccgtaccatgcttgcccacatagcgctccggtccggagataaacagcggcacccggatgctgccctggaacggctttgctttctggaacatcaggtggtcgcccagcatctcgccgtggtcggacacgaacagaattatggtattatccatgatttgctcctccaccagtgcggagactaaacgcccgatttgatgatccatgtgcgtgatggccgcatagtaacccgcccgcaactggtggatgtagctttcatccgaaggtgccgtctgggcatggtagctgtggctgtcacgttcccagcggacgcagtcgttccaatcaccgcgccaaggctcggccagtgactcatctttgtacaaattcaagtaatactccggggcatccagcggaggatgtggccgcacaaagctggccatcaggaagaatggcttcgagcggtcacggcagcgcagaaagtctcggcactcgctggcgacccagttggttgggtgatacttttcctcgtagatccaggggcgcacgacccagctattgcagtcaagaccagtgtccaccgggtctgcatccacgccaagctgctgtttgagccaccaataatagtcatcggccacacgctgatcctcatagctgggcgtggtggggcggcggtaggcatggagatagccatcatgcagccgtacatcatggaaacccaggttgttgcgcagcggatgaacatgcattttgccgacacactgggtatagtacccggccttgctcagctccccggccagtgtgtggggataatcccacggcacaagatcctcgtacccgacgcgacccgtgtgctcctgggacatgcctgtatacagcgtagcccgcgcgggaacacaggtcggacaggcagaataggcattttcataccgcacgccctcggcggccagtgcatcgaggaacggcgtttttacatccgggtgaccggcaataccaaggcagtcgccgcgcatctggtctgccataagcaggataatattaggatgtttatccataacaaacctcgtatcaatgtttttgcagccaaagggtgccgcacagtgcggcacacccttgtcctgctttatagattataccatttgatctcgttggcgtccatgtgcagggtaaagctgctgccgtcgccagtgtaaacagtggtatcctgcggctcgtaggtgttattcacgacacagtacttgccgttcttgacataggcatgtacttcgacattgtagtttgtgctaaaccacttgtgcaggtcggcctcgtcgtgggcggcccacaggatggctcggtacagcacgcggttgttcacgaagctgtagggcagaccgctgatgtagacgccgcgaccctgaccgtactcgtgggcggccagctggacctccttatcacgctgaatcaaaatctcggtgccctcaagcgcgaagatgttctttttgccctcgccgaagtccacatcatggtcggggcagtcggccagaatgaagtgatcgcggtgctcgtcccagttgtacttgtcgtagttcagggtgaagcccgtttctttttctacaccaagcggcgcggccagctgcaaataccggccctgatactggtggccgccgggttcgccgacgccgatcagaccgccgccacggtggacaaagcccttgacagcggaggaaatctccggatcctcccagaccttgccgccggtatgggcggtatcgccgtcgcctacgttgataaggacatcaatgctgtccagtaccttcgggtcgaccttgatgtcgtcaaagctgatgaacttcacatcaaacggcgcaccggacagagcctcgataacacccgcatagctgtagttctgcttctggtacagtgcatggtgaaccatgtggcagccccaggcgcgctgttggccccagctgttaagcacagccacggtcttgacgcagtagggcgtggtgcctttgatgttctcgtacagctcgcggaactcgttgcagacgctctcgacataatcgagaaattccgggaactcgcaggccagcttcaggtagccgccgtagccgatgcggtcaatgggcttgcgcaggatggcgcggcgtgcggtgacccagttcaccttggcctcgcgcacagggtcgccgccctcgtggaaggtatcggggaagaagtagggcaggaagcgtccctcggtgtacttgacgccgggaatgtcggaaatcaggcgcagcgtgctgccgttgccaacactgccgacgatagcatccacgccggacttttgaaactcgggcatgaacggctcgcagccgatccagtggtcgccaagaaacatcatggcttccttggcgtaggcgtggacaatgtcggtcatttctttcatcagaccggcgacctcgcggcgctggaaagcctggaagtccttgtactccttgctgggcacacggtactggttgttgtagtagccctggtcgatgataaactccgggcggaacttatagccgacctctttttcaaactgctccaaaatgtaggggctgacagaggccgagtagccataccaatccacgtacttctcgcggcgcagctcgtcaaacaccagcgtgaacaggtggaagaaggtcgtaaagcgcacgacattgacatagggatggctttccagatactcacgtaggcggcgtagggtgtaggcgtgggtcttgggctggcgcacatcgaacgggatctggtgctcgacatccttccagtcgttgatgaccgaattgtacatgtggacgggatcccagatcaggtacgccaaaaagctgaccgtgtactcgtggtaggcggcgggggcgtcgatgacaacgctttcgctggcggcatcatagtgccagtcggcggtggggacaggctcgcccgtcgtgcggtcgatgacctcccacaaacgggtgatgtcatcgtggtcgttgaccatcatcagttcgcggctgatgcccgtcatcagggggatggtcagcgcatcgtccgcagcggtgtagaacggcgtcataatgtagcactgctgcgtttcatcgggattggcttttgcccatgcgttgtccttgcgggtggtgtagtaggtggcataaatcttggcgccagtgtccttcaactcctgcgggaactcggtgccgtcgcagtcgcggatggcatccgcgcccaagcgcttgagcaggtcgagggtttcagggacggcgtccatatcggtggggatcgttacacgacccatttttcttacatcattcatataatgattctccttaaaacgtaatattttgaatggaggaaagtcaaatcaacccttaacgccgccactggtagccccgacaataatcttttcagacaggaaaagatacagcaggaaagtaggcaggaacacaatgataactgcggcaaacatagcaccgtactggccggaatacttcattgcattgacaatctgcaacaaaccgacaccaacaggggtcatagaatcgctggtggtgaaaatcagcgccatgaagaactcgttccacacagacatgaagttgaaaatcgtaacggtaataatagcgggctgaaccagtggcagcataatctgccagaacgtccgagaatggctgcatccgtctatgtaggccgcctcctcataagaccgggacagtgatgagaagaaatccagcaggtaaatcgtggtatacggtacgcgcagcataatatacagcacaaccaacagcacgcgacccttgatgccccactgcacagccaaagagtacagtggcatgatgatcataatagtgggaacactcatggcaatgaccaagccgatacggatggtcttgccgccgacgaacttccagcgggaaagcacataagcaccaggcgcggaaatcagcagcacgcccacacaggaaacaatggcataaaccaagctattgaagaaatacagcgatacattttgggtgttccaagccgtaacgtagttatcccacttcaggccattggaaaagtccataactctgcccgtcagaatttcctttgttgaggaaaggctggcgcagacgatccataacaggatggcagccgtgagtgcgatccatgcgcaaacaatgatataaccgggcagaagccgaagctctttcttccagttgattctatcgtgatattttcccataaccgctctcctaccttaatactccagatccgaatctttcaagatcagattggtgataacatacacagcaatgataatcaaagtcagcacaacgccaaccgctgcgcccgcaccagcatcgcgctcgacaacgcccttgccgccgaacactgtatcgtacaggtacacaacgggcacaatggtagccgtttctgtattgatgggggagaacatcttcgtccacaggaagaatgtagtcgcattgatgctccagaaagtaacgcaggtgcgaatcacacctttcagcaggggcagcgtaatctggaagaagcggtcaaagatattcgcgccgtcgatggtggcagcttcgtacaaatcctgcgggatactttcgatgccgctgatgaaaatcagcatatagtaaccaacgctgccaaaaatgaaggcaatcatcatggcccagaaaatcagatctgtacccagccagcggacattctcaccgccgaatactttgacgatctggttcagtagaccataatcatagttgaacacatactgaatccacatggtagccagcgccacggcactaatgatgttgggcatataaatggcggccttaaagaattttgcgccgcggatgccgctggtcaaaatcacggccatcagcatagacaggcacatggtaatgatgccgcccaccagccaaatcatcaccatatttttcatggaactgataaagccggcattacgcaggattttgaaatagttttgcagcccatagaagctccatgtacttgtagatgccgtaaggctctctaccttaaagaaactcatgataatcgtccgaacgaccggatagacatacatgaacaactggcaaagaacgatgggcagaatgaataggaaaatcattgtcttgttctttttcatactggtaatacctcaaaaatgaaatgtcataggcaaagacagcacccattcaggtgccgcctccattcagatcgagggaatcctgaataaatccattataaccgcatcgcttgacggcgtaccatgatttattataggattagtcgcacagggtatccaagtaagcgcagtagtcagcgccggttgcgtacttgccttcgaacagctcgatcatggaactcttgatgagggaccagtcgtccagcgtgttcagagaaccacaccagctcatcggggtggtggtattcttcagtgtctcaacagagccagccaggacagactctttcaggcgggtgtcagcggggatctgaccgcccttgtcaaccagctcctgcccgcaggtgccggtaacaatggtcataatgaagtcaaatgcagcctgcgggttctcacaggaagaggagatggccagagagtttgcaccggcgtaagcagaagcatcaacattgccatcgacttcaggatagttgaagaatccccagtttacaggctcaccaacagcagcatcaacctcggaagtgacatagtttgcgcaagcaaccatagcagccgtgtcaaggccaaccttggtctggctggcaggataagcatcgggcgcgccctcggccagataaccagcgttcacgaaatcaatgatttcctgtgcagccgttacagcagcttcattgtcagcccagccaccgttcttacccaactcggcaatggtgtcctcgcccagatggcggaccagatggttgtagaagttgaagtttgcgtaagcaccgtccagtgccagcggctcatagccgttgtctttcagggtctggcagactgtcaggaactcattccaagtcttgggggtgtcggtgataccgcaggcatcgaaaatgtccttgttgtagaagatgccgccaatctggggctgctctacgatggagttgagataaccagcccactctttggcctgatcattgaagcaagcgtagctgaagtcatcataaccgacagcgtctgccatctcggtcaggtcgtaggtgtacggggcataagcgtgaccgatacggttgtaatcatcctcgaaaatgtcaagcttttcgccagattccagtgcggcagaaatcagggtgttgacatcacggcctttccactcgatgttgacctgtgcgccggtttcagcctcgaaagcgtcggcggcggcctgaattgcggctgcctgaacctcaccggcagaccacatggaccacatggtcaactcaacgccctcgtacttcttgccatcggtagccgtagactcggcagccgtggattcagcaggagtagcagaggtagcctccgagttttgagtattgccaccacaagcagccagagatgctgccatagcagaagccatcaaaagtgcaacaatcttcttcattcgtgttttcctcctaagtgtaaattctgtgtcgggattacctccctttcgcggtgatttaagtgtagtgcttttccagttttttagcaatcattatcttgctcacttgttttacaatcttgctatttcgtctctttttggcacatcgccggattttcgcgggcatttattatgcacttttaccatttactatttttttgtaaaagttggttgttggcaaaaatgctgaataccgtcttgcgcttttcagtcttgtgcaatatcacctgacttccgtcgtttctctcaaaacctagtactcagctgtcaatcagcatggtgaactcaaagatattttcaatctctttttctgtcagatacagtgcatcgagattggttaaaccgattatttttttgattttttcatgaacgctttggttctgggaaatattgatattaagttccatcgcctttgtctgcgaccctgaagtcacgcataaaatttacaagatcataggaactgatctcgtttcagactgtagacaaagttccttcctgtgagggagctttgtctacagtctgaaagtaaccggaactctccggtcactctgcattgccatctctgaaaaatatatccagttttcccagacatttgatcaatgtcttcatttcttcctcgtccagatcccgtatgatggtgtggatcattttcctgtggaaatctctgtggtggaaaaaagcttttctccccttctctgtcagggtcaccagcactacacgtttatctctggtgctgcggttgcgggtgagatatccttttctctccagactgttcatattcgtggtcagggtacccacggtaacgtggagttccccagcgatacgggacatactctttggttcctcgatgccgatagcttcgaggatgtgcatatcattatttgtaatatccttgaattcgtctgttatgaccgcctttgcctctgcatccatcacgttatggaacaggttcaccagcagttcattcagtacccggttgttgcttttttccatagttacctctacgatatctggaatttttctttcgtatgtccgcaatcctccgaagccgccttctctgacgcatatccgcagtcttcctgcgctccggatcattttcagtataccgtctaccaggtcatcacgcaagccccaatcgtaagcccggcaccgaatcccgccagaacgatgcggtcgccgcggtgcagctttccctgcctgtgctgttcatccagcagtaccgggatagaagcggaggacagatttcctaccctctccagatttgtaggaaatttttcacgatccgcatgaaggcgttttgccactgcatcaatgatacgtgcgttggcctgatgcagtacgaaaaggtcaatatccggcacagcaagtccggcatctgccaatgcttcctcgatacactgcggcacccgtctggtagcgaaccggtacacttcctgtccatccatctgaatataatgttctctgtcatccgtctgctgtttttgatccgtttttgccgctgaagtccttgcatatggggttgtcagttctctcgctccgcattgcaggactccgccaccggtgccgtcggagtgcagtgctcggcccagaatgccaggtgacgcctcgcatcgctccacgactaccgcacccgcaccgtctccaaacaggatacagctgccccggtccgtccagtccaccagcttggacaacacttcgctgccgataaccagcgcattttccgcaagtcccgtccgcagataggcatccgcagtattcagggcaaataaaaatccggagcaggccgcattcacatcgaaagccaatgcattcaccgcaccgatggccgcctgtacctggcaggcacagcagggcagatactgctccggagaacaggttgccaccaggatcaggtcaatctcttctgctctttttcctgcctgttccagcgctttacaggctgcttctgacccgagtgtcacaaccgtctcacccacagacacatgacgctcaccgataccggttctctcccggatccattcatccgaggtttccaccatctgctccaattctttatttgtaacaatccttcccggaagtgcacttccggttccggtgattcttatggtcctcacgccatttcctccatgatatccactgttctttctattttctgcgccctccaggcattgctgccacagaacagcagaccgttatccacatctcccgttgctgcattgatcaacgctctggtgatgcaataaggcgccgtcttcgggtcgcaggtcttaatgcaatgtctgcatccggtcataaaacgttctccggctaccactttttccagaaaagcattctgtatagctctgccgggcatccccaccggacttttcactatgacgatgtcttccttccgcgcactgagatatgcctgcttgtaggcatccgccgcatcacattcctctgtggtcacgaaccgggttcccagctggacacctgctgcccccagggacaggcaatgctccatatccctccggtcataaataccacccgcagcgatcagtggaatttccagttctgctgccttccggatcattgccataagttctctctcatagttctccggtgtgtaagcatccagttcttcccgcttaaatcccagatgtcctcccgctagcggtccctctgccacgataaagtccggctttctgtcgtattttttcatccagtacttcgtgacaaccgacaaggcacgggggctcgacacgatcggagccagcattgtccggtggctgcgcccgggcattccgttttccgtctctgccacgactccgggcagatctaacggcagtccggcaccggagataatacagtcggtacctgccaacactgctgccctgacataatcctcgtagcgctgtgttgccaccatgatgttgacaccgacgataccgcctcttgcgatctgccttgctttttctatttcttttccgatagtgcgcagattacaggcgatgggatctctgtcaaaatccggctcgcggaaaccgatctgggcagtagaaatgatgccgatcccacctgccgcagccactgctcccgccagaccggacaggctgattcccacacccatgcccccctggatcacgggaatatctgcatgtaattcccccaggatcatttttccgtgcttcatcccacatcacctctcgttaccgctttaatacttgcggaacctttcataacgttcctctgcgatctgttcaccggtcatgccggtatatttttgcagaaattccttgatatgttccttgagatacccaccgatggcttccacggtactttggtctgccccaccgtattccggtacgatccgctcgatcacaccaagacgtttcaagtcttcagatgtaatattcatgacttcactggcttctctggcacgatcagcatccttccataatatagaagcaaagccttcgggagacaggatcgagtatgtagcattttccatcatccatacctcattgcctaccgccgtagccagcgccccaccgctgccgccttctccgataaggatacacaataccggtacttttaaggctgacatctccagcagattccgggcaatggcctcgccctggcctctctcctccgcctccacgccgcagaaggctcccggcgtatttacaaagctgataatgggtctgttgaatttctccgcctgtttcatcaggcgcagtgccttacgatagccctccggcatgggcataccgtaattgcgtctggcacactccgcaaaatccttgcccttcacatctgccagcactgtcaccggctgcccgtcgaggaatgccaccgcacctaccagtgctttatcatccccataataacggtctccgtgagcctccactacatagtcgaaaatgtagggaatatagtcggttgctgccggtctgtccactctccggacggtcttgaccttttcccatgccgttctggggagtgtcagtattgaccgttccttcacgatctccgtaggttcaaaatggaagtcaaaatttttcttaaaatccgcataattcccctcactgcaccgatgcgtcgtgatcaggaaatataaggtcttcttcagattctcccggcggacgataccgtccacaaaaccatgctcctgcaaaaattccgctgtctggaagccatcagggaggcgctgtcccagagtctgcttaataactctcggtcctgcgaagccgatcaaggctcccggttccgccatgatcacatctcccagcatagcaaagctggccgttacaccacctgtggtgggatctgtcaaaatagtcgcatagagaagtcctgcttctccatgccgtttgatcgctgcggaggtttttgccatctgcatcagtgacacgattccctcctgcattctcgcaccgccggaacagcagaacaaaaatacaggcagccgcaattctgtcgccttttcaattgcccgggtgactttctcgccgaccacatgccccatactgcccatcataaatttggattcgcagatgccgatcacagccttttccccgtagatctcgcattcacctacggtcacagcttctttcacgccggacttttccctggcctccgacagtttttcttcatagccctcatatttcagtggattgctctcttctatctcctcgaaccaaggctgaaagcttttccggtctgccaccatgcggatccggttgtgggtcttcacccggaaataataaccacattcgtaacagacatatttatttttcgctgcccggtctctgtttatcattttcttacatttcgggcatttgatctctgtttctatcgttacatttcccatacttgcacctcttattctgcgtcactcttatctctctgtcccactcataaaaaacttccacagactatttttattttaccgcaaaggtaagttctgctttcgccgccagttttccgtttactgtggcgatcgcttccccgacgcccaccggtcccttgctgcggataatggtggtctccagttccaaggtgtctccggggcgcaccatctgtttgaattttgccttgtcaatccctgcaaaataagctgtcttgcctcggttctccggcagagacaaaattgccaccgcaccggtctgggcaagtgcctccaggatcagtactccgggcatcaccggatttcccggaaaatgtccggcaaaatacggttcattgaaggttacgtttttgcgtcccactgcccgaacaccgggctccagctcctcgatagtatcgatcagcagaaagggatgtctgtggggcagaatctccatgatttcctgggtgttataaactgacattgttcctccgttctgcgaatgctgtcgtatcaactacttcctcgcattctgcaatcgtcctcgttgatgctctgccttctatcctgtgtcttgaacatctgctgcggttattctatgtacttctttagcaacagactcgcattatgtccgccgaagcccaacgaattggtcagtgcataaggcacctcttcttcatagctgccccgacagtaattcagatccagttcctcctccgtctcacgcagtcccacggtacggtggatatagccttcctgaatttcttttacgcaggtgacgaattccactgcaccagctgctcctaaaagatgccctaccatggatttggtggaattgatcttcagatcataagcatgttctccaaatgcgagtttgatagctctggtctcaaacaggtcattatgatgagtgctggttccgtgtgcattaatataactaagtttctccggcgccacaccgccgtcttttaaggcattcagcatggcggtggctgctccgctgccgtcctccgcgggggaggtaatatggtaagcatccgaagaacagccataaccgatcagctccgcatagatttttgctccgcgtctctttgcatgctccagctcttccagtaccactaccgccgagccttctcccataacaaaaccattgcggtctttatcgaagggaatagaagctctctgaggatcttcactaaacgacaatgctgtcagtgcggaaaatccggcaatgccgatgggtgtaatagaactttccgttcctccggctaccatcacgtctgcatcaccgtactggatcgtacgatatgcttctccgatggaatgtgtaccggttgcacaggcagtcacaacgttcagactcttgcccttcagcccataggcaatgctgacattacctgctgccatgttggagatcatcagaggcaccagcatgggtcctaccctgccgggacctttttccttcaggcggtcatattcccgctccatggcctgtaagcttccgatgccgcttcccacactgcagcccaccatatacggatcttcctgttccataataagacctgcatctgcgatcgcctgtcctgcagctgctactgcgaactggcagaactgctccattctgcgggcggattttttgtccatatattgtgtaggatcaaaatccttcacttccgccgccagcttacaacggtaatccgcagtatcaaaataggttatagaaccgaatccggtcttgccctctttgatactattccagaattcctctacgctgtttccaataggagtgatggctcccatgcctgttattacaactcttctattttttcccatacgtgatatactccctcgcgtcctgacttattttctatcctgctgtaccgttagcggacatattttctattctgctttcctgtttcggaccatttttacattgccataccgccgtccacgcacagcacctggcctgtgatatagtccgaggcatttcctgccaggaacagaaccgcctgtgcgacatcctccggtcttcccattttcttaagcgggatctgtccgaccgcattatcctgtaccgcctccggcagcttgtctgtcatatctgtccggataaatccgggtgccacggcattcacacagatattcctggatgccagttctcttgctacgcttttcgtcagaccgatcagccccgccttggatgcggaataattagcctgcccggcattcccgacgatgccactgacagaagagatattgatgattttcccatatctctgcttcataaaggtcttcgtcagatgccggatcatgtgaaatgcgcctttcaggttcgtatccaggactgcattgaattcttcttccgtcatccgcacgatcagattgtcccgcgtgatcccggcgttattgacaaggatatcaactctgccgtatttccctgttactgcctttacaaaggcttcactctctgcaaaatccgtaacattgcacttcacagtctccgccatacctccgtggcttcggatgtccgtcgccaccgcttctgccgcctctgcagagccgttataattaatgatcaccgtggctccttctgctgccaatgcctgtgcaactgcttttccaatgccccgtgatgctcctgtgacaatagcaacttgtcctgtcagactttttcctgtcagcatgccagttcctccatcacccggtccagatcctccggtttctcgatattgtatactttgacattcctgtcaattttacggacgaaactgctgagtgtcttccccgggccgatctctatgaacgtgtccacgccatccgcgatcatgcgctctatgctctgggtgaactgtacgggactggatacctgttgtttcagcagttccgcaacctgtgacgcatctgtcacataatccgctgttacgttggatacataaggaatccaaggggttgacagcttgacgcttttcagttcttctgccaattgttctcctgcattttttaacagggccgagtggaacggtccgctgacctttaaggggatacagcgttttgcacctgcttcttttagcgcttctgatgccgcctctactgcatctgcctctccggtgatcacgatctgtcccgggcagttataatttgccacggagacgactttgccggtttcttttgctgtctgtccgcagatttttgccacgatatctccgtccagtcctaataccgctgccatggcgcctccttccggataggcctcctgcatatagataccacgcatccttatgatccggaacaggtccggcagttccatcacaccagcagcagccagcgccccatattctccaagacttaagcctgctgccatctccgctttcagtccttttgcctccaatactttcagaatagccacttccatggtcagcatggcgatctgcgtatattccgtaatgttgatataaggattttcttcaaaggtcagctgctccatagagtacggatgtccgctatccgcctgcttttcccgcttatcctgccagtacagattctgaagtaccttgtccgccagcttccataccgcctgtgcttccgggtaagtatcatggaattcttttcccattcctatgtactgggatccctgtcccgggaataaatatgcgattttgctcattttgtcatctcctattactatgtgatgctattgttctcctcggttacagcacattttttataatgcaccgttttccatataactacgttgcctgtcgctgttcgaaatctgttgtcagcggttacctgtcgctatattttatttatgttgtccttgtgccgctatgcactcctgcgcctgctgcactgtttcttcaataatctcacggcaggtctgttctctgcggatcaatcctgcaatctgcccggccatcagggttccgtttacggtatctccgtcctgcactgccttcctgagagatcccaacgtcagcttttccagctccatgaagtctgcattttctttttccagcttcagatattctctggtcatctgattgcgcagggaacgcaccggatgtccggtagacattcccgtgaccacggaatcgatatccttcgccttgatgatctgattcttataattttcatggacaatagattccttcgatgctacgaaccgggttcccatctggattccctcagctcccagcatgaaggccgctgccattcctctgccatcggcgatacctccggccgcgatcaccgggatagacaccgcatccaccacctgcggcaccagtgccatggttgtggtggaaccgatatgtccgccgctctccatgccttccgccactacggcgtctgctcctgcccgctccatcatcttcgccatagctacacttgccaccaccgggatgaccttcactctggcatttttccacagctccatgaattttccggggtttcccgcacctgtcgttaccgcttgtactccttcttccacaacgatcttcgctacttcctctgcgttgggattgagtagcatgatattcacgccgaagggcttgtcggtcagctctttgcatttgcggatttcttcccggacgacctcaggcggagcggaagcggcaccgatgatgcctaagcctccggcattcgataccgctgccgccagcttatgttccgccacccatgccatgccgccctggaaaatgggatattcgatttgtagaagttccgtgatctttgttctcattgtctttctgatccttctcgtcgttctgcgttatattacatattctgatgataccagggtcaaaaggtctaagcccacatgagcttgctcataagtgggtgaaagaccttagggcccgccccgatatgagcataaaagtgggatgataatcccacgatatgcagttcttacgcctgctcctgaatatatctgataacatcacctactgttgccatattttccaattcctcggaaggaatggacacaccatattcctcttcaaatgccattaccagctcaaacagatccagggagtccacttccagatcctccttgaaacgggttgcctctgtgatctctacattctcctggtttaactgttctctgatgatagctgctactttttctaacatgtttttgctctccttatgcattcttttttaatattctgtctttgccgctttgttctcttcggcacaattgctttggcttcgctatatcgtacagcattgccctgcgaatactttgattatcaaagtatttatttgcaatatactacttagatgttgttctgtcaacatctttttttataactaccgctttcaaccttattatcacgtaggcagtaacaatctcattacaaaaggttttttcgtttctccccttgccaaaccggcatttttcagataaaataatctacgttgtaatcttttggagacgtatcgaagtggtcataacggggcgcactcgaaatgcgttagcccttctcgggcacgtgggttcaaatcccaccgtctccgcgcataaaaaaagccgataatctgtgaaaacagactatcggcttttcgttttagaaaaatgtgttacgtctcccgcaggatctgcatgatcgtatcataatgctccggatcatgtgggaaggtgcagtctgagcagtccttgatccgtctgccgtttttcttgaaataccggggattccctgggcagtgctctaggcggtacatagggcagtaacagaacaggcagttgaactccgtaaggcccttatgacaggggaaatatttacagttcttattttcaaaaaaacgataggaattttccatttgcaacactcacatccttccataacctgcaaagtttgcgcattggcgcaaatttgcgtgtgaaacttagaacttcttcacgaaagagcctttgctctgagtgatcagaagttcttttcacacttcacactacacttcttccgccatgcacattccatgggcaatcttctgctctttcagctgttcctccagctggttcaaggcatcatcttcatcctctgcaaacaccatcgcctgatagacttcctccggtccttccggtgccagcgctgtcacctcatacatctgcatggcaattacctctttcttccgtttctatacgaatgtcctttaccgctgtatctgacattttcatccaaaatacatgttcacccttatctttattttatacctgtttccccgtttttttgcaagcgaaaagcgccactccggggaagagtgccgcttttcaggagagatttatgtattgaatgttgttggcgaaatattaacccttgacgcttcccattgccacgccctggacaatgtacttggaaaggaacaggtatacgatgataacagggaagatagagaatgcaatcgttacatacacctgacccatatcaaacttcaggaagtctgcggaacgcagctgagcgatcaggataggtaatgtcttcatcttgtcatcatgcagaaccagtgccggtgtgaagtagttattccagttcgctacgaaagtgaagatcgcctgtactgcgattgccggcttcatcagcggcaatacgatggaattaaatgtacggaactcaccggaaccatcgattctggctgcctctaccagagacaggggcaatgcactttccatgtactgcttcatatagaagaaagtagcaggtgctgcgattgccgggatgatcagggggataaagttatcctccagcttcatatcagctaccaactggataaatccgagtgcggtaacctgggtaggaatggtcatgattgccaggataaaggtaaacatgaacttctttaacttaaaatcatatacatggatcgcatatgcggtcatggtagagaagtaggtacacagcacagcactgcaggttgctactacaaggctgttgatcatacccctgactaccggcagggttcctgccatgacacccttccagttctggatcagatgtgtgctgggcaacagggtaaatccctgtgtcagctcgcctttggatctggttgcatttacaaacagtatatagaaccagaacaggcagagaaaactcataataaccagtacgatatatgcaagtgctcttctggcatgaatgcccagacctttttttgtctcgtttgtttctacgctcaacatttctgccacctcctacttatcctgtttgccgttcgagaacttaaatacgatcaagctcaggatacctgtgataatgaacaacattacagacaacgcaccactcattccgtagttcttactgtacaaatggttgttcaggtacatgatcagggtcatgctggatctcataggatcgcccttaccgttggtcagaatctgaggtacatcgaacatctgcagaccaccgatcagggatgtgatcattacgtagatcagaatcggcttcaacaaaggtaatgtaatcttgaagaatacctgggtagaggttgctccgtctacctcggctgcctcgaagagggaagtatcgatacccatcatacctgccatcaggaggatcgttgtattaccaaaccacatcaggaagttcatcaatgctaccagacctctggtactccatacgtttgtaaggaactgatatggctcttttaagattccgatctgcatcagcatttcattgataggaccaccatcagaaaacagcgtgaagaacaacattgcaaatgcggaagccatgatcaggttcggcagatagatcactgtcttgaagaatctctgtccctttaatctaaggctgggatccgagaaccatgcacccagaagcagagatatgatgatctgcggtacaaatcccagtatccacatgatcaatgtattcttggtgtacatccacaggtccggattggacaacagctttgcatagttaccaaatccgatgaaattcggtccgatctgtgtcagtccggaacggtaattttcaaaaaagctgtaataaaatgtcctgaacaacgggatcaactggaataatacatacactactacaaaggggatcaggaaaatatacccccacttattatagcgtaccacctttccgcgttttacctttgccataatgattcctcccttttgccgtcatgctctcttagcgactttacgtttttcgtgcctttctttgtttccgatcaggctcgcagcagctctcttctttttgttcttaattatcttcttctgaaaaaagcttctgccaaccgggaattttgagagaaaaaccgtgcctacctgaccagccaggcaggcacggttctcaattccttattgtttcgctattcgcttatcatttcggattagtgagtaagctcaggatacttctcttctacagccttgtagaacagattcagtgcatcatccaaagaagccttgccatcgaagtagttcttcatagcatgctggaactcttcgttacatccctgatcgtatgcagacaggttgctcagatcgatcttctcagcgcctgcgcagaacatagccagagggttctgtccgcccagtaccttgctctgataagaggtatctgctgccatagcttccatagcgggtttgttgtttacgaaatcatcatcagctacaacgatctctttcatgatgtcttcatcagtggtcatcttcaggatgatatccttaaccagagaagcgttgtcggttccggtagcaccgcagatccaagtaccgccccagaagaagccctgaggtccttcagtagcgccccagccaccctgatttgcgatagatccatcggtatcagctgccatggagaagttgatcagccaagcgggtccaaagtagcagaatactttgccatcgggatagaagcctttgctccagtcatcagaccacaagtcgaaggtaccggtttccttagcgtcaaccatcttcttggagtcatcaacccacttcatcaggttgtcatcgattacaatcttgccatcctgtacccatttgccggatacgttgttggagtatacacgataagtatcgtttacggaagataccatgttgtaaccggctgctttcatcttctcagcggttgcggtgaaggtatcccaatcagatacagacttctgaacctctgcaggatcatcggttcccagaacagccttagcagcttcacggttgtaaatcagaacgccggggcagccctgccatgaaacacccttcagattgccattggagtcggtaacaacatccttggtgtactgatactggttagccagatctgcatcggtgatgcccagatccttaacaggcattgtgtagtcggtatcaacatatttcaatgcgtagtcagcctcaaccaggaacaggtcgatcttgtcatcagctgctgcatcagcctgctttaacagtgttgcatccagattgttctgataagcgttgtcatcagaaggagtgatgttccactttacagtgatgtcaccgatcttaccggtggttccgtctacttcttcatatccgggataatgatctgtcagacggctcttgaactcctcgttccagcagtagatgttgaagactttgccttcctctgtagcaggttcagctgctacctcggtagaagctgctgcttcggtggatgctgcgggtgctgcctcactggaagctgctgcaggagcatcgttgctgctgccacagcctaccagcatgctggcaagcatagcggttgtaagtaaagcactaagtacttttttcttcatgtttgtttcctcccattttttgttgaatgtttgttgtaagtgcttgttgcatttatcttcatatggttgcggttgcggcgcttccatataaatgcctgattatttgtctgtcgggatctgtgctaccgacttgccttccactaccttaccgggtactatgacctgttcgataatggtggtcttgggtctctctatgaggctgatcagttctctggctgccagacagccgatctgttcggtatcctgttgaactgtggtcagtttgggctccagctgtcttgcgaactgaatcccatcgtatcctgccaccgagatgtcttcgggaatccgtagtcccctctccctgatagcattgatgcctccgaaagaagcgaaatcatccggataaatgatacatgtcggtggatccggaagatccagtaattcgttggtcatgcgataggttgtggcagtatctctgtaagctgcttctctgatgtactcatcgggaatctgtagtcccagtcgttctgccgtccggtagaagctggataatcgtcccgaggtaaccgctgacattgcgccgtggatataggcaatttttctatgtcctctgctatatatgtattccagcagttctttcatacctgtcacattgtccgacatgattgcgatacggttattaaacagatagtcaatagtaactaccgggatggaactctgtactaattcgatgacttcgggatctgcgaaatcgatacaggcgagcaccactccgtcaaagcctctgtacctgctatgttccaggtaggacatccgatccggacggttcttgcagctgttaataaaggtaatgtcgtaaccgctcttctctgctgtccttttgaagctgtccagtacactggaaaagtaatcatgggtcagaccgctttgtgcttcatctacgaagaggactcctattccataagttctgttcgtcttcagtgctctggcggaaaggttcggggaatatcccatctccttggctacccgtctgatatttgctttggtttcttctccaatgtccttgtggtcgttcagtgccttgctgacagttgcaacggagactccacaaatcttggaaatgtctttcaatgatgccataccgttctcctgtttcatgtcttcgtcatttcatccgacctgttttgtaacttaatcgttttcgtagttttaatatataccacctttgagcattttgcaatacttttttgcagtttttttctaaaaagtgtccactttgtctataattaacaatttcaaataggggtttttgtacatttggcttgtacagcaattgtatttcttctatataatggcaaagtatgcgataacgtttgccattattttatttcgtaaatctgcttttttcaagatccgttttgttttgtatcttctgtccatgtttttcttgcgtatttgtatatattgcgcattttacaggctttttcaagattcgtattgcattttcagcactgcttctgtataatacaaatcagaattccggattacttaatcgtttactgaacattaagcagtccgcagcgaaaaagcaaacactcaacatacaacaacatgaaagaaggagattttcttatgaagtatggtcattttgatgatgtgcatcaagaatatgtcatcactactcccaagactccgcttccctggatcaactacctgggttgcaacgagtttttcagtctgatatccaacacctgcggcggatataccttctataaggatgccaaactgctgcgtctgacccgttatcgttacaataatgtaccgacagacatcaacggcaaatatctgtatattaaggatggagataccgtatggaatcccggctggcagcctacgaagaccgaactggattcttacgagtgccgtcacggtatcggttacagccgtttcacctcttccaagaacggtgttaaggcttccgtgctctctttcgttcctctgaatgataactgtgagatctcccagctgactctgaccaacggaagctccgaggacaagaagctgtccgtattctcttatgtagaatggtgcctgtggaatgccgacg

SEQ ID NO: 330 - DNA, 31168 bp, unidentified
  source 1..31168: mol_type = unassigned DNA
ttccaataatacggttttaattacttcttagcatcttttggacgcttagcaccgtacttagaacgagcctgacgtctctttgcaacacctgctgtatcaagagtacctctgatgatatggtatcttgtaccaggtaagtcctttactctaccaccacggataagaactacgctatgctcctgaaggttgtgaccttcacctggaatataacttgtaacttcgataccgtttgataaacgaactctggcgatctttctcagagctgagttaggcttcttaggagtagctgtcttaactgctgtacaaactcctctcttctgtggagagcttgtctcagttggcttcttctttaatgagttgaaacttctctgaagagctggtgcagttgacttcttctctactgtctgtcttccctttctaactaactggttaaatgttggcatgttttcacctcctactttcaaaataaaaaataatataaggcatacgttctcacgcatgccttaccattatatatattgaaattattcgtgtcaagcacttttcaaatttatttattcgttatcagatgtctctgcctctacagattccaagtctgaagcattttcttccgcctcatcctctgcatctgcatcggtatcaactgcatcttctaactctgtgctttccagatcatctccgaagtcgatctcttcatcatcatcaaagaagttgatctcatccatctctgtatcaagctttacagaacgatagcgcttcatacctgtacctgctgggatcagcttaccgataataacgttctctttcagaccattaagcggatctaccttactcttaatagctgcatctgtaagaacctttgttgtctcctggaaggacgctgctgacatgaaggaatctgtagcaagtgatgcctttgtaataccaagcattacctgtgagccttctgccggctgtttgccttctgcgatgagctgctcatttgtatcttcaaaatcaagaacgtcaaccagtgttcccggaaggtaggatgaatctccgttatcctcgatcctgatcttctttaacatctgacgaacaatgatctcgatatgcttatcattgatatcaacaccctgaagtctgtatactcgctgtacttcacgaagcatgtaatcctgaactgcacggatacctttgatctttaagatatcatgtggattaacagaaccttctgttaattcatcaccggcttccagaacctgatcgtccagaaccttgatacgggaaccataaggaattaagtatgcctttgattcgcctgtctcgtcatttgtgataacgacttctctcttcttcttattatcacgaagctgaaccttaccgccaaactctgcgatgatcgcaagtccctttggctttcttgcttcgaacaactcttctactctaggaagaccctgtgtaatatcatcaccggcaacaccaccagtatggaatgttctcatggtaagctgtgtaccaggctcaccgattgactgagctgcgataattccggcagcttcaccaacctgtaccggctgtccggttgccatgttggcaccataacattttgcacatacaccaaggtgtgacttacatgtcaggatcgttctgatcttaagctttgcatcctgtcttgtaacacctgtatccggatcaaggaacggaacaccgtttgaatctacaccctgatttacgatcagagcagctctctttggtgataccatgtggtttgccttaactaaaaggttaccatctttatcgtatacagattctgcaaggtaacgacctgtaattctctcctggaaggattcgattacttcttttccctccatgaaagcttctacttccataccaggaattgcttttcctgcacaacaatctgtctcacgaatgatcagatcctgtgatacgtcaaccaaacgtctggtcaggtatcctgaatcggctgtacgaagcgctgtatcggacagacccttacgagcaccatgcgctgaaatgaaatactccagaacgtcaagaccttcacggaagtttgacttaatcggaagttcgatcgtacgaccggttgtatctgccatcagaccacgcataccagccagctgtttgatctgctggttagatccacgggcaccggaatctgccatcatgaagatgttgttatatttatcaagtccgtccagaagggcttttgtcagaaccttatcggcttcttcccaaaccttaacaacagcgaggtatctctcctcctctgtcataagaccacgtctgaacatctttgtgatcttgtcaacctgagtctgagcatctgcaaggatctgcttcttctcgtccggcaccttcatatctgaaatagatactgaaatagcacctctggttgaatacttgtaaccgattgcctttacgtcatccagaacttcagcagtcttggttgcgccatgtgtattgatacatttgtcaaggatcggctttaactgtttcttaccaacatggaaatcaatctcaagtttcaggatattgtcaggatttgttctgtcaacatatccaagatcctgaggaatgatctcgttgaacagcaaacgaccgagtgtagtatcgatgatacctgtaacctctgttccgtcttctgtcgtaacagttcttcttacttttatcttagagtggagagtgatctccttgttctcatatgcaagcagtgcttcgttctttgacttgaagaacttgccttctccgatatcgccatccttctccattgtcagatagtagataccaaggaccatatcctgtgaaggaacggcaaccggagcaccatctgaaggcttcagaaggttattcggggacaggagcaggaatctacattctgcctgtgcctcaactgtaagcggaaggtgaacagccatctggtcaccatcgaaatcggcattgaacgctgtacataccagtggatgaagcttgattgccttaccttctacaaggataggctcaaatgcctggatacccagtctgtgaagtgtaggagcacggtttaacataaccggatgctctttgattacatcctcaagtacatcccaaacttccggctcaagcttttctaccatcttcttagcagctttaatgttattcgctctgccgctggctgtcagttctttcataacaaatggcttgaataattcgatagccatttcctttggaagaccacactgatagatcttaagttccggtcctactacgataacggaacgtcctgaatagtcaacacgcttaccaagaaggttctgacggaaacgtccctgcttaccctttaacatatcggacagagactttaatgctctgttacccggacctgttacaggacggcctcttctaccattatcaattaacgcatcaacagcttcctgaagcattctcttctcgtttctgacaatgatgtcaggagcgttcagatcaagaagtcttcttaagcggttatttctgttgataattcttctatataagtcattcaggtcagatgtagcaaatctgccgccatccaactgaaccataggtctgatatccggtgggataaccggaataacatccatgatcatccactccggcttattctcagaattacggaatgcttcaacaacttccagtctcttgatgattctggctctcttctgtccgcttgaattcttaagctcagcctttaattcttcgctttctttatccagatcgattgctcttaagagctcctgaatggactcagcacccattcctgcacggaaggagccgtatccgaagtcctcttcagcctttctgtattcctgctctgtcagaacttgcttataagtaagcggtgtgtcctttggatcaagaacgatataagatgcaaagtataataccttttcaagtactcttggagaaatatcaaggatcagtcccatacggctaggaatacctttgaaataccagatatgggataccggtgctgcaagctcgatatgacccatacgctctctacgaacgctggcctttgtaacctctacaccgcatcgatcacagataatacctttatatctgatcttcttatacttaccgcaatgacattcccagtccttgctaggtccaaatattctctcgcagaacaaaccatctttttccggttttaatgttctgtagttgatagtctcaggtttcttaacctcaccatgtgaccattctctgattttttcaggagatgcaagtccgattctaattgcgtcaaagcttaaagcctgttcctgttctggagtttccatgttaaattctggcatcttacaaaatctcctttctaaaattcatcatccgagttgccatcatagtcgtcattgtaatcatccagatattctccgtctgataatgatgtcagctcatcattttcatctgttccgctgaagcccgcttcttcaaattcacgtccatcagcttcccgtttatcatcatcgatcatgctcttaacattctcgtcatacgcttcgatcgtctcaccgagatcaacctctgtcatatcgtcttttacaactctgacatcgagaccaagtgactggaattccttcagcagtaccttgaatgactcagggataccaggtgtaggaatattctcacccttaatgatcgcttcatatgtcttaacacgtccgattacatcatccgacttaacagtcaggatttcctgtaatgtatatgatgcaccgtatgcttccagtgcccaaacttccatctcaccgaaacgctgtccaccgaactgagctttaccacccagaggctgctgtgtaactaatgagtacggaccggttgaacgtgcatggatcttatcatcaaccagatggtggagcttaagataatgcatgtaaccgattgttacagggctgtcaaattcttcaccggttctaccgtcacgaagctgtaccttaccggttctgtcgatcggaacgcccttccattcttctctgtggtctctgttctcatagaggtaattcattacttcttccgaaacagagtctttatatttctcatagaaatcttcccactcggtatttgcataatcattcgccatctcaagagtatccatgatatcaaactcgtctgcaccatcaaacacaggagttgaaaccttgaatccgagaacctgtgaagcaagaccaagatggatttcaagaacctgtccgatattcatacgtgaaggaacgcccagtgggttcaacacgatatcgagcggacgaccatttggaaggaatggcatatcttctaccggaagtacacgggaaattacacccttgttaccatgacgaccggccatcttatctcctacctggatctttctcttctgagcaatgtatactctgactgatttattaacacccggtgaaagttcatcaccgttttctcttgtgaagatcttggtatccatgatgacaccaaatgctccatgaggaaccttaagggaagtatctcttacttctcttgccttctcaccaaagatggcacgaaggagtctttcctctgctgtcagctctgtctctcccttaggagtaaccttaccgacaaggatatctccggcacgaacctcagcaccgatacggataataccattctcatccagatcctttaatgcatcattggacaatcccgcaagatctcttgtgatctcttccggtccgagcttggtatctcttgcttcgcattcgtactcctcaatatgaatagatgtatatacatcatcttttacaagtctttcacttaaaagaacagcatcctcgtagttgtaaccttcccaggtcatgaaaccgatcagagggttctttccaagtgcgatctctccacctgaagtagatggtccgtctgcgataacctctccagccttaacatgctcgcccttgaatacgataggtctctggttcatacagttaccctgattgcttcgtgcgaacttgataacatggtagatatcctttgttccatcttcatctgccttaatacagatttccttacttgtggaatattcaactacaccatctctctttgcaacgatacatacacctgagtcaacggctgcctttgcttccataccagtacctacaacggctgattcggtaagcataagcggaactgcctgacgctgcatgtttgatcccatcagagcacggtttgcatcatcgttctcaaggaaaggaatcatggatgtagcaactgagaataccatcttaggagaaacgtccatcagatcaactcttgatttcgggaactctgttgtatcctctctgtatcttcctgatacgttgttatttacgaaatgaccatctgcatccagaggttcatttgcctgtgcaactctgtaattatcttcttcatctgccgtcagataaataacctcatctgtaactacagggtttgcaggatctgatttatccagttttctgtatggtgcttctacaaaaccatactcattgattcttgcataagtagccagagagttgatcagaccgatgttaggaccttcaggagtctcgataggacacattctaccataatgagtatagtgtacatctcgaacctcgaatcctgctctgtctcgtgacagaccaccgggaccaagggctgataatcttctcttatgagtcagctcagacaatgggttgttctgatccatgaactgtgacaactgggaacttccgaagaattccttaactgctgctgttacaggcttgatgttgatcagagactgtggagtgatcgtctctacgtcctgagtcgtcattctctctcttacaactctttccagtctggaaagaccgattctatactgattctgaagaagttctccgactgcacggatacgtctgttaccaaggtgatcgatatcatcctttgttccaataccatattcaaggtgaatgttgtagttaattgaagcgataatgtcttcttttgttatatgctttggaacaaggtcagatgcatctcttgcgatagctgcctttaattcttcttcgtctgaatattcatttaaaagggtttcaaggacaggatagtatacaccctcatggatacctacttcagcaggatcaaatccaacatacttggacagatctactaccatatttgaaagcacctttacgttacgttcttctgtctggatcataacatatggtacagcagcatcctggatatcctttgcctgtgctcttgtaagtgtcgtgcctgcttctgcgatcacttcaccggttgccggatcgatcgcatcctctgcaagtatctgacctgtgattctgttctggaatgccagcttcttattgaacttataacgtccaacctttgcaagatcataacgtcttggatcaaagaacattgcattgatcaggttctctgcactttctactgcaagaggctcacccggtcttatttttttgtacagctcaagaagaccatcctgatatgtctcagaaggatccttttcaatacttgctaaaatctttggttcttcgccaaacagatcgataatctctgcatttgttccgattcccagtgaacggataagtactgtgataggcacctttctggttctatctacacgaacatagaaaacatcattcgaatctgtttcgtactctaaccatgcaccacggtttgggataactgtacaggagtacagcttcttaccaatcttatcatgtgcaatatcatagtagataccaggtgaacgcaccaactggcttacgataactcgctctgcaccgttgatcacaaatgtacctgtctcggtcataagaggaagatcacccatgaaaatctcatgttctgacatttcctttgcgtcatttgcatggagtcttacttttactttaagcggtgcagcatatgttgcatctctttccttgcactcttcgattgagtacttcacatcatctctacataactggaaatctacaaactcaagactaagctgtcctgtatagtcagtaataggagagatatctttaaatgcctccttcagaccatcggtaaggaaccactggtatgagtttttctgaacttcgataaagttaggcatctccagtacatctttctgtctggaataactcattcggatacctttaccagattgaacaggactaattctgtttttttccatcgacacattcaccccttggaatttatttttaagcgtatattctgttgaaatgcttacatttaaccgaaatatattagccgtgtcattatatgtctggtttgaacgcaaaccaacccatagtatagacatcctacactgtatcacattttcaaggtatatgtcaagaaatatttggaattttttataaaagaattgtatatgaacatttatccatatttatgcgcctgtttgcattttctaaaaacaatatgcaacagcattttattttatagaacagatacataaattcggctataccatgagtgcattctcactctatgcattcaaaaaatcaccccttataagcaagtaatttttcatcattgtatagatatttgtatctgtgttcagaatcttaaaatcacttattcggtctcaactgctcttattgataaaaatgatcagttcgccggaactttgacaaaaacgacctggcaggtaattctcccgccaggtcgaaagatattcataaatacaaggaataaaattactttaatgtaaccttagcgccttcagcctctaacttagtcttagcttcctcagcctcgtcctttgaagctccctctttgataacctttggagcgccatcaacagcgtccttagcttcctttaagccaagacctgtaatctcacgaacaaccttgataaccttaaccttgttaggaccaacttctgtaagttcgatatcgaatgaatccttctcttctgctgctggagcgtctccgcctgctgctgctacaacaacacctgctgctgctgatacgccgaattcttcctcacatgctttaactaagtcatttaattctaatactgataaacctttgattacttcaataatttcctgagttgtcattattatttcctccattaatataatatagtttaataattgctgcttctattaaatagaagccgatgtgcctgtatgcacaaataattaagcttccttctgttctgcaatctgcttgataacacgagcgaagtttgcaataggtgactggatacttccaaggaatttggaaataagtacttctcttgaaggaatgtttgcaataactgcgatacctgctgcatcgtagaatgtaccttctacaacgccacccttaagctcaagtgccggagcagtctttgcgaagttagccaagattctggctgctgctgtagcatctgtcttacagatagctaatccggtaggtccttcgagacatggcttcagtccctcgaactctgtgccttcaatagcgaagttgatcatggtgttcttgtataccttataaacaaccccagcttctcttaactgcttacgaagctgtgtgtcctgctcaactgtaagtccacggtagtcaactacaactgctgtctgagcaccatctaagttagctttgatttcttcaactactggcttcttaatctctacctttgccataatgcgcctccttgttttactaatgactgcacatagttaacagaaagcatcttctgctaaaataagaaaagctctctgtcgataagacagagagcatatagttaaaataatattaacgatatattcctcggtaggtgtttttcaacttatgccatccggcacctactgtcttcggcagttcatcgggagatactttaccataacacaaggaatatgtcaatacgttttttcactttttgatgtaaattttcactttttgatgtaaattttcacttttccatgtaaatttacactttttcgtgcaaatacttttgctcacattatttatgatgtgtaattcttttatatctgtttttgtctggatcttattcttcccatttctttacaaggatacttgcattgtgtccgccaaatccaagagaattgctcagtgcatatgtaatgtccttatgaacgccctcaccctttgtataattcaggtcgatctcgccttctgtctcacgaagacctactgttgggtgaatgtatccatcttcgatagattttacgcatgtaataaattcaactgctccggccgcgccaaataaatgaccgatcatggattttgtagaattgatatttacattatatgcatcctcaccaaatgctttcttgatagctcttgtctcataaagatcattgtggtgggtacttgttccgtgtgcattgatataatcaacatctgccggtgtaatgccagcctcgttgatcgcaagtgtcatggctcttgctgcaccctctccatcttcggcaggggatgtaatgtgaaatgcatcacaggtggaaccatatccgacaacctcggcaaggatctttgctcctcttgcctgcgcatgctccagagattccagaactacgactccagctccttcaccgataacgaatccacatctgtctttgtcaaacggaatcgacgcacgatctgcttccgttgcacttgaaagtgctgtcatggagataaatcctgaaacatttgtctcacagatcggtgattcagcgcctccggctaccatcacatctgcatctccgacctgaatataacgatatgcctcgccaatgctgtttgtccctgtcgcacatgctgttacaacatctgtacattttccctttaagccatatgcgatcgctacatttccggctgccatattcgagatcatcataggaaccatcattacactgacacggtttgccttaccattcataaccttggcatgttccttttcgatcgtagctacaccgccaagtccgttaccgatacaggttccgaatcttgtcagatcttctttctcaagatcaataccggcattcttgattgcttcgcctgtagctgcaactgcatactggcagaacggctccattcttctggctgcctttggatccatatattgtttcggatcaaaatcttttacttcagcacccattttgcatttatattcggatacatcaaattttgtaatctcgccaatacctactttattcttcttaatgccatcccagaattcttctacgttatttccgatcggggttacagcgcccattcctgttacaactactcttttcatctcgttttcctttcaaaagacaatctatccatttagtacatatcatataaatatgtaccgccgtaatgctcattgtaccatttcacctgccggttcaatgttggtttcgcattatgctggtatgtacaaacacatcccatcgcaatgctcattgtaccatctcgtttttaaaaccgcaagtgttggtctgtttctctttcaaaatatctatttctctttcagaatatccatcatctcagcgatcatttcttcatcctgaagccggaacagaatctctactcgtctggatgcttccagatcgacagatccatcctccttataaatcggattgctgtaggactttccatttgccgtcagcacacttcgaagcagttcaacatccgtggagcttatgatcccgttactctcagtcaggcaatactttgcaacagaaaaggctctatgctgggaaagttcaagattataaatataagatccattcgtatctgtatgaccttctataataatctccgatacataatcacgatatttttcatccagcagcactttacagtatttgggaagaaattctttcaagaatgtctttccttcttccttcagatcactgtctgctacatcaaacaaaacgcttgcatcaaaggtgatcgcacccgttttctcgtctaccttgacatttaacgaactgtctgcgaactcatcacggagtgccgccaccagatcacttcggatgcctgcgatacggtcaagctcctcctgctggtcttttaagagctgttcctgctctttgatgatctcctgctgtttatcaagctccgcctgtttactctcatactggctctttgactgcatcagtgtaaaagaaatgatcagaataaagatcagaaggagtgccgccatcatatcggaatacgacagccagtaagaggtttcttcttcctccggtcttcttcgtttcttactcatgccttatccctccctgctgctctgcccgatcgccctcgggcggttcagtctgccccggaagatgtcattctgatctttcgtcaggatacggatatcttcgatatcttcatgcatggacttcagatatgcaagtgtttcttcgattgccttctgtgttgctatcgttgcttccaactgtttcttctggaaatcaagttccagattaccgttatcgtaagtcgcatccggacgcacataccgtttgaactctgctacaaattcatccagtttgtgatatgcctgttccagcaccgtcttaaagatcagattaaatgtcagggaaaagatcattccatagatagaggtatggaacgcaaccttgataccatccatcagaggtccgatactgttcgtgatctcctctgctgaacctgtattaaatgcctgaaggccgattgacagaccgataaaggtaccaagaatacccagccctgtcatggctcccggaaccagactcagacgacccttttcaaccgcatcatcgatcagctggtaattgataaaatcttcgatatcgcaggcatattttccttcctcatcctgctccagacgtttcatttcttccacataatctacataggaatttctcagatgttcctcattaaagataccataccgggtctcggtacgatacagatcccaaagaagcttcttttcttttgcatagtcgcccttgatatagctgatggctatacgaaaatcttcccccatctggtcgatatgcttcaaatgcttatatgcatagacaaatatcgctcccacgattccaaacatacagacactgatcagcacatttgccggatccagactatcatttgtcacattcagtaaaatacagataccgagcatcaccacatagacaacaggcagccactttttattcagctctaccttcatgttctgcttcttacggaatgctcttgccgcacgttcattctgcggccgaatggtttttaaccggtttcgtttgttcattttttcgtttcctctcgtatgatctcattcagccttttcattcgtatctgccaaagcgtttccccattcgttttattgtagcattaatccgcattttttaccatcacaatgcgtaaaaaaacggcaccagatacaaataaattctattatctgtatctgatgccgtatgctaaatacaacatcgtccatctgatgccataagctctaactgtctatctgacgctataagttctgaccctcacctgacaccgaccggctgtaacgcctgtattttcattttaccagccgcttacagaaggtgctgaatatataacctttgctccttttccgttctttttcacaagaaccagtttggaatatccctttttatcatatttcttatacacgatgtagtcgccctgcaacgtataataagaaaccgttgaagtactggtcgcattcttatctttcagcacattataaatctcggttttcttgccttttgaggtcttgtaatctatcgcctgtgggaaatataaactacctatcgtcttgccccgggaggtcagagaacccttggaggtcttgatcggagttcttccatcacgctctgtattcaatacgacagactttgctttctttttattctttccggtaagtgacatggaatatgtaccgatcgtcttatcatattctacatcaccggtcttgatatgctgagtctttgtatagtagatctttttgccggcaaatacaaaattacggcctcttgcaagctttgtttttttaccggtcttaatggacacacgtacgatatactcatctgatccatcagaaccgccataattgtcataaactgcatagagataatttccctttttccttaagctgccaaatccttttccacttgccttggcaatggtttttgtcttcttcgttttgatatcgtagcagaagatccttccggtctctgtgatcgaatagtataccttattattgctgatcacaacggaacatccgccactgccaatatagttatcctgcgtctgatatgtctttgcatctgcctgattcggataaattaagcatccgatcagaactgcaagcatactgaataaaattgcatgtgatttgaaaaattgtttcatatttcatccatctccttaattatttgattaaatatttgcctctatattcttcgcttcttcacgtccggcacggatctagtctctgatgaccttatccagacagccgtgttcttcgcatgaatttcttgcctttcttccctgcgcatcgatatatacgatattgccatcggcatccttgtatgccagagactcatgtgctcctgcgcttggattggtactggcatctccgatcgtaagccatacaccctcaccttctgcaacagtatctgtcgctttatcatacagataattcagccccagatcctcctctgccgcagcacagacaatatctatagccacacaggttatgataccgccacgcaatgccatcgcacggtttaagaccggcatatcgaacatattataataaagcgccataccatcgactgagaatccatcccacagagtcggatttacatctttttgagtacattgatatcccggataatgcgctgtcgttgaaatataatctgcaagagttttcagcttatcataattcgacatatcatctgtccacagctttgcctctacatttctccgaacctttgtatacaattctgcatcaagaagatttccatcttcatcatatggcttcggagcaacatacatagtgtcatataaaacgccatccttgtaagcatccagtctgcacacgcgcacacctgcaccagctgttacagtaagcttacactgtgacattgctttgccggaaaattgtacttttccacttgtggtcggagttgtaatagatgttgtctctccatatactcctttcagattataggtttctacttttatttccggttctgaagtattccagcctgcccattccataagattactgtattctttcggcgtagcatccgataccttataggttatatgctcctctaaccacgcagcattaccttcacatgcaaaccattcgcaaaaagaacctgtaccattcgttacggttgtatttccaacctctttcttcatggtttccccgtacttataaccggacagattaaatcctccaagtggatcttcattattgtatattctcacttttcccaaagcaatccatgtctctttataatgttctgtctcagggaatataatacacaggctggtatgtccgacactcgtacataccacatttccatcctcattctttttggtatatctttctgtataatcgatatattctccccgattaccataagtataatattcctttatttctcctgcacattccggctgtttggaataatgaacctttatttcatctcccagttcatattccattttttccagctctgccgtgccatcccactcttttttttgatcctcggactcctgtccgccggaattcgtgtccccggtagtgcctgagttcccgatggtatctgtatccttagttgcacctgtgtttccagtgatgtctgtatccttggtggtgcctgcgttctcagtggcatccgttacatctgtggtgttctcagacttattgctatcaccagtattcttctgaccggagtccttctttgtcgtcttctttttcactttaacagacttcactttactccatgcgctgtgatattttttcttctttacagtccggtacacacgcactctgacataatattttttgccctgcttcagcttcttaaacgttaccgttgttttcttagcactgactttctggctttttacgtttttcttaaacttcttgtctgtactgatctgaatctgatagctgcccgccttttttgatttcttaaatcttactgtcacctgtcccgctgatctggatcttactgacgtaatagatgtctttggaactgtaaccttactgcctgttttcgcttctgatgtaaatgagcaattcacgcatagcaatgctgccaccatgcaccagacaatgatctgcttcaatctattcttcatgtattatctcaccttttttacttttacacccttcttcacatagtaaacatgctttctataggtgacatttccagtgtaagatttcttccatacaccattcttgacataacattctttcttaccatttttgatgaatgctgtcttgtctgtcttcagaccttttttaacataataagttgccttaccgacttttacaaatccggtcttggtgttctttgcgcccttattcagataataggtcttcttaccaacctttacgaattcattctttgtactgcagacacccttctttacatagtagtacttcttgcctttcttcacgaatccggtcttcttattctgcactacacccttcttgatgtaataggtcttcttgccaactttgatgaatccgcttctgcctgactggatcagacctttctttacatagtaatattttccgtcagatccctttacaatgccattacttgtaagggatacctttggttttgagatcttataagaaccaccattaatgcttcttgccatcttatcgaatactttataaatattctgattatttttcatagctgcaggattcttacccttactgatcaccttctgagctgcaacggtattatttggaaggtcgcccagagaactcattacagaaggatcgcaacataaggcttttaggaactgcactgctgcttcatcctgcctgccactcttaattgcgtagtatgtaccaccccagttataggcaaatggtccctggcaggcagccatcggcttgtcaaatgtaatgctatactgtccccaggtgccagagaaccagccaaataccttaccggatgtcatatcagccacccaagcactgctccacatcgagcttcctgtatcatatccatttctacgggtcgccttcgcgatcttttccacagtcttcttatctgcttcagataacataaataccttgctattatcctcgtaagaatacgatgtatcccctatcatgttattgagaataccctcacaaccactcattgtatattttgatgctccggaggtcatatagtaaccggcctctttcatctttgcagcaacagacagatagccatcagctgttccgatcatcttctgaaccttttcaggatctgaagttccaagaaccttctgtgcaatatccggatcaaacataaatgctcccggtgttgcttccggtgtcatcgctacaagcttgcccttataggttcctgcttttctggtatatggataagactggctgtaagcatctgtaagtccaagcttgtccaaatctgtaaatactcctgtagataaaagtacatccagctttgctgaatccatcaaaacaataaacgtagcttcgggattgtttgcaagcttctgctgtactaatgcataatattcagctgatcctccgccaacttcatatttgatcacttcgatattctttgtataagacggatatttcttattaaccgcctttatcgcctgttccacctgactatcccatgtcagaatatagaccttatttgtctttaatttgctctctttggctgtactgtttacatatacagtaaaggaaactgtgcttgaattacccatttcatcagaaatcacacagtgataatcctcagtcttcagcttttttgttttgtttaccggtgctgtacaggtataagatgctttatgccctaactgtcctacatctcccccgtatgactgtcctttataccatgtatatgtaagcttcccctgattactgcttgcggatacctttagtgttactttctctcctgagttcgctatcaccgtattattgccaactgctttagctgttatatttgaagaatttacataaatataaaattcacaaaattttccatctctactattcttgtcggatatagatacataaacaaactgggattttgtaacatttctcaatgtatatgacaatccatctgcactgacagttccaccatctgcactgacagtttcaccatctgtaatccagttacaactacccacctcaaaacctgccggtagatttaacttactgagatttattgataaggtgacatcttctccggattctaccaacaccatctcctcgtaatcaatacctcccgcctctaccggaaactttagtcccggcagccatatgagtgcagctatagcgatgcacataagcgccagtagtttcttcatttttttcataatcatctctcctttgcttttaaaattgtgatatattactcattataatttacattgtagctatacagatctttgatcttcttacctttattattaagaagctgaagggtgattttacattcacccagtttcttctttgctttattctttcttaacagaatatagtctccaagcacaatatagcttcttctctcgcttgagctggaattaatggccttttcttctcctgtcgcaatattctttttgtttaacaggccaaaagatcccattgagtcatattcatatcccttatactgtgctttctcaccgtcaattacgcagccggatgtgctgaccttaaccttcatatatgttttcggcagattcttgatctttgtctttttcccttttttgtttattttgtagaaaacatcaaagttgttatagacatacaccgcatctctataaacaatcatgcggctgtcctttacatttcgacacactttcgtaagcgctttttgactgattacttttttatgagagccatccagattcatagatgcaaaataataattatagtttgaagtgccatttgaatatgcataatatatcttattcttataaatggaaaactcaaaacccggctccggcaaaacactgcttgatgaacactcaaaaaataattttttcacctttccgtttttcacatttacgcgaataatgccataacacataagaccatccattaaaccacaataaagatatcctttatagtaaaacatgttgctgatattggcataattcttataagaataatatgtattcttatttcttacctgctttggcagctttgctaacttcttgtttgtctttttcttgacatcatagcaaaagatataacccattctgtcacttgaataataaatcttattgcctacctgtaccgcagcataagatgtatcatgcaatctatgacatcctatcactgtctgggaatcatccgccgctgataatgatgctgcctccgtctttaataccggtgccgtaggtatgatcccgccgatacccagcatcgcggctaatacaagacacatgatgcattctttcatcttattcattttcatccttctctctccttttctcttatactctatgccttctatcggttacattgcttttccttatacttatgtaaacctcattgatgtctgtaaaaatgcacaaatattataaaaaaaaaaaacggctgtcaatagttcacaaaatatttctcattttttatatattttgcttcattttactctctcccttctataactatctgcatgtcccttttctcataataggaacatctactatcatagacagggcatcggcagaaaaagttttaaagaattaaaaaaaatccagatacagcatttctgccatatctggatcttttatttatcaatatttcgcaaaatcaatatccttgtaagcaattaattttgctctcagtatatcttattttcgtagtcttgaagatcatggaaaataccatctatataaaccagattatcaactatcctatacaacataaaatatttatgtcctgcaaaattaattcttctatatcctaaatcccgcaactttttatttcgacataattgtaaacttccggcaacatcttctaacttctttttcgtattctcaaagtcatttaataaacttgtcgcagcctgcggatttctctttttttcaatcaaatattgaataatcttcttcaactcctctgctgcatcaatcgtcataaaaaccttatatgccatattttgtcctcatatccgccacaaatgcatctgcatctatacatgctccctgctctgcgtgttttctcgcatcttccagtcttttcagtacatcttcttcggacatactttgatatatgttgttacttcttttaatctcaaatggaaatccatttgcagctactgcctgtgtcaaaaagattcttatcgccgtcgtagtatctgttcccaaatccttgaacaaactatctgattttctttttaattcatcgtctactctaacctgaattgtacttgccatatagtgcctcctttattcttgttgttgtattgtgtttgtattaatatgtcaatatattgtattgcttttatacgtttatattacaatatcgaatataaaaaaacaatattaatgataatttcattacaaaagcaagataaattttgaaaaataaaaatgctataacaaaacaatgccagatacaaatatatactttgtatctggcatttatattctttaagctatattctattctatcttacaggctcatgccaccgtctacacggataacctgtcctgtaatgtaagatgccttgtcggatgcaaggaatgctgctgtctcagcgatatctgatacctcacccagtctcttaactgtgatgtggtcaagcatcgcatccttcatcttatctgacattgcgtctgtcatatctgtcttgatgaatcccggcgcgatcgcatttgctgttacgccacggctgccaagctcctttgctacagacttcgtcatgccgatgattccggctttggatgcagcatagttgatctgtcctgcatttccctcaatgccgactacggatgacatgttgatgatcctgccgtacttctgcttcatcatcggtctgtacacatgcttgatacagttaaatgcacccttcaggttgatattgataacctgatcgaaatcttcttccttcataccgagcatgatattatcttttgtaataccggcattgtttacgaggatatcaactctgccatactgctccagtgcgaacttgataagtccctctgcttctgcaaaatcagctacatttgccttataagcaactgcttctccgccagtttccttgatctctgctacgagactgtttgcacgctcctctgagccattataattgacaactacctttgcgccatatcctgcaaatgtctttgcaatggctctgccgataccacgtccggcacctgttacgactgctaccttatccttaagcattcagttcctccaatttcttcagatcatcaaccgttgcgatgttgatgcatttcatttccttgttgatctttctcataaagccggacagcgtctttccaggtccaacctctacaaatgtatctacgccgtctgcgatcatagcttcgatactctgctgccatctgacagatgaatatacctgacgcatcagtaaagtcttaacctctgaagcatctgttacataacatgcatcagcattacatacatatggaaggaaatcgtctgcgatctctacatctcttaagtatgcatataacttttcaccggccggttccagcatcttggaatggaatgggccgctgacatttaacttgatcactctcttggctcctgctgcctgaagggcttcacatgctttgtcaagggcttctgtctcaccagaaataacgatctgtccggggcagttataatttgcgatctgaacattgcccggagtctcctcacagacctttgcgatcacttctgcatctgtagcgataacggctgccatagcaccctgaccaagcggaacttcattctgcatcaggataccacgctgtcttacggtacggatcgcatccggaagcttcatagctccacaagctgtaagtgcgctgtactcaccaagtgacagacctgcgaatacatctgccttcaaacctgcattctttacatgctcatagatagcaagttctgctgctaccatagcaggctgtgtatattctgtcttgttgatatcttcattttcctcaaagcagatcttcttcagatcaatgtcaagcacactgtctgctgtatcgatcactgccttactgtcttcaaaattgtcataaaaatccttagccatgcctacatactgagcaccctggccagggaaaataactgctgttttacccatttttctcacctgtctattctatttatcggcaattgcgatgttcaaagagtagatgatgttcaaccatttgatttgccaacacagaggcatttgagtccgccggtccttggatggcgctgcaagcggcatcttagtaccgctgcaggacgaaacgagcggaagcgtcctctggttgggaaagtcaagatggttggacatcacacaatatctaaacatcacaattgcccatccctgtatactaaaagaagcagccagtctgtcatccaccaacctgcgccgggcaaatctggtatgtagacatcttcgctgcctcttgtctgcttctgatgtgaattattcttctacacctttgctcttaagatagttaagtacgtcttcgaatgtagcaacgtcttcaagctcctcagctgggatctcaacgtcgaattcatcttccatcttcattactatctcatataaatctaatgaatctactcctaaatcatctttgaagttagtatcgagctgcatctcatcctgtgatactcctaactgctcttcgaaaatagcttttaccttatcgaacatattaataattcctcctaaatatagtaaatgtttatctcactgccccgcggacgattataatataacgcatggatacagtaaagtcaacaaaatactgttccgtttttttcctttttttctatctgtttctgacagcatctaacggctgcagtttcgatgcaaatctcgcaggaaaatatccggcacatatcgcaagcagaatcgctccgacaacggctccgactgcaagctcccatgggatcattgcaatctgcgttccctttgccagatcgaacattttaatagcaatcttatctacgatacccttaaacccatacgataaaagcactcctatgatgccgcctgctgctccgatgattcctgcttctgtaaggaacaggagctgcagctcatccggatcgcatccgagaacctttaatacgccgatttcattgatccggtcaaataccgatgttgtcatggtattgctgattccgatcacggctacgatcagtgcgattgctccgataccacccagtaaaagctgtaccatcttcagatatttctgtatcgtatccaaatactctttctcattttccgtcgtataccccatatcctgaagcttcttcacggtagaatcgacatgatcgatattatcaacagtcacaaccgctccggaatatacaaaatccttgtacggatttccatttgcatcaagcggctgtcctggcaacgtccccccactggatactctgcctaaaaagctctttaacacatccagatcgcagtaaatgctctgtgagtctctgttatatgtatcttctccactgtcaataaccgctccgacttctatcttcaccggtgtcatctcctgcaagtcccaaaaggatagatccactttttttccgatccatgtctctgcttttttcttctctgtcacatcataggtctgctccgtttccggattatagaataaggatgtaaccttatttcccatgataagcaccggcttcacgctcgatgttgtctgctttgacgtctttgtatacttaagcttcgcaagctccgactgtggaataccggtaatcgcaccatcataagaatattttccatttgtgatggtcacatacatctcataggtcggatatacggaactgacatattcaagctcctgaaaagttttcacggtctgatccatgatcatccggtctttgtgcttgccgccggttgctccggtcacctgaatccgacaaatactttcactatccaccatggtattgatcatttcctgtcgtacgccgataccaactgcaagcagggtcacaacagagatcacaccgatcacaactccaagtatggttagaaaggttctggtttttcgtcttttcatattcatcaaacataaatgactgatccaacccatttagaactcctccaatatctctttcttcctctttcttctgcgaatgatccagataacaatgagtgccgcaacaaccacagcggcaacaatctctatgatcatcttactgtaatccttcttctgtacatcctttaccttttcaatatctgtatagacaggtgcacttacgctgatcgagaaattctcttccagcgttgttacatttcccgatttatcttcatatgtaacgataagcttacccatctcaccgccggtgcctgtcgtcttcgttgtgtttgcaagtatatcgatcgagccattcttacccggttcgatattcccgatatagacatcaccttcagatgtaaatcttgtatcgatctttgcctttacattataaagagtagatgcccccagattgctgacacttcccatgatctcgatagaatctccgagggtcacatctgattctgcatatacaccggtgatctcaccgcgctgtttaatcgtaaccggcagatagatcgtatctgtcacggtatatggattgccatagcggtcttcatactcatctgtcactgtcagcttataagccttttcttccagattggctgctgcctgcatcgggaactcaaatgtataagtctctccgccttccagacctgccagatatccggttccggctccggatgccggaatcagttcgcctccttcggaagcaactgccattttcagattactgatctttttatctgcagtattcttgatcgtaacctcaagtgtaaaggttccacctgccactacttcattctctttgatcttataatcagttaccataacctttggctctgctgctgatacagaagccatcgtatccttatatccaaatacagcaaggaatccaagtacacatgccatacagattgtaagtattcgtttcatctctacatctcctctccttctgatatctttccatccgtgatcctcacgatacggtctgcctctctcgccagatcgatgttatgtgtgataagtaccagcgtctgatccagcttcttaacagaatcctgaagcagggtgataacttcatttccattcttggagtcaagtgctccggtaggctcatcggcaaggatcaatgccgggcgatttgccagtgctcttgcgatcgctgcacgctgctgttgtccaccggataactggtttggaagatgcttccgtctgtccttcaggcctaacatctcgatgatatgatcgatgtaatcacgatccggttttctgtgatcgagcaggatcggcatcttgatattttcctctactgtcagtaccgggatcaggtgatatgcctgaaatacaaatccgatctttcttctacggaagaccgacatctcctcatcggtcagtcttgtaatatcctttccgtctacaatgacatttccctcatttggagtatccacaccacccataacatgaagcagggtggatttaccggaaccggatgcaccgacaaccgccacgatctcgcccttattgactgtcaggttcacatcatcaagcgcccatactctggtatttccttctccgtatatctttgttacatgttccatttttacgatttccatagcttaccctctttcctctgcattccccgcagatctttctatctataatttttatctacatatttattgcatttctgttttttaaccttgtcatacagcaactccgttgcaactttccatctgctgtatcaggcttacatttcatgcttactcctcaagcttcaaatcttctaccattgctgccggaagatctctgatccccagccagatgcttccgcagatgatcaggccggatgccacaagtccgactccaaatgcccaccaggcaatggactttcctgcctcgatcaccatattaagatagataaagaatccatatgatatgccaacacctataataaagccgaatacattcgcaacgaccgtcgtcataacaccctctaacataacagtttttaacagacgctttctggacattccgatcacccggagctgtgcgaattcttttcgtctcagatgcagatttccggctgtcgtattcacgatgtttaccgaacttaatacaaagataaacagtactgctgcgactgcataccgaacaaagcttttcaggtatacacagatctgcatagcctctccatataatgaatcctcgttataggacagcaattctgttacagcactaactgatatatgatccatatcgatcttatatttcataccggcaatatcattttctccgtacccggtcagatcaaaataatcaccttgccgcatatagatctgtcggtcagaatccccttcaaatacctgcgttccaagatccagaataccttctaccttataggtcttataatgaccctccgcgatcagccggtctttaatcttcttatattccacatattcctgccgcacggaagtccgttcttctgcgttttttactgtgccgtattcactgtcgctatcttctgtcgtacctgcttttttctgctgtttttcaaattcctgatcgatcttctcctttgctttcagacattctttctgatataaagcaaaatcaactaattgaaccgtatcacccagttcgaaatgataagtatcaaaatgatacgctttatcatataaggtatcattcgtatcatctgcctctttcagatcccaactgttaaagcttcctccctcaacgaccagaataccgtcctcggatagttctgtcgttcctgctttcagatatcttgcaaggtcattcagatcagaatcgtcacatccgatcacatctgtgctgtttactatactttccgctacacttttggtaacttccggatctttatcctctgatgtatctcctgttccatttaacttatccatataaagatcgtaataatatcccatcgtgacctttgtccggaattcatctgtgatctttcctgtataagaatccgtatttacaagatcccccacacaggcatatacctttttggacgctaccacattgttattcttcgacagatcccgaaatacctccgcagatggcaaggtgctctgtgcttcttccaggctcgttgaagctgacgaatacgatgtcagattgatctgatattccccatatttttcacccgtttccttccaatatttccgaatctgtccccagcagctgcatatcagtacgatcgccgatatactgaataccatagctgtgactgtctttataaatcttcctttatttcgaaggacactctttctggcatatgcaccttcgattccaaatatctttcccatcagaccgccgccatgacgacgaagcttttctttcttgatcctgtattcgccacgaaccgcactgaccggtgtcatcttcgttaccagtttggcattctcacgcattacgaaatacatatctcccagataagtgatcaggatagggatcatcggaatgatatggaagcctgcgcttatcttaaatataaatccaaggatcatgctgacaattccgcccatcacaatgccggcaagcagtccggcgatctcaagcatggctcccatccgatagatgatgccgcttaactgtcctttcgtcgctccgatacatcgtaagattccatagtcctttacctgctctaatgtgaacatctggatcgtatttctgataactccgactgcaaagactgcaaatatatatgcaactaacagaaccacgatcaatataacgtcaaatccttcctccatatcctgcagataccaggtggacagatcccagttgagttctgcatccaccccataatcttctatcatctcgttcatgatcttagccatcctgtaaggatgtccggtatttacatacaatgcattgtcatataccttttctacatatttgccatccgttccatcgatcatctcccactcactcaccacatactttcctgtgtatgcctgtgtgacacgatcatccgacgcgatctgtgataaggtttcctgatcatccgtcaggaacacgatctcatagtccgcttcctttcttacatccttttgctgctgcaacatataagaatagaaaatgttcagtcccgcatacaacacgattactgtgatcattacaccgatgatcgtgatcacacatcgttttttgcttgctttcaggtaatatactgcaagtttcttatagtctgtcattttcacctctcctttttatttcaccccgataattttggcctctcttcatcattatcgattttttattcctcaagcttcaggtcatctacaatatcaatcggaagatccttaagggatgcatagatacttccaaagatcaccaatgtggaggcgaccagcccgactccaaatgcccaccaggcaatggtttgttttatatataaaaacatactgagatatgtataaatatatatcgtaaaaatcgaaccaaataagaatcccagaacatttgacaggaccgtcgccatcgtgccctctaacatgaccgtatagatcagtctctttctggacattccgatcacccggagctgcgccagttcttttcgcctcatatgcagatttcctgctgtggtattaataatgttcaccgaactcaacacaaatataaaagcagcaaacgccaatgcataccgaactatatttctggcataagcatatccgtacagtacatctgtaatatcgcctattccggtttcaaaataggataccggcacactgtcaagatcgatcgcgtactttactcctgtcacatcctgttcgccatatccggtcaggtcaaagtaggaatctcttttcatatagatatctccccagtccggaagcagctgatctccaaaatccagaactccctgaactgtataggttcgataatatccttcctcaataagttcctgacggatacgctcagcgatcacatactgttcacgccaggttgatctgccctctttggttgcccgttcttctgagatataggtatctcccgtatctacctcaggactgaccagaatactgtctgccatcatcttttcataagccgcctgatatcgtttctcatattccctgtaatcaaccagctggatcatatctcctacctgcagatcatatgtatcaaaatgctttcccagatcatacaacgtcactccgtcatcatagcttccggaataatccattacgcttcctccgccaacgaccagaataccatcatcatccagctccgcagttccactctctataaactcggacagatagtccagatcattctgatcacaaccttcaatgcttataaatgaactattcagactgtcaacagccttttcatattctacatcatctttctcgctgtattcctttgtattccgttctctccatctctgcatcattgcttcgatgtaacttcccaaactcgtctgttctgcataatctttgttaaacttgccataataggtttcaggatctaccagatttcctctggcactgtataccatttttgtttctgttacatagtaatgcaaagaattctctttgatctcctcgacagaaggcaaatcctcactctgtatccattccacatcattaaatatgctggcaggggattggttttcttccagatatctgccatacatatcattaatattctttttcgtatcatgaaccatacttccggtacttaagcatataatgatcgccgttatgctgagcatcatggctgttactgtctttgcaaatcgtccgctgttccgcagtacactttttcttgcgtaggctccttcaacaccgaacagccgccccatcagaccatttccacgtaccttgatcttttcctttttgatccggtactctccacgtactgcactgaccggcgatgtcttcgtcacaagctttgagcactcctgcataacaaaatacagatctccaagatatgcgatcaggatcggaataatcggtccgatatggaatccgacatcaacatcctttaaaaaaccaaggatcacactgatgatggttccgagcagtacaccgactgcaatgcctgtcacttccatgcctgcccctatcctgtatatgatccggttcaactgtcctttcgttgctccgatgcatcgcaggattccatagtccttcacctgctgcaggacaaacatctgaaccgtattcctgatcattccgacagcgaagatcgcaaagatatatgctatcagcagaacaaggatcagcagaacaccgatcagtccatcttcatcctgaagatataacactgccagttcattatttaatcttgcatccaccccataatcggctttcatattctccatgatcgactccatcttataaggatgtctgacattcacatataaagcatttttataatttacttctacaaatttttcttcatcactggcatattcttcccctgtatacgccccgttatatgcctgaagtatctggtcatctgcagcgatctgcgctaatttctctgtatcatcagacagaaaaacgatctcataatctgcttcttttctcacttcctgccgtgtctgaagcacatacgaatatccaaaattcaatgccgtatataatacagctaccgtgatcatcaccccaacgatcgtaacgatacactgccttttacctgctttcagataataaaacgcgagttttttataatctgtcat

SEQ ID NO: 331 - DNA, 10353 bp, unidentified
  source 1..10353: mol_type = unassigned DNA
cttacgatgaataacaaaattcaaaaaactatacaactctttttaactttcataaaaataggtgcatttacttttggaggcggttatgctatgttaccactgattcaaaaagaaattgttgagaagaagcattggataactgataatgatattcttgaaatagtggctatctccgagtcaactcccggaccaattgcaattaatgcggctacttttgttggctttcgtatctgtggtttttggggtgcactgtttgcaacacttggagttgtgataccatcctacctgattattcttattatatcttttgtacttaaagaatttcaaagcataaaaatcatacaatatgcctttaatggtatcagagctggtgtacttgctctgattatcaaagctctctggtcaatgtatattcaatgtcctaagaatattatttcttatataattatggcatgttcttttatttttactgccttacttaatgtaaatgtgcttattgtaattatcagctgtgcaatattaggtttagtaacatctattaccatattaaggaggaaatgttaatgatttatcttgagcttttttatattttcttaaaaatcggtgcatttacctttggcggtggttatgctatgttaccattgattcaggatgaagttattgctcataattggatagattcacagtcacttattgattttatagcagttagcgaaagtacacccggaccatttgctgtaaatatagcaacatatgtaggagcagaagttggcggtattttcggttctttttgtgcaacactcggagtgatactcccatcctttattatcattcttattgttgcaaaatgttttattcaatttcaaaaaagtatagtcataaagggatgtatgtcaggattaaaacctgctgtagttggtttgattggttctgctgtaatttcgatgagttcaaccgttttcataccagatgggtttaatactactgtttttactgatatttctttttatacatcattaattatatttctgatatccgtagttttagcattcaaaaaattaaatccaattttaattatatgcttatccgcaatactcggaatagtttgcggatacatataattaattataacaaaacatcataaaagactcagatgaacggtcctggatagtttaaattaatgcctgtatcatttttcatcaacaacttggaagatgtagaatttcagataatagctctcctgcgcctcccacagtattgggtggtcaggtgactgtgtcctgaactcgacctgacggagtcttttatgtacagctttagcggcttccttaatagtcttggtaagaagctcctgtgtcatgaagtgtgagcatgaacagcttgcaagatagccgccgtctttgacaagcttaagtcccttcatattgatttccctgtagcccttgattgcgttctttgtagcttccctcgatttggtaaatgccggcgggtcaagtattacaacgtcatatttctcacctgcttcgttaagctttggcagctcatccaatacatttgcacatttaaaatgtactgtattctcaagtccgttaagcttggcattggctctcgcctgttcaacagcatattctgatatatcaagtccagtaacttccttagcacctgcaattcctgcatttaatgcaaatgtacccatatgggtaaaacagtctaatacccgcttgtccttgcacagcttctgcattgcaagtctgttgtacttctgatcaagaaagaacccggttttctgtccattcacaacatctatcatgtagtggacaccattctcaactatctcaacattagtgtcaaattcatcaccaataaagcccttaactctctccatcccttcaagagtacggactttggcatcgcttctttcatatactccacggatatcaatgcctttttcatgaaggatttccttcactttttcgacaataagtgacttaaatctgtcaatacctaaagcaagcgattccacaacaagcacatctgagtacttatctataacaagccccggcagaaaatctgcctccccaaatataagacggcaggcagaggtatctactgtgtcaaatctgtactcaactgcagcccttactctctcctcaataaatgcttcatcaacaacatctgtgtgtcttgcaagcattcttactgtaatcttggattttctgttaataaatccgattcccatgaaataatcatcaaaatcaagcacctcaacaagatgtccgtcaattattccgtcagacatccattcaatttcgttatcatatacccaggcaccgcctgcctttaaggttcttccttcaccttttcttaatcgtatctttccgcatacgctgaataaatcttccattctgttccttcctgtcagatttttctgacatttatcataattattcataatatattaatccgttgacggattaccaagaaaataaaacatacatactcctgcaaccgtaataagaagcgacatgagcttaatccatgaaaatgtagtcttctcacttccaaacagcccgaaaagtcccagcagatacgaaacaattatctgcgcaactacaatcgtaacctccgctttagcaattccaagaccacttatactttttataactgtaaatgttataaatgcacctatcacacctccaagaagtgtaatcttgttatcaaccttaaacagcttcatgatatcaggtcttccgtcaattacccacataatcgcacaagtcgccagtgctgtcaactgcacaaacattgccgtaacccacacactgcttgcttttgtaacatttgtattaaatgcgccctgtaaactcataagtgcacctgatattattgcaatcaaaaatcctgccattaactaacctccccattaatctgcatagaataattattagttaataacaggatatttattcataatgttatttagtactctgcgtactgttttcattattatttttagttgttttttctattgttgttgcaaatgtactgtaagctgtatcaacatttccaccatcatatacctgatgaagcataatctcatatctcatatacacttctcctactccgatatatttagcttttacaacagagtcagaataaatctggtgtaacttctggtagctttctgctctcttaacctttaaatccgcccttgcacagcttttcttagccatgtttccaagataatctgcataatcataagaaattgctcttgcaacagccttggatgcatctacattcttagtgtacggattaactactgccatcgtagtaacagacattgccttagaatcaatatcatctcccattgtaggatactcgcatattccataatctacatctgtaacattaatctctgcaagactgtctgcatcaagcacagtatagagcatatttccagtagaaaacagatctgcacagtctttaagacttactgtatttctgtcaataccaaatgcatcttttaactgagcgtacttagtaagaaccttcttaatcttttcctcattaagagatacctcagccctgttctctgcattaactccgcctatattaatataggctcctgctgctgcataattaaggaacattgaatcaggatcccattcaaacaccattgaaacatcctgattctcatctgtaatctgataattatcacttatattacgaatctggtctatagtatcaactgcttctgcatatttcttattatatacaagaaatgaagtgttgaacgacaccgggtaaccatataacttaccaccatacgaacatgcagtcattgcagccttaccatacacattctcattatagacttcaggatacatatcattctcagaggtaagacctgaaagataagccttctccatctcttcagatgtcagaaaatatatatcacatgcattgttattccttaccgattcgtcatatatataattaatatatgaatccgcctcaatatatactggcttaacagtcaccagttcattagatttcttaaattgtctggcaacgaattcaagataagactcatatgcactgtcattataccagacattaactgtaataggtccactaagattaagcttcttcgcagcctgtgtcctgtcatctttattaccacagcctgcaaagactgtcagcatggtaacaatcagcatcatactgataaatcttcttaatttcataaagtaaactcctgattctagaaggatttcttaagcttagctatgcattcatctacatctgccttagtaattacaagtggtggaacaaatcttataacattagttcctgctgagaacagaataagtccgttatcaagtgctctcgcaattacatccttaggattaactgataactcaagtccctgcataagtcccattcctcgtctctcgacaacaacatctattgtctcaacaagctcatcaagcttttcttcaaagtaagcagatacttccttgacattatctaatacatgctgcttctcaaaaagttcgaacaccttggttgctgctgcacatgcaagtggattaccaccgtatgttgttccatggtctcctggaactaatgccttcgcaacttcctctgtcgctgcaaatgcacctacaggaactccacagccaagagccttggcaactgtaaggatatcaggcttaacgccatactgctggaatgcaaacatacttcctgttcttcccattccgcactgaatctcatcaagtataagaaggattcccttctcatcgcataactttcttacaccttcaataaattctttagtagcaggataaattcctccttcaccctgtactgtctcaaatattatagcacaagttttgtcattaacaagttcctttacactgtcaaggtcgttatactgtgcaaacttaattcccggtatcataggtccgaatgcttcctgataatgcttattaccagttactgcaagtgctcccatacttcttccatggaatgaatgctgcattgcaataatctctgcatcagcttttccgttcttgacataataatatttctttgcaagcttgactgcaccttcaatagcctctgtaccactgttagtaaagaatactctgtccattcctgaagcctttgtaagtgctgttgcagcctctacagccggttcattatagaaataattagatgtgtgtataagcttatcaatctgtgcctttaatgcatcgttatattccttattgttataaccaagtgcaaatactgctatacctgctccaaaatcaagatattctttaccatctgtatcgtaaagtcttactccgtcacccttatcaagtactatctggtaacggttgtatgtatgaatcagcttctcttctgctgtttctataatctgctgtgtattcatgattactctcactttcctattcttatgagcacacattttcacatgggccaatataatattataacctcaacgcttacggttcgcaattatttatctgaatcaaagaatttttctgcatcatctgaaagaatagctgtaccaacacccttgttagtaaatatttcaagaagaaggcagtgtggaattcttccatcaagaatatgtactcttgatacaccatgctcaatagcatctatacagttattaagcttaggaagcataccgccgccgattgttccgctctctaaaagtgttctcgcctctgaagtagaaagctcagatataagtgaatccttatcgtcaaaatccttatatacaccttcgatatctgttaagaatgcaagcttttcagcactgacagctcttgcaattgcacatgctgcgtcatctgcattaatattgtatgcatgaaaatcatcatcatatccaatagggcatattactgggaggaaatcgtccttaagcaatgaatcaagaagtgttgtgtcaacatctgtcacttcaccaacatatcctatatcctcacccttagaatacttcttctcaacctttaacatgccgccatccttaccactgataccacatgccttaactccaagctgctcaatcattgacacaagactcttattaaccttgttaagaaccatctcggcaatctccattgttggctcgtctgtaactcttaatccattcttgaattcaggtgtcatgcctgacttttcaacccatttgctgatttccttgccaccgccatgaacgatgattggcttaaaaccaacgagtttaagaagaacaacatcctgaataacttttctcttaagttcttcatctaccatggcacttccgccgtacttaactacaattatctttctgttaaacttctgaatataaggaagtgcctcaacaagcacctgtgccttcataagttcctctgtcatatcttttgcgctcataataatctccatttcatatttattcagatatatttgctttaaaatgctgtgtcagatcagcttctgtaatcagcatttatcttgacataatcaaatgtaaggtcacatccccatgctgtagcgcttgcatcgccctgcttaacatcagcaatagcaattacaggattctgtgaaagtatttctgttgctttctcctcactgtagtctgtagcagttccatctttaacaatctgaagctcacctgctgaactcttaaagaatatatcaaccttttcagggtcaaagtcagcaccagaatatcccattgcacagagaattcttccccagttagcgtcatgtccgaatattgctgccttagtaagacttgatgtaacaattgacttagcaagtgtcttggcttctgccttagttgttgcaccctttacctgaacctcgaaaagacatgtacagccctcgccgtcacctgcaatcatcttggaaagctctgtaaatacatagcttaagccttcatagaaagcattataatcagcaccctcttctgtaatcttcttattgccagccattccattagcaagaacaagagctgtatcattagttgatgtatctccatcaactgatatcatgttaaatgaatcatcaacaattgcacttgtcatcttctgaagaagtgccttgtcgatatcacagtctgttgttatgtagcagagcattgttgccatattaggatgaatcattcctgcgcccttgcacataccaccgattgttaccttagtacctgcaacttctacttctacagcaacctgcttgcttcttgtatctgtagtcataattgcctctgctgcctgtgttcctgcttctaatgaatcatcaagcattggagcaagcttttcaattcctgcacatattctgtcaacaggaagctgcattccgataacacctgttgaaccgataagtactgcattctccggtacattaagaacttttgcaactgcctttgcttcttctgcacatgcgttatctccttcaacgcctgtacatgcgttggcaacaccgctgtttacaactacagcctgtgcaaagtcttcattatatacaatgtttctgtcccatttaacaggagctgcaaatactttgttagttgtaaatgttcctgctgtaacacatggcttctcactgtatacaagtgccatatctttctttccgttcttatatttaatctgtgcttcacatccggcagccttgaatcctttagctgctgtaacaccgcctttaattatattcataacatcctcctattgtaccatcacatatactctgtcattgtgcatatttcgtcgtgtaaattctgaatttacgctacatttattatggaaacattggtgcaagctgtaatccctcattctctggaagtccgaagagaaggttcatattctgtactgcctgacctgctgcacccttaacaagattatctaacgcacccatcattataagtctgttagttcttggctcaatcttaaatcctatatcaacaaagttgcttccctcaacccagcgtgtttcagggcatacatctttaggaagtactcttacgaaatattccttatcatagtacttgtcatatgctgccttaacatcttcatatgtaacatctttggcaaggttggcgtatgctgttacaagaattcctctgttcattggaaccaaatgtggtgtgaagataagctttaaatcatctcttccacatgcataacctaactgttcctcaatctcaggtgtatgtctgtgagttccgacaccataagccttcatgctctcattaacttcgcagaaaaggttggcaaccttagctccacgtcctgcacctgaagttccactcttagcatcaattataattgtatccggattgattattccttccttaaccattgggtaaagtgtaagaattgatgttgttgtataacagcccggattagcaataattcttgtgtctttgcttaccttgtctctgttaatctcacataagccataaacagcttcatcaatatactgtggtgctttatgctcaagcttataccactgttcatatacattaacatccttaagtctgaaatcagcactcagatcaataatcttagtctttgaaagaatttcgtcattaacaagtgatgcacataagccctgtggtgttgctgtaaatataacatcaacctcgttagcaagctgctccatattgtcgtccatacattttgcatctacaagcttaaacatgtttctatatacatctgaataattctgatctatgtaacttctcgaaccgagccatacaatctctgcatccttatgtcctaataataatctgacaagctcgttacctgcgtaacctgtcgcaccgataatgcctactttaatcataactcctccttgttttgcgaagcaaaatgcatatattcaacatttatgcataaaataacgcaaaatgtaaattgataacctacattatagcaactttttttcttatgtaaaggatattttaaagaaaattcatatttatacatttttattgtatattaatgtataatatgcataatttgttgttgcatttttaaataaagtagtttattataatctgcaggtgcatagcatatgtgttttactatgtaaacttaataatatacggaggaatatataatgaaagaaaaagttattcttgcttattctggcggacttgacacaactgccatcatcccttggttaaaggaaacatacaactatgatgttgtctgcgtatgtgcagactgtggtcaggaagaggagttggacggacttgagcagagagctctctcatgtggtgctgctaagttatatatagaagatatcactgatgagttctgcgacaactacatcgttccatgtgttcaggcacacgctgtttatgaaaataaatatttacttggtacttcaatggcaagacctcttatcgctaagagacttgttgagattgcccgtaaggaaggtgctgttgctatctgccatggtgctactggtaagggtaatgaccagatcagattcgagcttacaatcaaggctttagctccagatatcaagattatcgctccttggagagattctaactggaagcttcagtctcgtgaggatgagattgaatactgcagacagcatggtattcatcttccattcagcacagactgcagctacagccgtgaccgtaacatctggcatatcagccatgaaggtcttgagcttgaagatccagctaatgagcctaactacaagcatttattagttcttggatgcactcctgaggaagctccggatgaaccagaatatgttactatgacatttgaaaaaggtgttccaaagtcagttaatggcaaggctatgaaggtttctgatattatcagagagcttaacagacttggtgccaagcatggtatcggtatcattgatatcgttgagaaccgtgttgttggtatgaagtcccgtggtgtatatgagactcctggtggaacaattctttacgaagctcatcagcagcttgaggaattagttctcgacagagatacaacaacattcaagatggatgttggaaacaagtttgcacaggttgtttacgaaggaaagtgggagacacctcttcgtgaagcacttcaggcattcgttgagaagactcaggaatatgtaacaggtgaagttaagttcagactttacaagggtaacatcatcaaggctggaacaacatctccatattcactttacaacgagtcaattgcatcattcaagacaggtgatatgtatgatcatcatgatgctgacggattcatcaacctcttcggtctttcacttaaggtaagagctatgaagaagcttgagaatgagaagaagaacaataagtaa

SEQ ID NO: 332 - DNA, 9693 bp, unidentified
  source 1..9693: mol_type = unassigned DNA
  misc_difference 8273: note = a, c, g, or t
  misc_difference 8274: note = a, c, g, or t
  misc_difference 8275: note = a, c, g, or t
  misc_difference 8276: note = a, c, g, or t
  misc_difference 8277: note = a, c, g, or t
  misc_difference 8278: note = a, c, g, or t
  misc_difference 8279: note = a, c, g, or t
  misc_difference 8280: note = a, c, g, or t
  misc_difference 8281: note = a, c, g, or t
  misc_difference 8282: note = a, c, g, or t
ttaatcatcaacaatgctttacacggaaagaaacttccagtatatggtgatggaatgaacatccgtgactggttatatgtagatgaccatgcaaagggaatcgatatggttcaggagcagggacgtcttggacagacttataacatcggtggacacaatgagaagcgtaatatcgaaatcatcaacatcattattgaaaccttgcaggagattcttccggatgatgatccaagaaaagcaaatgtaagcaaagatttaattacttacgtagaagaccgtaaaggacatgacagacgttatgcaatcgctccggacaaaatcaaagctgagattggctgggagccggagaccatgttcaaagatggtatcaagaagacaattgcatggtatcttgagcatgaagactggatgaacaatgtaaccagtggtgactaccagaaatattatgcagatatgtataaagataaataaatagaagtatagaaagagaagcggataggaaaatacaagacctgtccgcttttttgtgcgttttcgccagtatttccacgggtactacagaaattattaaggaaaatatagatgaaaaatacgatgtaatatgttataattaaatgatttattgagtgaaagaatgcgttggagaacgtaaacaatatgattaaggaggagattattccatgaaaggtattattttagccggaggatccggaacaagactttatccattgacaaaggcagtatcgaaacagattatgccggtatatgacaaaccaatgatttactatccattatctacactgatgttagcaggaatccgtgaggtgctggttatctctacaccaagagatcttccggtatttgaggagttattaggggatggaagccagcttggaatgtctttctcttatgcggtacaggaacagccgagaggacttgcagatgcatttatcatcggtgagaaattcattggaaacgatgcagtagcattggtattaggcgataatattttctatggacagagcttctctaaagtgcttcgcagtgcagcagagcgtacagagagccagccgggagcaaccattttcggatattatgtaaaagatccaagagaatacggtgtagtagaatttgatgagaatggtaaagcattgtcaattgaagaaaaaccggctcagccaaaatccaattatgcagttccgggactctatttctatgacaatgatgtagtagagattgccaagaatgtaaaaccatctgcaagaggagaaattgaaattacaagtgttaataatgaatatctgaatcgtggaacccttcaggttgagaccttaggaagaggatttgcatggttagataccggaaaccatgacatgcttcttgatgcggcagacttcgtagcagcattccagaaacgtcagggattatatatttcctgtatcgaagagattgcatacaagacaggattcatcgataaagcacagttagagaagctggcgcagccattacttaagactgcatatggtcagtatctgatggacattgctaacggattataaaatagagttgggtattattgtagaaaagcgaggaagataaaaatgggaaaaatcaaagtaacaaacgactgtaatggaataaaaggattaaaagtaattgaacctgcagtattcggagatgcaagaggatactttatggagacctataactataatgatttcaaggaagcaggaattgactgtgaattcgtacaggacaaccagtctgcatccaagaaaggtgtacttcgtggacttcatttccagttaaactatccacaggacaagctggtgcgtgtagtaaacggtgaagtatttgacgtcgcagttgacttaagagaaggttctgaaacctttggaaaatggtttggagttactttatctgctgagaataagaaacagttcttcattccaaaggattttgcacacggatttatcgtattaagtgattatgcagaattctgctataaagttactgatttctatcatccaaatgatgagggcggacttctgtggaatgacccggatatcggagtagaatggccgatgccggaaggaatgacagaggcagacttgattttatccgacaaagataaagtatggcatggcatcaaggcatatgcagagaataagaataactgcaagaaagactgatagacagttgaagtaacataaggagtaaatgatatgtctaagaagagactcgcagccagcctgctggtggtactgtttggtatattggcgaacatcctggttttcagatatgaaccggctttaagtgagaagaaggttacggtaaaggtaacacttacatccgatgaagaaaattatatggagatgttctatctgacagacggacagaaaatgccggatgatttcaaggcagaacaaagcagcggagtgaattataaaaaagctggaacagagaaaacgttagaatatgccgtaccggcagatgtttcatatcttcgctttgatttgggaagcggagcatccgagacaactatttccggcataaccattgaaagtaatggaaaaactgctgtaataggtcagaatgttttttcagaaacagtgcgtctgcaggaagtaaaacagaataatgtttcagacggtattaacctgacagcagaaaaagaggatccttacctggtatggaatacagagaactggggaattgcgaagctggtaaaggacagcctgtggcttcggtatcttctggttaaaatccttgcgtgtgttgtattagatatcattcttattgttacattaaaagcaggtaaaaagctgattgttcttccgaaagaagtgtatcagaacagaaagctgctctggaatttgtcaaagaatgattttaaaactaaatttgcaggttcctaccttggtattatctgggcatttatacagccaattgtaacggtagtggtatactggttcgtatttgaaaaaggattaaaggctggaggaatcaacaccagagcaggaattgatgttccgtttgtactctggctggttgcaggtctggtgccttggttcttcttccaggatgcattaaatggtggaaccaatgcactgattgaatacagctatctggttaagaaggttgtatttaagataagtattctcccaattgtgaaagtagtatctgcactgtttgtacatgtattcttcgtagcatttacgctggtgctgtatagtgcatatcactattatccggatttatatacattgcagattgtgtattatacctttgccatgtttattatggtattgggaatcgtgtatgcaacctgcgcgattgtaatctttttccgtgatttaacacaggtgattaacattgttctgcaggttgggatgtggatgacaccgattatgtggaacattgataccatggaattatctccagtgctgattaccatattcaaactgaatccgatgtactatattgtggcaggataccgggatgcgttgattaataaggcgtggttctgggaaaatgcaccactgactttatacttctggcttctgacagcggtattattcggtatcggaaccatgatatttaagcggttgaagattcattttgcagatgtattataggaaggcataggatatgagcgaagtagcaattagagtagatgatgtaagtaaattatataagctttacgataaaccttcagacagactgaaggaatcgttaggcttgacacgaaagaaattatataaggaacattatgcactgcataatgtttcttttgatgtaaaaagaggagaaaccgttggcataatcggaaccaacggttccggaaaatctacgattcttaagattattaccggagtcttgaatccatccggtggtcatgtagagattgatggaagaatttctgcactgttggagctgggcgcaggcttcaatatggaatataccggaattgagaatatctaccttaatggaaccatgattggtttttccagggaagagattgatgcaaagatgcaggatattcttgattttgcagatatcggtgactttgtgcatcagccggtcaagacatattccagtggtatgtttgtgcggctggcatttgcggtagcgattaatattgacccggaaatcctgattgtcgatgaggcgttgtcggtaggtgatgtgttctttcaggcaaagtgttataagaaatttgaagattttaagaaaatgggaaaaaccatcctttttgtcagccatgatctgggcagtatcagcaaatattgtgatcgtgttgtacttttaaacagaggaaagaagctggcagagggcactccaaaagaaatggtaagcatgtataagcgaatcatggtcaatcaggataaggcagaggaaatcgcagcacaccagatggacatgagttccttggaagaagaggatgaaaaggaaatcaaagaggctgcctgcgaaggacagtggaagaaccattacaatctgaatccggatgtggatgaatatggtaatggtgccgctgaaattgaagactttgccataatagatgagaatggtaattataccaatgcaattgtaaaaggaacacgattccggctgaaatccaaagtaaaatttaaacaggatgttcatgatccgatatttacctatacctttaaaaatatacagggtgtggcaataaccggaaccaataccatgtatgagaagaaggatgttccattggcaaaagaaggggagacttatgttgcaacctttgagcaggatatgttcttgcagggaggggaatacttattgtccatgagctgtaccggatatcgtgacggtgagttccaggtataccacagattatatgatgtatgcaatgtgacggtggtttcagataagaataccgtaggtttttatgatatgaattctgttacgacagtggagaagatagaagagtaagagaaagttgtagggtcaggatttgaatatagtagaaaaggtaggaaaaaataatactgaaaaccagaaaatgaaagaactgctcaaaatagtgcagcaatatactgaggatgattttcagaaaattatatctgaaaagaaggacttcttttttctatatcatctttcgcctatgcgaagaaatattctggaatggtatccttttaagaaagatgcaaaagtattagaaatagatgcagaatgcggggctgttacaggatgtattgctgataaagtattacaggtgacaagtcttgaaaacaatgatttgcaaagacagataaatgaatgcagaaatagtaaaaaagaaaatctcagagtgtttacaggaacatatgataaaatggaaaacgagttagagagagattatgattatattgtaatgatcggctcattttcgaaagcacctgattattttgctgatgaaaaaccatatcatacatttataaaaagtgcatttaatcatctgaaagacggtggagaaatactaatagcgtgtgataatcgtataggaatgaagtattggtcaggttgtcaggaagaattatattctgattattttattggaatacaggactatataggttttgataaccataagatgagaaacttttcaaaaaaagaaatagagaatatattacaggaaataagcaatctggaatataaattttattatccatatccggattataagtttccgatggcaatatattctgatgaatatctgcctaagaaggcggaattaagtatgaatataagaaattttgacagaagccgtctgcttttatttgatgagacaaaagcattcgatggaattattggtgccggacttttccgggagttttccaattcttttttgcttaggataaaaaaaggagactaaaagagaatggataaaattctttttgttaaatattctaatgatagagccaatcgattcgccatttgtacagagatttttgcaaatggggataagaagcttttaaaaaaaagagcaacaacagaaagtgcaagagaacatataaaaaatatagcatcatattatgcacctttgaaaagacaatttgaaggagcccttaatgttgccggatgccaaaaagagtatgatgaaataaactttgagatggtagaggggaatggattagataaaattattgactcatattttgaaaaaaatgagatggacaaagtttttcaaatcatatcagagtttgctcaaaaaatatatggattaaaagataaggatgtatttacaattacaccctcttttgaaaaagtttttggtatggtgcattttgaagaaacacagtatgctttaaaaataacagatattgatatgctgtttgataatattatcgtaaaggataataactggacagttattgattatgagtggagctttcaatttcctataccggtaaaatttgttatatatcgtacattagcttattggtatgcccgcctggaaaatagaagaaatatggaacaggattttttgatggaaatggttggaataactccacaagaacagattcaatttgcaaaaatggaaaagaaatttcaacagtatatcatggatgataatattccattacgagatatgccgaaaatgatgaaccataaaactgtagatttaaatcacatcctttccgcagttgaacttgaagaaactatgcaggtattctatggaaaggataggaattttaaagaagaaaattcttactttaaaaaagtgcaggaattagaagatggaaacctgaaggtgaaagtagaaattccagagggaatgcagcaactccgactagatccggttgaggagccatgtatcattagcatagaacatatttataatgcgcagggcgaagaaaaagaaaagatagaaacaaatggtgttgaactctcaaataagatttttttctttgaaacgagtgatccgcagattttattgcaggcaagagaagaagatggatgcttaaacatcgtttatagaaaaataaatttaaatgctttttcaaaagatatcattcataatatagattttatcattagggatgagagagaaaagaatcgactgggacaagctgcattacaattagaagtagaagaaagaaagaacaaagaagctttattgaagaaccaaatagagataaataatgaactatcaaaaaacaatgagaatttaaaacttgaaaaggaaaatttaaatttccagatagaacaatataaagaaatgtatgaagcaatcataaattcaaggtcatggaaaataacaaaacctatccgtgatatggcagataaaatgaaaagggttaagaaaaaatgataagagaacatgttgcaattgaagaaaaagaatatatttatagtattgataaaatttgttgctatgtcaatgatgataacagggcatatttacaaattgtaggttgggcatttcttaaaagtggcaaaaacaaaaatttgcaggtttatataaataataagcaaactgaaatgtatatgaaatatatagacagagcagatgtccaaaaaatgtataaagactataatattaacttaaattccggctttgtaatagatgtggaatttgaggtggagaatcagaacgagtgcaatattggtattggatttgaaagtggacaaatattgtttgaggcaaacttaaaggaatatatggaattcgaggtagagcctgaaatcaagtattatatcgagcaaaccatatataataatgaaattatatctattgatggctggggatttgccgcatcagttattgatatgcagaaaatagacagtgtaccagtagagttgagcgttataaatgaagatggtcagcaggaaacgattgtgttgaaaagaaagtatcgggctgatgtaaatgaaaattttgggttagagaaaagtaaaaaagaatttggatttgaggtaaagtggaaaaatacgcaaaaaaataaaggcatttatactgttgttttaaaaggcggaaaaacttctgaaaaatttattgtggaatgcaataaattagtagatcaggccagggaagaaaacagaaaatatgaaaattttttcgatatgttaaagaatagagatgaagaattgttcatagatgattggcattatctggtaaactttggatggaagaagtattgtgacagaataaaaaagcggtttcaggatacagaagaggtttataatgtctggagaaaaaaatatatcccgaatgcaagaaaattgaaaaagcagagggcagaaaagctggattatgaacnnnnnnnnnntattatagtgcctacatataaaacaccggaaaaattcttgaaagagatgattgattccgtaagaaatcagagctatgaaaactgggaattgtgcattggagatggcagcgttacagaggataccgttaaaaatgttgttgaaagttatcagaaaaaggataagcggataaagatgctttgcctttcagaaaatctcggaatagcaggaaataccaatgcggcgttgtctatcgcaacgggagattatatagcattactggatcatgatgatatactggcaccagatgcactttatgaagtcgtaaaatggatgaatgagcattataaagatgaaacagatgtcatttataccgacgaagataaagtttcttttgatttaaaggattattttgaacctcatttcaaatcagattataatttggatttgattcggagtaataactatatctgccatttatttgtggctagaaaaagtattgtggaccaggtgggtggtttccgaaaagaatatgacggttcacaggattatgattttatattgcgttgtatagaacaaagcaagcatgtagaacatgttccgaaagtattgtatcattggcgttgtcatccgggctcaacagcagcaaatcaggaaagcaaaatgtattgttatgaagctggaaaaagagcaatagaagatcacttaaaacgcatgggagaggatgactgtcaggttgtaatgacagagcacctgggattttatcatgtgatatatccaatacgtgaacagaagaaggtatcaattattataccgaataaagaccagaaagaaatactggagcgttgcatagagtcggttatacagaaaacagattacaaaaactatgagattattattgtagagaataatagtacaacaaatgaaatatttgaatattataaaacaatagagcagcgtgaaaacatccgggttgtaatatggaaggacaagtttaattattctgcaataaataattttggagtaaggtatgcgaatggagagtaccttctgtttttgaataatgatatagaagtaatcagggaaaactggttgagtgaaatgcttgcaaatgttcaacgtaaagaagttggaatcgtaggagcaaaattgctttatccggacaatatggtgcagcatgcaggtgttattattggcatgggtggaattgccggacatccattatccagacatccggcagatgattgtggttattttgcaagaggaattatccagcagaatctgaatgcggtaacggcagcatgtatgctcacgaaaaaagaagtttatgagaaagtgaatggatttgaagaaaagctggcagtggcttttaatgatatcgatttatgcctgaaagtaagaaaagcgggctatttaatagtatatgatccagaa

SEQ ID NO: 333 - DNA, 14569 bp, unidentified
  source 1..14569: mol_type = unassigned DNA
gtggaatcaaaagcgtcaaaagataaaaaattcgacagtatctatcgggcgtataaagattcaatctttaaagtggctatgcattataccaagtgtgaagatctggcaagtgaaattacacaaaggacattttttcagttatatatctattttgaaaatgtagatttagaaagtgtttatccgtggctgataacaacagctagaaattctgcgtttaactataatcgagatagaaaacgcgagatattagcaggagtatttgatctatttagagggacgaaagacagagtctgttatataaacaatatggaagagtattatctgaggaatgagcagaagagaagggctgagtgcttggagtttagaatctttgaacgtttatataaggaacatagaatatggtatgatgcagttatgcaggtatattgttttggaaaatcacaacaagaggcagcagatcaattaggaattgcagttgaagtattgaatagtagactatatagagccagacaatggatacggaagaattatgagaaggaatatgaagaagttgtcaactggttctgagaaaacagatggtgccgtttcggcaccatctgttgagttatctcgctttgtttcagtgagcagcttcttcgattagtttaataattgtattaatagagtcctgctgtgaagagtgtttcatagcatttatgtaagtgtttttgtgttgatataatttgtagatggaatttaaaagtgtatctttacttaaatcttcttcctctaaaacaacgctgaaaccttgatgttcaaaagaacgagcattcaaaatctgatctccgcggcttgcatttgcagaaagtggaactaaaagattcggtttgcgaagtgcaagaagttcacagattgcatttgcaccggcccgtgaaattacaatatcagtgagtgcaaacaagtcttttaactgattctgaatgtattcaaattgaacataaccttttaaagattttaaggagtcatccatctttccttttccacagaggtggataacatggaagtcttttagtaactcaggaaggatagaacgtatggcattattgacaacaacagagccaagacttccgcctataattaaaataacaggtttgtcatcggttaaatcgcagaattcaagtgcagcagttttgctcccttctaataattcctgacgaatcggagaaccggtaagcactgctttttctttaggaaggtgttccaaagtttctggaaagttacaacacacttttgttgcagatggaatggaaatcttgtttgcaagtccgggggtcatatctgattcatgaataatagttggcacatgacggcgttttccagccatgacaacaggaacggagacaaatccaccctttgaaaagatgatatccggttttaactctttgattaatttattggcttctcggaatcctttcagtacccgaaatgggtcagtgaaattttgcatactgaaatatcgtcgaagcttaccagaggaaattccgtggtaaggaatttcaaattgttcaattaattctttttcaatacccgtataggaaccaatatagtgaatatcatatccgagtttttttagacggggcagtaaagcaatattaggtgtaacatgaccggcggtaccaccaccggtaagaataatacgtttcataacattcctccgaagttttttctataaaataatattaaacagtattttgtcaaaggtcaagaggaatggacaaaagaacgtaagtagtgtaatgtacaggaagagatctgttgatagttgcataaggagacattatgagtgaggaaatgaaacgatttttgcaagaagaactgaaaaaagaagcggatgagattatgcgggaggtggaggcggatcaggatgtagaaagtctgacagcaccttctaagatagatgaaaagctatatgagcagattagacaatataaagaggagcaggaggtattaggagaaaaattgtcgaccgaacagcaggagttaattcgtcttggaaaaatttacaaaagaaaacaaaagagacggaaatatgtggttctggcggcagcagttatggcagcgtttgcggtgggaattacaagtgttggaggaccggagaggatatttcggaagttcagtaatataatggctagtagagatcagatggtgttgaactcagatgatgaaaatgtgacagaggtaaaaggaagcacagaggaagaagcatatcagaggataaaagatgagtttggatttgatccggtgaggatggattatttacctgaaagcatgaagtttcaagaagcaactatcttgggggaaatacaagacagctattttatatatagcaatgaaaagaaagcaagtgttctgtattatataaacgcaaattataatacaagttcatttggagtagatgtggaagatactcttgttaaagaatatgatatagaaattgatggtgtgtgtatacatattaagcagtatcaggtttcagacagcacagagaagagaagcagaggctcttttgaatatgatgggatacagtattttattattggaaatggtctaaaagaggcggaatttgaaaaaattttaaaaaatttacattttttttaaaaaatagcgttagtttttctcgacttatgtgtatatatagtataaggacaaaaaggagagaaaaaaatgaagaaaaaaatattgatgattgcaagtgtatttacgtttggattagctggaacgattacaagtgagacaatctcacatgcgcaggagggcagcaacataactcaagactattcgtatttattgactggagataccatcattggacagatgttgccagaaacaagagggatatatttgtcaacaggcacgtctactatcagcgatgcaggtacggggaaaatagctgcgggaggagttacaatagctgcacaaaagtgtgatgtttctgtaaatgttattgtggaaagattatcaggaggtagttgggaaagggtgacatcgtggacagcgaaattaagcaacacgtggtctgtaggaacagaaaaaattctcagtgttggacgtggatattattatcgtgttagaagtgttcattatgcgcatacagatgtaagcagttcgtggaccggaaatctttggagatagtaaagtatcattaatctgtcatgtctctgggggaactgtcgcagccactgcaagcgtaattatgaggaaactcataaactaacaaaaattagagagagagcttacatcaagaacaaaaccacatagctcatagagctaaaaatctacggatttgcagtggctgcgatagttcccccgggtaaaaaaggaatggaatcatccattccttttctttttgaattataagaaattcctttggaatcctataattcaaaaaatgcacttcgtgcaaagatgcgcaatcttttttacgtgatttataaaaatatataagataattttgaaatttattttccggtagcttgtcttaatgcctgagcaagctggtctgggcaggaagttggacgtggaccgcatttgataccttcaatgcgggcgattgcatcgtctactttcataccttctactaaacgggcaacaccctgtgtgttaccggagcatccgccaacaaattctacggagcggatagtgtctccgtcaagttctaattttatcatacgggaacagactccctttgttctgtattccatgaaattatcctcctctgaatgtgatattagattaatagtgtttcacatattataacaaatgggatatgaaaaaactagaagaaacaaaactttttcttttacgtgcaagtatgacccctcaaaggagtgtttcttctacggactgacaggagcagacagcaaccaatttgtgaatattttcaaaaaaactgtgaaaagtgcttgatgtatgggcaaaaatattataaaatacaaaacgtatggaacgcagaaaagtttagagtttcatgcaaatatttttggcagtgaatgctgccttattgattgagttagaagctcaaattttataagttggttactttataaccggtgttgagaacaacacatcaacttgtgaaacggtcaataagagtattaaaagtaaaatatttgctatatagactctaacataaatatctggaatgtgaagaaggacagtctcggactgtattgttcgcatgaaagtgataaagaagtagacgcaagcaagaatgatgtaaattcctgcctgcgttttttgtatgtaaaattacgcgtggtaaggaattgtagtaacctgatagaaaagaggaacgataagatggaaaaagaattacagcagagagcaccgatatatgaggcattggaacgatttcgaagaatgcgtattgttccgtttgatgttccggggcataagcatggaagaggcaatcctgaactggtggaactgcttggagaaaaatgtgttggaattgacgtgaattctatgaaaccgctcgataatctgtgccatccggtatcggtcatcaaagaggcggaggaactggcagcagatgcatttggagcaaaacacgcatttttaatggttggcggaacaacttcttccgttcaggcaatggtgttgtcttgctgcaaaaaaggcgacaagatcatacttccgcgaaacgtacatcgaagtgttatcaatgctcttgttctttgtggagcgcatccggtatatgtgaatccggatgtagataaagaattgggaatttcgcttggaatgaaagtgtcacaggtagagcaggcgattcgggaaaatcctgatgcagtggcagtatttgtaaataatccgacatattatggaatttgttcggatcttaagacaattgtaaaacttgcgcatgagcaggatatgaaggttcttgtggatgaggcgcatgggacgcatttttactttggagagaatttgccaatctcggcgatggcagccggggcagatatggcatctgtcagtatgcacaaatccggtggcagcctgacacagagttcatttctactcattggcgaaggagtaaaagaagggcatgtaaggcagatcattaacctgacacagacgacgagtggctcatatctgctgctgtccagtctcgatatttccagaagaaatctggcgcttcgcggaaaagaggcttttggaaaggtcgctgcacttgccgactatgcaagagaagagattaataaaattggcggatattatgcgttttccaaagagcttgtgaatgggagcagtatttttgactttgatacgacaaagctctcgattcatacgctggaactgggacttgccggaatcgaagtatatgacattttgagagatgagtatgatatccagattgagttcggagatatcggaaacattctggcatatctgtccatcggcgaccgcaagcaggaagtggagcgtcttgtgagtgccttggcggaagtaaaaagacgctatcaaaaagataaaacgggaatgttgacgcaagagtacatcgacccacgtgttgtcaccacgccgcaggaatcattttatgcggaaaaagagtctcttccgctgagcgatacggtaggaagagtctgcagtgagtttgtaatgtgctacccgccggggattccgattcttgcgccaggggaagagattacaaaagaaattttagattatattatttacgcaaaagaaaaaggatgttctatgaccggaccggaagatgcccagatagagtatctgaacgtgctgaaataacagggaggtgtaagcgatggagatgtggttccatgatgaacatacggacaatgtaaaattggcaatccgagtggattatcaggtgttttcggctcagagtgagatacagagaatcgatgtgcttgagtcgaaagagtttggcaaaattcttgttgtagacggagatttgatgctgaccgaaaaagacgagtttatctatcatgagatgatcagtcatgtgccgatggcagtgcatccgcaagtggaaaagatacttgtaatcggcggaggagacggcggtgttgtaagagaacttgcgaaatatgatacggtggagcagattgatgtggtagaggcagatccacttcttgtggaggtgtgccgaaaatattttccacagatggcatgcagtttgaatgatccgcgtgtgcatatttatcatgaggatggactgcggtttatccgttccaaatccgatgcgtatgatttgattatcattgattcgccgaatccgtttggcgcaggggaagggcttttcacaaaagaattttatggaaattgttttaatgcgcttcatgaagatggtattatgatcaaccagcatgagagcccgttttacaaggaggaggcattccaatgtcagagaatgcacaagagaatcattgaatcctttccgatcagcaggatttatcaggcacatatcccttcctatccgtcaggacactggctgtttgggttcgcttcaaagagatatcatccgattcatgatatggatggaattcagtggaaactgcgtgggattcagacaaaatattatttgccgagactgcatgaaggagtatttgcactcccggcatatgtggaggaattagtacaagatgttgaataaaaatattgtgacgtttataggatgcgagtctgagtatgaagatgcaaagattgtgctttacggagcgccgtttgactcgacaacgtctttccgtccaggcacaagatttggaagtgccgcgatcagaaatgagtcttttggtctggagacatacagcccgtatcaggacaaagaactgacggagtattgtgtgtttgacagcggagatctggaactgccgatgggaagtgcaaagaagtctcttgagatgatagaagaacgatgccgtgtgattttgaaggatggtaaagttccgtttatgatcggcggagagcatttggtgacacttggcagtatgagagcggcggttgagaaatatccccagcttcatatcatacactttgatgcacatgcggatcttagagatgaatatctggatgtgaaagagtcacatgcatgtgtgatgagacggtgctgggaacttgtaggtgacggcaaaatttatcagtttggtattcgctcaggtgacagagaagaatttctctgggcgaaagaaggacatgtgacgatgcatccgtttgacttgaacggtttggaagatgcgatagcagcgcttaaaggaaaaccggtttatttcacggtggatctggatgtgttagacccgtctgtatttccgggaacaggaacgccggaggctggtggagtgagctttaaagagcttttggatgcgattataaaggtgtgcgagggctgcaatgtcatcggatgtgatgtgaacgaacttagtccgcactatgatcaaagcggcgtgtcaactgcagtggcaggaaagattgtgagagaatttttaattgcattggcaaaataaatcaggataaaaacaggaggaagaaaaatgggaaaaatattaattattggctgtggcggtgtagcaagtgtggcaattcaaaaatgctgtcaggtaagtgaagtatttacagagatgtgtattgcaagccgtaccgtttcaaaatgtgaggctttaaaagaaaaactggaaggaaagacaaatacaaagattacaacagcacaggtagatgctgacaatgtagatgagctgattgcattgattgaaaaagaaaaaccggaagtagtactcaatcttgcacttccatatcaggatctgacaatcatggatgcatgtcttgcgacaaaagtacactatattgatacagcgaattatgagccggaagatacagcaaaatttgaatataagtggcagtgggcatatcgtgaaagatttgaggaggctggtatcacagcgcttcttggaagtggatttgacccgggagtgacaagcgtattttctgcatatgcattgaaacactattttgatgagatcaattatattgagattatggattgtaatgcgggagaccacggttatccgtttgcgacaaacttcaacccggagatcaacattcgtgaggtgtctgcaaaaggttcctactgggaagatggtcattgggtagagacagagccgatggaaatcaaacgtgtttataatttcccggaagttggagagaaggatatgtaccttcttcatcatgaagagatcgaatctcttgcattgaatatacctggaattaagagaatccgtttctttatgacatttggacagagctacctgacacatttaaaatgtttagaaaacgtaggaatgacttctattgaaccgatcatgtatgaagggaaagagattattccgcttcagttcttaaaagcagtacttccggatccggcgtcattgggacctcgtacagttggtaagacaaatatcggatgtattttcatcgggaaaaaagatggaaaagaaaagaaactttatatttacaatgtatgtgatcatcaggaatgctacaaagaggtgggctctcaggcaatctcttacacaacaggagttccggctatgatcggtgcgatgatgatcatgaacggaacatggaacaaagccggtgtatacaatatcgaagagtttgatccggatccattcatggaagcgttgaacaaatacggactgccatggaaaatcagtgaagatccggaattgatcgattaaatttgaagagagaaaaggtgaggagaactgatgagaagaaatgaacttccaacaccgtgttatgtcattcaggaagaacagctcagacaaaatcttgagatactaaaaggtgtgatggacagaaccggatgtaaaatcctgcttgcccagaaagcattttccatgtatgaggtgtatccgctgattgcgcaatacctttcgggaacaacagccagtggtttgtacgaggcgaaacttggggcggaagagatgggaattccgtttggaaaagagacacatattttttcacctgcctataaggaagaagaatttgaagagattttaacttactgcgatcacattgtatttaattcttttgaacagctggaacgatttggaaagagagcggctgaggcgggaaaaagtgtgggacttcgcattaatccgcagtattcaacactggaggggcatgagatctatgacccatgtgccgctggatcgaggcttggggtgacggttgagaaattcagaccagagcttttggaatatgttgatggtctgcattttcatacattgtgtgagcaggacgcgcagcctttgcatgacacactgaaagaagtggaaagacagtttggggaatggctgccgaagatgaaatggctgaattttggcggcggacatcatattacgagagagggctatgacatcgcattattggagcggtgtatttgtgagatgaaagaaaagtatgacttggagatttttctggaaccgggagaggcagtagccttaaatgccggtgtactgcttacgaaagtggaagaaattgtggaaaacagcatacagattgcgattttggacacgtccgcagcatgtcatatgccggatgtgcttgagatgccataccgtccgccgcttcaggacggctatgaggcggaggagaaggaatatacttatcgccttgcgggaccgacctgccttgcgggagatgtaatcggtgactattcatttgaggagccgctaaaaagaggtgatacactcacatttgaagatatggcaatctacacgatggtcaaaaacaatacattcaatggaatgcgtctgccggcaattgtattggaagataaggatggagaatgccgggtggttcgacagttcgaatacgaagattttaagatgagattatagaaatgaggaaacagttatgataggtattataggagcgatggaggaggaagtagctgcgttaaaagaggctatgacaattgaagaaaatgtcacatttgcgtctatggatttctgtagaggaacactgtgcggaaaagaagttgttgttgtcagaagcgggattggaaaagtcaatgccgcaatctgcacacagattttagtagacaaatttggggtggatacattgatcaacacaggaattgccggttctttagatgccaatattgatatcggagatatggtaatctctacagatgcggtagagcatgatatggatgcaagtattttcggagatccaatcggacaggtgccgcgaatggataccttttcatttccggcagatgaagagctggtagagaaggcgaagactgccaatgaggaggcaaacccggatattcacacattcgtaggacgtattgtgagtggagatcagtttgtatcgtcaaaagaagtgaaagataagcttgtagctaattttgaggcgaaatgcactgagatggaaggcgctgcaatcgcccatgcggcgtacttaaataaagtttcgtgtgtcattatccgagcaatttcggacaaagccgacaacagtgcgacgatggactatccggcgtttgaaaagcaggcaatcacacattctgtaaggcttgtgaagaatttgctgccacgcttataaaaaacatgtgacaaatcatgcaaaattcgtatgatttgttgttgaaatatgtaaaacgattcaagaacccaacttctttatttgctgtataatagcggtagcaataaatataaagaaggagggctctttttattatgttagagacattagtgcaaaatcaaattattttttatgcaatgggagtggcagcggggattggagttttaagcaagctggttgcccatattacattgagacgaatggtgaaagcagccagtagaatgaacaaaagtaaccataagctgatgagacttgtacgagcaaaatttgaacatgccagtatggtgagcgataaagtgcagaacgtggaagcatttgtgaaaaagtatgtttatgagtatcgtatttggggaaccagactccatacctttcgaaatttggaaaagaagatgacttggattgtagcagtattaggcgtagcgggaactgttgcggtatattatctgtatggatttgaggatcaagtgttcaaatatgcagcgtggactggagccagtgtggcgatactgtgtatgatacatatgtcaagtgacgaaaattatcatttacagatggcggagaattatatggttgattatttagaaaatgtctgtgcacatcgctatgccaaattgtataaagaaaaggctatgagccagacaagcatattggaaatggaagaagcgtttcagccggaggctgaggaagaagtggttgcagcagaggtggaagagattcaggaagagccggtttccgagcaggaacaggtatatgccatgaagcgggaagaaccggcaaaagaagaaaaagctgcagcggaagaaaaaagactgcaggaagtgcaggtgcgcaggattttagaagaatttttggcatagatgaaataaagcgattgcagcggagtaaataaagtacaaagctttgaaatggtgggggattgtgttcgcgatatgctatgtggcattggcagtaatattcaaattggataaaaagagatttttatagagactgaaaagaacatattgcttgcgcagtctatgcggatgtgctatattaaaggtacaaaaagaacaatcgccacataaaagtggttgaccaattgaaaataatttagaattaccacccaactcgtcaaagtatcagggtggtttttctatgtactaatgactgatcagataaatgaaggtcagtagtgataaaatgaacataccaaattgcattaagtctttaaagtcaaaatgtttattgttcatcagctccacctcccatctataaaagagtgagaggtcagccaccctatatcacgattgttctactcagagtgtatcacatttgtacaagggaatacaattgtgaactgatattcataatttcttgactttcccctcttccgtttggtagaataacaatagctatgagaccaattagaagggaaggataaacgtgggaaataaagtcacatttgactattcaaaagcaagtacatttgttgcagaacatgaagtagattacatgagcaagttggcgatagatgctaaggaactgctcttaagcagaaaaggagcagggaatgatttccttggatggattgatttgcctgttgattatgataaagaagaatttgtacgcattcagaaagcggcagagaagattaaaaatgattccgaggtattgctcgtaatcggtatcggtggttcttatctgggagccagagctgcaatcgaatttttaagacatagtttttacaatgttgtttcaaaagagattagaaagacacctgagatttattatgttggcaacagcatcagcagcacatatctcaaacatctgatcgatgtaatcggagacagggatttctctgtaaatatgatttccaaatcaggaacaacaacagagcctgcaattgcattccgtattttcaaagagatgttggagaaaaaatatggaaaagaggaagctgcaaagagaatttatgcgacaacagataaagcgagaggatcattgaagaaccttgctaatgaggaaggatacgagacattcgttgttccggatgatgtcggaggacgtttctctgtattgacagcggtaggtcttcttccaatcgcagtaagcggtgcagatatcgagaaattgatggaaggtgcacaggctggaagaaaagaagcattagaaaatgattttgctgaaaacggtgcattacagtatgcggcaatccgtaatattttacaccgtaaaggaaaagcagttgaggtacttgcgaactacgagccaagtcttcactatgtgtctgaatggtggaaacagctttacggagaaagtgaaggaaaagaccaaaaaggtattttccctgcctctgtagatttgacaacagatcttcactctatgggacagttcattcaggatggaagccgtattatgtttgagacggtattgaatgtggagaaagcaacagaggagcttttcatcggagaagagccagtggatttggatggtctgaactatcttgcaggaaagacagttgatttcgtcaataagagtgcgatgaacggaactgttttagcacatacagatggaaatgtaccgaacttaatggtgacaattccagagcagaacgaattctatcttggacagttattttacttctttgaattcgcttgtggcgtgagtggttatattttaggggtgaacccatttgaccaaccgggtgtggaaagctacaaaaagaatatgtttgctttacttggaaaacctggttttgaaaaagaaagagaagaattgttaaagagattataagaaaaaaagccagagttgcaacggagcagctttggctttaaatgtaaaaaaaggaagtgataagttgttatcgaatcaaatattgcacaagcccatcaatgatatacatgagattatgggggtggattgttccgtgtggagtatggagggaaagtgccttgccattgcgggaatgaacgaggatagaattaaggctggagtagacaaatttctgaaagaaggaaaagatgagcaggtatgtgaaaatgaggcatttttcctgattcgagataactatgatgcagtgtatgtccttgcacttcatgaggttgtagagcaggttgcggttatcggaaggctttgtatcagtcagttccaaaacctgatacacgcatataaagaacgtttggataagaatcattttttccagaatttattgcttgataatcttctgcttgtggatatttttaatcaggcaaaaaagcttgggattgaagtggagcgaagaagagttgtattcttgattgaaccgaaaaatgagacggacaatattgttcttgagacgatgaaaggtctctatgcaaccggctctaaagattttgtaacttcagtcgatgaaggacatattatcctgatcaaggcgttggagacgaccgagggatataaagaactgaatatgattgcaaaatccattgtcgatacattgacgatggaagcgatggtaaacatgagggcggcatatggcacgattgtaaatcagctgcgagatgtgtcaaagtcatacaaagaagcgggcatggcgctggatgtgggacggattttctatgagcagaaaaatgtccttgcttacaatgagctgggcatcggccgcctgattcatcagctcccggtatctttgtgtgacatgtttttacaggaagtgtttgacggaaaagcggtggatcagttcgatgaggagactctgagtacggtcaatcagttcttccagaataatctaaatatctcggaaacggcgcggcagctttatgtacatagaaatacattggtataccgtcttgagaagattcagaagctgacagggttagatgtccgggtatttgacgatgcgctcacatttaaaatcgctatgatggtatcgaatcatctgaaattcttgcaatcaaaagagtag

SEQ ID NO: 334 - DNA, 12699 bp, unidentified
  source 1..12699: mol_type = unassigned DNA
ttatattatttcaatagataattctttttttaatttttttatttctaattttactcctagattaatctgttctgctatatcttcttctaaaacaaacattaaatcatcagaaatataattatcatcgtgcttatgtaaatagccatccattcctataatcttaacactgttaacatcacacatagataaaagcttaagaaacatcaaacctgaattatcttttacatattctgtcttatttaataaagacgaataattaatttttgcaaatacattacctgatggaacattagatgatgcaataacttttttatacaaatcttttctaatctctttcattcgacgactatttcccacaaataaataatccacgggatgcaatttatattcaaaatttattgatacaagcacataatcttccagatttaatgatgctaatttattataatgtgtttcagatgttttaccaggacatatcataataacatttttgcctttaaatatgtttttaaccttgttaaaatcatctattatgctgtcttttgattcgaaatacgataaatataattgttcaatatattctttatcaaaatcaactttcttttcattatctaacatatcaaaaatatcatcaatctcatcaatagtaagattatttttttggctcagataatatgcataatccgtattgcactgatgcttagctgctaaataattaggtaaagaatacccccatggcttatcagcatatatattttctataaattgatcatttatttccaatatatttctatcattatattgtccctgataattttcattaagatattccaaaataatttctgtatttaaattaccagctcctatacctataccatgaaccgagcaatctaatataacttccctgtcaacttgttctaataaaattgttgcattcgaaaatgataactgcatattattataagaatgaaatcctattataatactttcatctaaatattgtttcatcatactaatatacttgataacatttttgcttttcattgaaccaaaactatcaacaatatgcaaagaatagacttctaattcattacacatattcataagatatatcaactcagaatcagaatattcagaaatagctaaaggatacatcataacattatatcctttttccttcatcattttacactcatgtaacgaagctttaatatcttttttcttgaatgtatatttaatatttttaatgttaccaaagctatattgttccaaattatttacatcgtactgtccataattaatagaagctattaattttagcttgatttctgaaggaaacttttcatttattgaattgatactcaaaaattgcgaattagaattttcattattattatcaaccaaataaccatattcaataaaatcaacgcccgaatcatataattttgatataattttatcattcacagaatcattaaattttcttttattgactacatagtactcatttaatgtgcaatccaggaccttaccatgtctgcttttaataccaacagacttcaaattccgcaaaatatttttagatgcatcagagaaaataccagaatctgttgaatagctaatatactgaacgcccaggcttttccatttttcaaccatactatagtcatctgtaaaagttcctatcactttattctttgctttagctttttctacaatgtctaccatagccgccaaaaccttaggatgactaatctgtcctggaactcctaatgactgagataaatcatatggtccaataaatataatatcatagccatcaacttctaaaatttcatctaaattatcaattgcctctttgccttctaattgaattataataattttttcattttcttttttaaaaaaggcatttctgtttaaagatgaataatctgctgctctgacaaaacggcatacgcctctttctccctctggataaaatttagcatattttataacttttttgacatcctcagcacatcttatctgtgaaatttgtattcccattgcccctatatctaatgcttttccaatgacattatcatctatatatggaactctgacaattggaagtattccccttaattcacatgctcttatattattttgttgattttctatatctgtaggaccatgttctgtatctaaaatcacataatcataaccagatattcctataatctcattaaacataggatcagatgttttcacaaaaacaccataaacaaattcaccattttctaatttgcttttaaattcatttaacataattatctcttattttttattgtttaatctgttcgcaacaatttctctgactctctctaaatcattcggtgtatctactgctacagtatcagaatcaacttctatgtactgtactttataaccattctctataaatctaagaatctctatatcttctattttctcaattttagcctttccatattttttcccatattcgcaataaaactttaatgcttcaggcttgaatccatatacacaaacctgtttataatagttatattcaatacttccttttggatacggtgctgtagatcttgttaaatatattcctatattctctttatttgttattaccttcggtactgtgaaattcacaacatccaccgggtcatttattttagtcattaaatttgaaacctgcaaatccggatttgtataaaatggttctattgcagcccttatagtatctggctctaacaatggttcatctccctgtatattaacaatcaaatccgctggtatcttttctgctacttcaccaattctatcagtaccagttttatgtttatcagatgtcatgattacctgaattcctaatgcctgacattcctcatatattttgtcatcatcagttgcaacatatacttctgaaaaatccttcacctttttacactgctgataaacccaccatatcataggttttccacaaatatcagctaacggtttacctggaaatcttgagcttttatatcgtgccggtattactcctattattttcattgttttacctcctaattgatacaataaatttatatatatcttttcttttaataaagaaaatcatacacattattaatattaagccatatcttaaaagcaaatttttatataaaagtaacataatcaatccaaaaaccattaaaatacatgatattccgattactatttttatatcaaataaatgtatgttatccttaatacatttttttgcaactttatcagaaaatatgtaatgtgatattcctaatataacataacatactaatgttgtatatccagcagctatatatcctaatttttttataaaaatataatttaaaaaaacattaaaacctgcgctaaaaatagatgccaacattataaatttatttttttcaaaataaaattctacattagcaaatatctggtacataaacataaaatataaacttattgctaacggaggaataacatatacagcatcatagtattcactaggtgctaaaatactaattacctccggtgaaaatgccatcataaaagccaatgctactgcaacaaacaaaaaaagcttattacacacagatgaaatatctctatatttctcttcttttaatctttgatatatccaaggtgcgaacgcgttattaattgatgttgtcaatatatttaatatcatagctaaattatgcgataacccgtatatacctgcctcagccattcctatcattttactaatcataattctgtctgactgagacaaaatcaaagtagacaaataatgtggaactaatggtatattaaattttaatgcatatatccaatacttttttgaaaaaaaatttttaccttttatatagttaattatatatataattccataaaaaacaattacaatacaagcagagctaattattctaacatcagcaccaaatttatctggagtatttataacagaaactgccgctactaaagggcttaaaacagaaacaaccaaagttaaaataaccatattcctgtatttaaactcaaatctctgtttagcagaccaaaacgaaaaagctgaatttgctaaaatctccataaacattactataatcagaactctgctgatttcaatccataatgataattttttaaaaaatagcaaatacaataataacatacacaatgtaagtgtacttacaagaccttgcattgaagataagaatccatctctgtcattttcatatttaatcattccattattaaatacaccactaaacaaatttagtgtacaaaaaataataaaaatactttcccatgagtaaaaaatacttactactccatattgctcagttgtgagtaatcttgtaaaaattggaactgttataaaactaatgcccttttgcacaaatccacatatcgtaaaccacaatgctgccttggaagcaatagacattttattatatattttttttgttttttctaacatcatttatacctttcaagaaattcaaaaccaagatattttctttctctaacaaattccaatgtttctatagccgtcgtagtaattgataaagctaaatcataaaatacactgtcatcataatttaaaacctctgtaggtatgtacttatctatgtataagcagttatatttctcacataaattactataatctgctttatccctaggatgaggctttattgttatggtgtaccccattccagtatactcttttattatatcttcatatatttgcatttgctgttccagattttgtagctgtccatcttctgataatggctgggtacacagcaaaagtgttttattacaattattatttattattttttgtttacagaatataccatatattagtttcttttgctgtaatgtcagtttgtcattaattccttttcgtggtatttctattatattttccctatcaattgccagaccatttttatcatttacttcaatatcaattacatattgatttgttccaaaagctctgtgtcctatattcaatttatttttcaatctgacttttaaactatttatatcataatccactttattcacttgataatatttattaaagtatttaaagaaattcaatccgtcctcaattaaatgatatctgatttgattatttacaaaataccagcctaaaatttcaaaatcattaaacagaaaaatattatccttatacttagtccaatctatttttaatttagtgttaatatatttattctcgtaatttttttgatttactatcttatcaaatatatttttatatttaatatttttgtagtctacactatcaaacacatatatatcatttataaaatccaatgactttatggtttcaatcttatttttgtaatctggcatctgagaacctatcaccaaatcaattttctcattttgtaccattgcttttgcaaccgcaatatataaattatataagctaaagcagcaatatactttcattttatttaccttctatattttgatttttattttctttttaattgttttagaatctttatcaaatttaactggcattaaatcaacgattttatcaatattgtatgccaaaaatatcacacaaaataataaatgcggcatctgatacatttctgttataaaatcaacaaaatacgcaacaagtattatggttaatacctttgtatacggatgttctttatattgctttaatttatgactaacaataaaaacaataattccaaataacataagtcccaataatccctgttgaaccattatattcaggtatgtattatgtgcctgtgtagtagtccaggttgttaaattgtaactaacatttccatttcctaatataggatgacgcgatattgatttgagtgccaaagcccatattatagttcttcctgtaaaagatgaatctctatttaaatatttatataatatagccgaaaaattctcctgaaaattcataaatattatcaagtaactaataacaaaagaaataataaaaaacacaaatacatttggcagattaagtttaaaagcctttaatgaaaaaaccattataataaaagcaatacctaatgccactaaagatgttttcgaaccagccatataaattccacatattgtaaatacaaacagaccaattcccatgacagacaatttgcctcttagtttatatatatacatatatgagaatgccagccatggtaaatatgtaaaaatatgtgaattataataacccattacccaatttgccttccatcctctactgtctgtatataatccacctgggtgcataacaatcgtgataaaattagcaacaattattattccaataattattgccatattctttataaaacatgatatatcattatataaagcaaactccataatcaaaaccataccaaacacataaataaaattcgaaatatctgcagaagtgtcagtatgtctaattatacatatcactatattcaaaaagtaaaacaaaatggataaccatgtaatcatgcaaaatcttatcttatataagatgcaacatattaatagaaaaaatataacaaataatctaaaataatataatatgctatttaaaagattaccaccagtttccataatccctcttggaactaaaaacgggattacgcatataatgagcattatatttatcagccttttattattttcatttatcattaactagctccttttaaaaacaaatcatatcattaattacctattctggtctgttaattcttatatcatcttttattctaagtctttttctatattttttcatcaattttgaacaaataaagctaggaacaaacatacatggatacaccatcacccatgctttcacatattttcgagtgcataaatacatggttttataattcattttatgtattccagaagctttttccttaagaatatcatgaataaaaagatggcatgttcgatttttatacatttgattcaattgtttcttgtcaaaaccaatctcatttatcataaaatcaatcatttttttataataaactccattaattaaagcagaatcaaaattaggcgtattaacatatataccagcgccaacacatggaccttttacaatccccagtttagtatcttcccctttggcacacaatgcatgtatatatgattgcaaccaatatgtatccgcatactgttctggattttctatttttttaaaattatccgtattacatataaacgaagctaaaaaaccccaataataacctgcatatttcataaataattttttatcttttgtacagatatcattcattgcttcaggttcatgcttttgacatgattcagaatcaatatatttattcctaaaatctcttgtagtaacatatattaatcccatatcatcaccgttttcaataaatttaagaattttatcaactgcattctccattataatatcatcatctgacattagccaggtatactttcccttagctttttgaagacattttatgcaatttctatcagtttttaaatttgtttcattgcaccaataacttatatttccccatttattctgatattcttttataatattaggagtgctatctgttgaacaattatcagacactaaaacctctattttttcattacattgtggcatcaaaatgtccaacatattcttaattgttctttctccattatatattggaattgcaattgttaatactggctgatttttcattttaactatcttatctctttccttatgattgtttggctattgtaggcaaattcatttttacagtaattttagcatatgttggtcttacacaattaatcataaaagcagctatacatacagccgcctttctaggcattatatgccatattccaccatataatttctttttcaagcctcttgtgtctttacaaaattccatgtgattccactctgtttcttttcgatattgtgcatataaaacagcatatggactgtcactcttctctatccacatacgtttcctcacataaaaacatgtagttgcatgaattattgccggctttttctttgcccttataatttgatttttggtataatattcgactggctttttcatttttataatttcatcataaccaaatatgtatatagatgtaagcatattatattgtggttctaacaacttaatatgtccatctaaaactatattcaatatatcctgttctaaaaaaaacattgtttcattattctctataccctgtaatattttatctacaagtttctgacctatgtttttttctctccattttttcaaatcaatcaataatacacccgcattgcaatatttcatcgaatctgacgcctgtaaaactcttttttgtattgccgtgcctacacaatcatatacacctgcaacaatctgatctttttcaaaagctgtattgtacatttcctgtatagaatccaatacaagtgtgtcactatccaggcttaataccctgtcaacatttgaaggtaatatctctgccaaagccattcttgcatatgtatgtcccaaatcatactttacttctggatacaaatctttctgttctggtttctttataaaaaaaatctttcttgaaaaatgttgtacaatattatttaatctttttttattttcatccgatatgttatcttcaactacatatatatttatatcatcggcatccttattgttttcacataaagattgtatagcaactccacacatctccgaaaataaatcgctactataataaacaatattcattggtagtctccttattcctcttctatgcctttaacaaattggttcatattccagcctgaattcataccaataatctttgctggcactccacctacaacagctccacaagtttcaatatttttaactacaacagcattagaagctatcattacatcatctgcaatttgtatatcaccaaaaacacctgctcctgcgcatattgttacaccatcaccaatcactggacactttccattatcatcttttcctaatgatattccaatagttgttccatgaaataaacagcaatttcgtccaacagtagaatttgatgaaaccactatattctgcaaatgagcaattaacagcccctttccaaatacatttagtggtatcatgacattatgtcttgaactcattatcttaaataatattttccagtaaatgcctataattttagatgcacctttaacatttgaataatattctgcatgtcttaatactgattgaaataaaagctccttccgaaagacctttttctttactcctgatggataatttctttttatccatatctttctttcaagttcaatccactgtttcatttccttttttgattctatcattatactcactcagttctttattaaaatattatctaacagcttccttaatagtcttagccatataatcaatcatctcatctgtcattcctggatatactcctacccagaatgtatctctcataattctgtctgttgtatcaagtccacctactactctgtagccttctcctgttgctctcatctcatcaaagcatggatgctttataagatttcctgcaaaaagatttcttgtctgtactccgtggctctctacatactcaactactgcctttctgtcaattccttcctttactgttataaggaatccgaaccagcttggtcttgagttctcacatggtacaggaagaattaccttatcctctatatctgcaagtgctgctcttaatctgtcaaagttatgtcttcttctctcaacaaatgatgggaacttctcaagctgtgcacagcctaccgctgcctgcatatctgttgctttaagattatatccaaaatgtgaatatacatacttgtggtcatatcctaatggaagttctccatactgcttgtcaaatctgtgtccacagaggttgtcctttcctgatgggcatacacagtcacgtccccagtctctgaatgaacggatacacttattaagaagtgcattattagtatatactgctcctccttcacccattgtcatatgatgtggtgggtagaagctgcttgttccaatatctccgatagttcctgtgaacttttcttctccattgattgtgtacttagaaccaagtgcgtcacagttatcttctacaagccagagattgtgcttgtcacaaaatgcctttactgctgaaagatcaaatggattaccaagtgtatgtgcaatcataacagccttagttttgtctgaaagtgcatcttcaagctttgtaacatcaatgttgtactgtggaatagtaacatcaacaaatacaggtactgcaccatactggatagccggtgttattgttgtagggaaacctgctgctactgtgataatctcatcacctctcttgattcttctgtctccgagaagtggtgatgtaagtgccataaatgcattaaggttggcagatgaaccagagtttactactgatacatactttactccgagatattctccaagcttcttctcaaattcatctgtataacggcctgctgtaagccagaattcaagtgctgaatcaacaagattcatcatttccttgctgtcatatactctgctcgcataagaaattctgtcaccttccttatactgcttctggttatggtacttcttgcagtattcatctacaataccaagaatctcctgtcttgcttctaattcattcttattgtcaaacatatcatatcctctttcttattttattaactctgccctactcagtaaagaattcttcaatctctttatccatacatgcaacggcatctccgcctgctgcatatacctttgaccattcaacactcttctcaattgctgtatcaaagttccatctgggcttccagccaaatgttgtctttaactttgagcagtctaactttaagaagttggcttcgtgaggtcctccgtcatatttattaatccatgaaagaccttctccccacttgttacagaaagtatcaacaagtgttcctgttgtaatgcagtcactttcatcaggtcctacattatagaaacctgcatacttcttatcactgtactgctcctttgcaatcataagataagctgcaagcggctcaagtacatgctggtatggtcttgttgaatgtggattacgcacaattatatcttccttcttaactgcagctcttacacagtcaggaacgattctgtcattggcgaaatctcctccgcctataacattaccggctcttgctgttgaaactgcaacctccatatcattgaaaaatgaattgatatagctgtgtgttacaagctctgaacatgacttgctgttagagtatgggtcatatccgtcaagaggctcattctctctgtatccccatgcccactcattattatggtaaaccttgtctgttgttacatttaaaaatgattttacacacgggttaagtcttacacattcacagatattaactgttcccataacattagtttcataagtatatacagggtctttgtatgattcccttacgataggctgtgctgcaagatgaagcactatctcaggctgtgtctcttcaaacaccttcttaagatgctcaagatctcttatatcacctattacagaattcatcttatcctctacatctatcattgaaaaaaggttaggctcagtaggtggaacaagtgaataacctgtcacttctgctcctgctttaaaaaggattctgcaaagccatgagcctttgaatcctgtatgtcctgtaacaagaaccttctttcctttataaaaacttaaatccatcttaatcctcccggcttagtcccatttcttccaaggagctgttccagttgcaagatacttctcgagcatatccatctctctcttggtatccatgcactgccagaagcccttatgcatataggacattaactgaccttcctttgcaagtttttctagtggttctctctcaaatacagtgtcatcaccatcaatatagtcaaatatttcaggattaagcaccatataacctgcattgataggtgcaccgtctgtatggctcttctctctgaatgacttaacagcgttgtctcctccgatatcaagtacacccttctgctgttcaagcattacggctgtaagagtagcaatcttgccatgctccttatggaactcaacaagcttgttcatgtctacatcacagacaccgtctccatatgtcataaggaatggctcgtcccctacatatttctggatacgcttgattcgtcctccagtcattgtattaagacctgtatcaactacagtaaccttccatggctcacaatgctgctcgtgaataatcatatcgttagagccttttgtgaagtcaaatgtaatatcactgttatgaagaaaataatccgcaaaccattctttaattacatactgcttatatcctgcacatataataaactcatcaaaaccataataagcatattccttcataatatgccagagaattggctttcctcctatctctatcattggctttggcttaaactgactttcttcacttattcttgttccgaaacctccagccagtaaaacaactttcat

SEQ ID NO: 335 - DNA, 9354 bp, unidentified
  source 1..9354: mol_type = unassigned DNA
ttaggaacgatattccttaaaatactctattatatactgtaaaccctcttccagctctatagtcggttcccagcccaacttttcctttgccagagtgatgtccggctgacgctgtttgggatcatcatgaggcagtggcttgaaaatcagtttcgacttggaattcgtcagcctaatgaccttttccgccagttccaatatggagaattcattcggatttcccaagtttaccggaccgataaaatcgtcctccgtgttcatcatccgcaccataccttctatacagtcatctacatattggaaacttcgcgtctgattacccgaaccgtatattgtaatatcctggttctgcaatgcttgaaccacgaaattggaaaccacccgtccgtcattcggcaacatccgaggaccgtacgtattgaatatacggataatcttgatccgcactccattctggcggtgatagtccataaacaatgtctcggcacaacgcttcccttcatcataacaagaacggaggccaattggatttacatttccccaataactttccacttggggatgaataacggggtcaccgtacacttcgctggtagaagcctgcaatatcttggcattcgtctttttggccagtcccagcatattgatggcgcccaatacagaagtcttgatggttttaatggcatcatattggtagtggatgggagaagcaggacaagccagattatagatttcgtccacatctgcctcataaggggtttccacatcatgcagtacaaattcaaagcggggattgctcttcagatgagtgatatttccttccgaaccggtgaaaagattatccagacaaatcacctgatgcccgtcgtttatcaatcgggtacaaagatgagaacctataaaaccagcaccgccactaaccaaaattttcttcatgtaatgttttttatagtgccttaaagcacataggacctattctgtttgttttgatgctgacaaatgtaggcgatttgactaaattatgcaagtttgcaacgaaatatttcacttgttaatgaatataaagaggcagattaaaaaatccacccctgaaatattcatttatttatccgccacatactcttctttcttatccggaatgctgaagttcttgttcgcaaacaagtctgccagacccgaaatttgctttaaacgcaacacttcgtcgcgatccattccgatattcttcattatccattcatcagacataccggctctgtccaattccgcaacaatatggcacatcaactcgatattatgcgtaccacgggcacgattatgacggatagtggacgccatacggttggaaagttccttgtcaatcacgaccacgggaagcaacccgttttcgcgctgataaattcttttggatgtcttcaacacctgataacggtggtaaccgtccaccaggatgtagttatcctcttcctcatcatagtaacagacacaaggcatggtgaaaccatcttcccagatggaaagctccagaagcttcatttcgggcggtgccactacattcggattgtaatcgtttgcttgtattttctctattggaattgcctttacattatataccggacttttatctacgctcataacatcatatttttgaattgttccattatcttgtctcttttgtatgcctcttccttgttcaaggcaaaacccatgtacttgcaggcatggtcattcttcaggatgcatatgcacatccgcttataagtgggaatttcccggaattccgcgatgtcaatatcatccagataatccatgcgcaccggcttcttgtttgtcttgtaattcgtggtatttatcacttcaatggacactcctgcatccctcagcttctggatggtctcgtcagccagacagcccccttttgtacgccagaattcaatgctgacggtaagctttttcaagtagttcctccgggtctcttccggcaaggtagaaagcaggaactgcataaagcctttccacgtatacccttcgggcagtcggaccgtctgccaccccatagcacgcgtccctccgtaaataccggtaaagttcaccccgttgacccgccctatcattcttccccaagtattcgggtcgatgacacgatacagcttcaggctctcttgtgcctcacaaagaaaagggcttgccacacgctggcgttcgatattgactccggctttataatataggtcatacaaatggttatagtcaaagccgaatttgccattggccgtccagatatccgtcgtcttccaatcataaatgggataagcattgaaaatgtcattgcctatcttcgaggtccagcggtaattgtggtacatctgatacttccggttcagatggatgctgcgccagcggttaaaactctcttgcgtacggatgcctatgagaaagcaggcacgcactccatccttcttctcatgcagccatttggcaaagtgcatctggaactcataatcccacatttcgggagtgtagaaaggaaacgtctctttagtgaggcagcctttcggcatcttccttacccaaatgtcctccaaatcctcctgccacggacgccagtaactctggtacatcgacgtacaagtcgttacacggaaaggcacacaaacacggtacacctccaatatatccttattcgcctccaatacccggtccacataatcaatggtcatgctgtactgtatctcatagtccatatggaatacacacagtttacggttcagccggttccggcggatatagtctatgcacaaattcagcaacactccactatcttttcctcccgaaaaagagacgcatatcgtgtcaaattccctaaaaatcacatcaagacgttcttgcgccagttcatacacatttttgggtgtagccataattatctgtttttcttcattttcacataacgggtccataccttgtcttccaaaaagcccagctcgctgaagacatccctatcttcaacaaagctaacagccgtcagactactctcctcgccctgcttctcaagtaccttttccagaagcaattttagcgtgtcaacattcctttccttaatataatagttgttgatgacacattcatacttcttgtgctccaccggcacaaaacctacaacatgtttattatccagagcaacaaaccactcgtactcttccgatgtccggaaagggtaattgtagttctgtttcagcacttccgggctcataaccaaaggggctacaagctcgtacagctttttatccgtaccatgtaattgcactatctgtatcatatctacatttatattatttgtaattacgtgttaaagataaagcttatttacgacggaatattctccttttaaatagatttaagaatatagccctgtaatataaaatattaataaataaatattatccccctaatttgtatatgttgattaatttgggtttctttgcaaaagaaagtcacccgaagagaaataatgaaatatttactgctttttatgacctttgccaagataggaatgttcactatcggtggcggatacgctatgatacctctcattgaacgggaaatcgtaaaaaagagatggatgagtaaagaagatttcatggaaatgtttgcgttgacccagtcacttcccggtgtttttgctgtcaatatatccatattcgtcggctacaagctgcataaagtaaaaggtagcctggtgtgtgcacttgccacaatcctcccctcttttgtcatcatgatgctgatagccatgttcttcgctcattttcaggacaaccaggtgatgatacgcatctttaacggtatccgtccggcagtagtcgcactgattgtgataccctgcatttcggctgcacgggcactgaagctgaagtattggcaactggtgcttccagccatcgccaccatactcatctggcaattcgggctatcccccgtatacattgtccttgcaggaattgcaggaggaatgctctatacattatggttaaaagataaactgagaaaattacagatatgatttattggcagctgatattggtatatctaaaaatcggaatgttcggtttcggaggcggttacgccatgttgtccctcatccaatatgaggtggtggaccaccatcactggctcaccctgcaacaattcacggacgtagtggccatctcgcagatgacgcctggtccgataggcatcaacagtgccacctatgtgggctatgcagttactcaaagcgtgtggggagctgtcgtgaccaccattgcagtatgtcttccctcgttcatcctggtattgctcatctcttacttcttcgtgaaatgcaaggacaacaaatacatcaaggcggcaatgtcgggactgctgcccatgtccgtatcattgatagctgctgctgccttattgctgatgaacaaggaaaatttcatagattacaaaagcatacttatctttgcagccgctttcggcgtgacgtggaagtggaacctccaccctatcttactgataatccttgccggagtcgcaggcttccttctatattgaagaagcggtagagacggacaccatcttgcgggcatatgcccacaccacgcaataggcaaccagcggtacgatgaacgcccacaccatcgtcgtatggtctgccaccagtcccatcaacagcggacctaccacgcctcccacgggagacatcatcaggaaagaggaagccctcttggtatggttgcccagcccgcgcaaggaaagtgcaaaaatcgtgggaaacataatagcctcaaatgcatatccgcacaacagagctgcaagcgacaccattcctacatccagcaacaccaacaaggtagtcatcacagtgcccgtagcacaaaccagcaacatcttctcggcacgcacacgtcccataatccagctaccggcaaaacgtcctaacataaataatcccagtccaccgaaagaaagcactacggaagcttcgcgggcattcatccaattctgctccaccacgtagttgatgaagaagctgttgatggaaatctcgccgacctcataggcaaacaaggctatcagcccgaaaatgaaaagccggtgtgaccacaatccgaccttattaccagcttcgtccacctccacactatgttcaatctcgggcaacttgattcttgaaaagaccagcgctaccagcaacacaattacccccatgcagatatagggcaatgcgacattacccgagcccgtctgcccatccttcgagaagagtagcagtccagccagtaccggtgcacagatacatcccagaccattgaaggattgtgcgaaattcagtcggctggcagcagtttcctttgcgcccaattctgtggcataaggattggcggcagtttcaagaaacgtcagtccgcaacctatcacgaacaatgcaaacaagaaaagattaaaagacagataatgctgcccggggataaagagcagcgaaccgatgccgtagagcaacagaccgaataccacaccccggcgatatccgaagcgactgatgaaaagtcctgcaggaatggccatgatgaagtatcccatatacatcgtcatctgtataaaggccgaatgtgtcttcgtaatatccagtatctcttgaaagtgcttgttcagtacattcagaatggcatgggcaaatccccacaaaaagaaaagagaggtaatcaaaatgaagggcacaaggtattgtccgcccaccaatggtattcgtttctgtttcataatatgataattccagacaatcgttgcaaggcgattgataattgcgggtgcaaagataaacaaaactcccggtctttacccaacattttcctattcgctattgtacggagcaactttttctctaactttactgccatcatacaatgttaagccatgaaaaatgccatcccacgatacaatttctacaaaactaagtacggaagcgaacttctgatagatgtcgttgatttgcagtatacccggaaattcttgacccagggaaaagtacatattctgacctactatgacatcaccttcatcacagaaggagaaggagaattcactatcggtaaccggacacacttggcagctcccggtgatgtattcttctccaaaccaggtgaggtgcgcagttgggacacagaccgtatcggcaacggtcatgctctaatttttgaggatacctttttgacctctttcttcaaagacccactattcgtgcagcacctcccgttcttccgaatgggaaaaatggtagacaaactccaactgccgaacgggctctatgcacgaatactccaacttctgcacgacataaaggtcgaaatcgactctttccacccacacgatacgggcatattacgcgccttactttacgaagtcctcatgctactcaaccgtgcctaccgcacctctatccctccggagacgggtaaggagccacataaagatatcagcagcttccacctcagccgattcttcgaattggttggggagcacttccgggagcagcattctgtacaattctatgccgataaactatgcatcactcccaactatctgaacgaaatcctctcttcggccataaacatcaacgccaagcagtacatactcaacaaggttacagacgaagcccagcgtctgctcacctacaccgacctccccatttcagaaatagcctccgaactccatttctcaaccgtctcctactttgtacgtagtttccgacaatgtatagggtatactcccctcgcctaccggaaaatggagaaaccgtgaaaagtgacatatcctccttcttttttattgtacaaaagttccacttaccggctatctttgcccttgaaacaataacccataaaaaaaacaaacaatgagagatgcagaaaaaacagtaggaaacatgattgacaaggaaaaaaccatctttgtcggttcggtgaatgccgaaggctttcccaacatcaaggccatgttgcaaacccgcaaaagggaagggctcaaacacatttacctatcaacgaacacctcgtcgatgcgcgtttcgcaatttctcaaaaataaccgggcatgcctttacgtctgcaacacacgcttcttcaagggcgtaatgctgtgcggcacgatggagatactgacggacagcaccagtaaggaaatgatatggcaggaaggcgacactatgtactaccccgaaggagtgactgatcccgattattgtgtcctgaagttcaccgccttcgccggtaggtattacagcggatttaaatcagaagacttcacgatagaataaacgggccatccgttccagtccatcagcaagcagagcccggggacaagcgatattcagccggataaagccctctccaccgggaccgtacatcgtaccggaattgaccatcagatgctgttgttcttgcaaacgcaaggcgacagcatctgagctgataccggaggcacggcagtctatccaaaccaaataagttccttcgagtggcagcacgggatattgtggtaaccgttctccgaaaaagcagcggaggtattcgtaattcccccgcagatatttccgcaaggcatcgagccattccccaccttcgttataagctgccattgtggcgattacgccgaacggattgacgtcgcatacctcgttgatattgatggctctgtcaatacggcggcgcacctcttcatcggctgcgatgatattggcgatttgcaacccggcaaggttgaacgccttgctcggcgaaacgcaagtgacggaattttgcaaaaagcgttcggacaaggaggcaaagggtgtgtagtcatatccttcgtaagtcagttcacaatgaatctcatccgccacgacaaacacctcattccgtaaacaaatatcacctatatgctgcagttcttccagagtccagacccgtccgaccggattgtgaggattgcacagcagcaggatttttgctttcggatcggaagctttcctttcaagatcggcaaagtcgattacgtagcggccatcctgataaatgagattattggcaaacaactcgcatccgtcattacggatagatgagtagaaacaattataggcaggagtctgaacgatgactttatcacccggcatggccaaggctttgataatggctgacagagccggcacgacaccactcgtatagataatccaccgggaatcaacctgccagcgatgccggtcatcgaaccaccggacaaccgcatcataataggcttcgggtacttttgtataaccgaaaataccgtgcgccacccgcttttgtaaggcatcgataatagcgggtgctgtacgaaaatccatatccgccacccacatgggcagtacattctcctcttcgggagtatcccatttataagaattcgtcccgcgacgcgagatgattgtatcgaaatcgtatttcataatttataaatccagttaccatcccaaagcctcaactcacaatcggcaggcgcctttatattttcgtcgagaatgatttccccatagctttcggcagtgatacagcctgtccgtggattcttcaccccgcctattgttcctttgatggttgcctgcaccgaactatattcaaaagcccggtcgcagtcgggaccaaaggtgcaattctccagtacgaggtcgtgggcatagcagagcggttgctcaccggttatatggcaattcaccaaccggagattgtgcgaatgccagccgagatattcgccgttgagttcagaatcgtagattgtcacattctccacctcccagaaggcatccttcgtagtgattttggcattgcgcaactccacattcttcacatactggaaaacgtacttgctgtcgctttccaatccgtctatgcggatgtcgctgctgaacatgaacggataagttcctccatgcagtttcagatttttgatattcagatttttacaacgccagaacacctcattggcatcgtttatctctacattctctatttcgatgtcatgcatctcgcgaaacattttgggtgcatcgatacgcgtatcagtcattttcagatggtcggaataccacagtgccgaacgcccgccgacatcgaaaaaacaacggtcgataacaaatccgtgaacatgccagaagggataatttccttcgaaccgacaatcaacagcttcgatgttgctgcattccttgatggctgattctccagcacggataactacattctccatacgtaagtcatgcaattcgaacaaaggtctttctccgccaaatgctgtatttgatattattttcat

SEQ ID NO: 336 - DNA, 7918 bp, unidentified
  source 1..7918: mol_type = unassigned DNA
gacgctatcaagatgattatctcaagcaaggacgtcagttctcaggaagaactgctgcaagctctgagcaaagaaggctttgaactgacacaagccactctctcccgcgacttgaaacaactgaaagttgccaaggcggcaaacatgaacgggaaatacgtatatgtattacccaacaacatcatgtacaaacgttccaatgaccagagtgccagcgagatgctgatgaccagcggattcgtgtccctgcaattctccggtaacattgccgttatccgtacacgaccgggatatgccagcagtatggcctacgacatcgacaaccgcgaatgtcccgccattctgggcactattgccggagacgacaccatcatgttggtagtgcatgaagccgcttcacatggcgaagtacgcgaatttctgtcgcaaatcattccgaacattaaataaataaagaacgaatcaataagaaatggataccaaaaaagtggacgtgatggtggctgacgcctctcacgaagtttatgtggataagattttggataccatcagagaagcggccaaagtacgtggaacgggcatcgcagaacgcacacacgaatatgtggcgacaaaaatgaaagaaggaaaagccatcatcgccttatgcggagacgtgtttgcaggcttcagctacatcgagagttggggaaacaaacaatatgttgcgacttccggtttgattgtgcatcccgactttcgcggtattggattggctaagcgtatcaaaatggcatctttccgcctggcacgcttgcgatggcccaacgccaaagtattcagtctcaccagcggagccgccgtcatgaaaatgaatacggaattgggatacgttcccgtcactttcaatgaactgactgatgacgaatccttctggaaaggctgcgaaggctgcatcaaccatgatatattagtagccaagaaccgcaaattctgcatctgcacagcaatgctctacgacccggctctgcatgaagatgataaaatttaaaaaacaaaggatatggaagaaaagaaaaaagtagtagtcgcattcagcggcggtcttgatacttcatttacggtaatgtaccttgccaaggaaaaagggtatgaagtgtatgcagcttgtgcaaacaccggtggtttcagccccgaacaactgaaaacaaacgaagaaaacgcttataaactgggcgcaaaagaatatgtcactatcgacgtgacgcaggaatattacgaaaagagcttgaaatacatggtatttggcaacgtgctgcgtaatggtacctatcctatttccgtaagttccgaacgtatcttccaggcacttgccatcgcacgctatgccaacgagatcggtgcagatgctatcgctcacggttctaccggtgcaggcaacgaccagattcgttttgacatgacattccttgtattggctccgggcgtggaaatcatcacactgactcgtgatatggcattgagccgccaggaagaaatcgattatctgaacaaacatggtttctcagcagacttcaccaaactgaaatactcttacaatgtaggtttgtggggtacctctatctgcggtggtgagattctggattccgcacaaggattacccgaaagcgcttatctgaaacactgtgtaaaggaaggcagcgaacaactccgtcttactttcgaaaaaggtgagttgaaagctgtgaacgatgagaaatttgatgatcccatcaaagccattcagaaagtagaagaaatcggtgccgcttacggtattggtcgtgatatgcatgtgggtgatacaattatcggtatcaaaggccgcgtaggtttcgaagctgctgctccgatgctgattatcggtgcacataaattcctggaaaaatatacactgagtaaatggcagcaatactggaaagaccaggttgccaattggtacggtatgttcctgcacgaaagccaatatctggaaccggtgatgcgcgacatcgaagccatgctacaggaaagccagcgtaacgtaaacggtacggctattctggaacttcgcccattatctttctctacggtaggtgtagaatcagaagacgaccttgtgaaaacgaagttcggcgaatatggcgaaatgcaaaaaggctggacagcagaagatgcgaaaggtttcatcaaggttacttctactccactgagagtatattataacaatcataaagacgaagaaatctaaaaagcctatcccctaacccatctctcatagagaacggttaggggatagaacaattatacgaacagatatggataataataacaaaaaactaactcgctcacgcagcgacagaatgcttgccggcgtctgcggaggattggccgcttatttcggacttgacccttcactcgtacgtatcggctatgcgttattgacgttttttaccgtatttgccggtatccccgtgtaccttataatgtggcttattgttcccgaggaaaagaacttgtataacagataaaagaataattgtataaactaacatgattaaagtaggaatcatcggcggagccggatatacggcaggtgaattaattcgtttgctgatcaatcatccggaagcggaaatcgtattcatcaacagctcaagtaacgccggaaacaaaattaccgacgtacatgaaggattgtacggcgaaacggaccttgtcttcaccgacgagttacctttggacaaaattgacgtgttattcttctgtaccgcccatggcgacacgaagaagttcatggagagtcacaaccttcccgaggagttgaagattatcgacctttctatggactaccgcatcgcttctccggaacatgactttatttacggtttgccggaattgaaccgtcgcgctacctgcaaagcaaagcatgtggctaatccgggttgctttgccacttgtatccaattgggattgctcccccttgccaaacatctgatgctgaacaatgacatcatggtgaatgccattaccggttccaccggggctggtgtaaaaccgggatcaaccagtcacttcagttggcgcaacaacaacatgagtgtttacaaggcattcgagcaccagcatgtacccgaaatcaagcaatctctgaagcaattgcagaacagttttgatgcggatattgactttatcccttaccgcggtgatttcgcacgtggtatttttgctaccatcgtagtaaaaactaaagttgcactggatgaaatagtccgtatgtacgaagaatattacgccaaagactctttcgtgcatatcgtagaaaagaacatcgacctgaaacaagtagtgaacaccaacaaatgtcttctgcatttggaaaagcatggtgataagctgcttatcatctcctgcatcgacaacctgctgaaaggtgccagtggtcaggcggtgcacaacatgaatctgatgttcaatttagaagaaaccgtcggcttgcgattgaaacccagcgccttctaagtaatttgtattttgtaatttagaattaaagaaatgaacttattcgacgtatatcccctttttgacatcaacattgtcaagggaaaaggctgccacgtgtgggacgagaacggtactgagtacctcgatctctacggcggacatgctgttatctccatcggtcatgcacatccgcattacgtggagatgatcagcaaccaggttgccacgttgggattttattccaactctgtgattaacaagctacaggaacaggttgctgaacgtctgggaaaagtttgtggttatgatgactactccttattcctgattaacagcggtgcagaagccaacgaaaatgctttgaaactcgcttcgttctacaacggacgtacacgtgtggtttccttcaacaaggcattccacggacgtacttcacttgccgtggaagtgactaataatcccaaaatcatagctcctattaatgactgcggacatgtcacttaccttccgctgaacgatattgaagctatgaaaaacgaactggcaaaaggtgatgtttgcgcagtaattatcgaaggtattcaaggtgtgggtggtattcaattgccgacagatgaattcatgcaggctttgcgtgaagcttgtacagctcataatacgatattggttctggacgaaattcaaagcggttatggccgcagcggtaagttcttcgctcatcaatataacggtatcaaagcagatattatcacggtagccaaaggcatcggtaacggtttcccaatggccggtgtacttatcagtccgatgttcactccggtttacggacagttgggtactactttcggcggtaatcacctggcatgcagcgcagcgcttgctgtcttggacgtaataggtcaggagaatctggttgaaaatgcagccaaggtaggtgagtatctgatgacggagttgaaaaagttcccgcagatcaaagaagttcgcggacgtggtctgatgatcggtcttgaatttgaagaaccgataaaggaacttcgtctgaaactgttgaaagaacaacatgtatttaccggtgtcagcggtacaaatgtactccgcctgcttccacccctctgcctcagcatggaagaagccaatctcttcctcgaacgtttcagaaaagtactttaaagtatatttgataacataatcagcaataaacaggcagccttcaagcgtttcagcgtttcttaaggctgcctgttgttttaaatacacaagcactttttttacatcaattaggttagaaaggtagaaaaaatatctacctttgcccatcgacaacccttttaataacagaatgatatgagaacagcaattatcggagcaggaaacatgggcggctctatagcccgtggattggcaaagggaagtattatccccgcctcggatatcatagtttctaatccctcacaaggaaagttggatgaactacaagcagagtttcctgctttacaaatcacccatgacaatcaggaagccatcatcggcgccgaattcatcatactcgctgtgaaaccgtggcttatcaaaggtgtgctgcgcgagctgaaactgaagagtaaacaaattatcatttctgttgctgcaggcatcaactttgaagagctggctcactacgtacccgaaccggaaatgaccatgttccgcattattcctaacaccgccatcagcgagatggaaagtatgacactgattgccagtcgtaatgcgaccaaagaacaagaacaactgatgctggatattttcaatcagatgggacttgccatgctgatccccgaagaaaaattcgcagcctgcacttccatggcttcctgcggaatcgcttatgtgttgaaatacatccaggctgccatgcaagccggtatagaaatgggggtttatcccaaagatgcaatgagaatggtggctcaatcggtaaagggagcagccgaactgatactgaataatgatacgcatcccagcgtagaaatcgataaagtatgtacccccggcggtattaccatcaaaggtatcaatgaactggaacatgacggttatacatccgccatcatcaatgctatcaaagcaagtaagcaataagactaacaattaattcattaaataaacaaccacatggacgaacaaattaagcaaatagcagaacgccttcgcgggcttcgtgatgtactggagctgaccgctgaagacattgcccgtgaatgtgacatctctccttacgactaccgtcttgccgaaacgggagattttgatatctccgtaagtatgttgcaaaagattgcacgcagatacggagtttcattggacgcactgatgtttggtgaagaacctaaaatgagcagctacttcctgactcgtgccggaaaaggtgtcagcatcgaacgtaccaaggcctacaaatatcaagccctcgcttctggtttcatgaaccgtagcgtagacccgttcattgtaaccgttgaacctaaaccggacgatgaaccgatacattacaacagccacgccggacaagaattcagtcttgtgctcgaagggcgcatgatggtcaacatcgatggcaaagagcttatactaaacgaaggagacagcctgtacttcaattcaaaattgccgcatggcatgaaagcactggatggaaaaacggtacgattcctggcaattatcatgtaacaactaaatggagaatgaagggaatctctcattcttaattcctataattatggtagaaagatttttatcacaaacctctttcactacacaagaggactttatcaaaaactttaaaataaacgtaccggaaaacttcaacttcggatacgatgtagtagacgcctgggctgccgaacaacctgacaaacctgcattgttatggactaatgataagggtgaacaccggcaatttacgtttgccgacatgaaacgttatacggacatgaccgcctcgtatttccaaagcctcggcatcggccatggtgacatggtaatgttgatattgaaacgccgctttgaattctggtacagtaccatagctttacataaactcggtgccgtcgtcattcccgccactcacttgctgacaaagaaagatatcgtgtaccgctgtaatgctgcggacatcaagatgattgtttgtgcaggagaatcggttatcacggatcatattgtagctgccatgccggattcccccagcgtgaagaaactcgtcagtgtaggtccccaagtagccgaaggattcgatgatttccacaaagggatcgaaaatgccgcacctttcgtgaagccggaacatccgaatacgaacgaagatatctcactgatgtacttcaccagcggaaccaccggtgaaccgaaaatggtcgcccatgactttacatatccgttggggcatatcgttaccggtagtttctggcataacctgacggaaaacagcctgcatctcaccatcgccgataccggttgggggaaagctgtatggggcaaactttacggacaatggattgccggagcaaatatatttgtgtatgaccacgagaaatttacccctgccgccatcctggagaagatacaggattatcacgtaacttctctctgtgcacctcccaccatcttccgtttcctcattcacgaagatctgacaaagtacgatctctcatcactgcaatattgtaccatcgccggcgaagctctgaacccagccgtatttgagaccttcaagaaactgacaggcatcaaactgatggaaggattcggacagacagaaaccacgctgaccattgctaccatgccttggatggaaccgaaaccgggaagtatgggattgcctaatccacaatacgatgtagacctgatagacaatgacggccgttccgtagaagccggtgaacagggacaaatcgtaatccgtacagacaagggtaagccactgggattgttcaaagagtattaccgcgatccggaacgtacacacgaagcctggaacaataatatctactatacgggagacgttgcctggaaagatgaggacggctatctctggtttgtaggccgtgccgacgatgtgatcaagagttccggttaccgtatcggccccttcgaagtggaaagtgctctgatgacacacccagctgtaatagaatgtgccatcacaggcgtacctgatgaaatccgcggtcaggtagtgaaagctaccatcgtactggctaaagaatataaagggaaagagggagaagcacttatcaaggaattgcaaaatcatgtaaagaaagtgacagccccttacaaatatccgcgtgtgattgaatttgtagacgaactgccgaaaaccatcagtggaaagatccgtcgtgtggaaatccggaagaacgatacgaaataa

SEQ ID NO: 337 - DNA, 6091 bp, unidentified
  source 1..6091: mol_type = unassigned DNA
atgaaaatattagtgaccggaggaaccggatttattggaagtcatacctgtgtagaattgctggatgcaggctttgaagttgtaatccttgataatctttataattcacaggcagatgtcgttgataagatagaaagtatcacaggaaaaaaagtaaccttttatgaagcggattgttgtgatgaagctgcgctggcacaaatctttgcccaacataagattgatgccgctattcattttgccggttataaagcagtgggcgaatctgtggcaaaacctttgatgtattatcagaataatttaatgagtactctggcattgtgcaaagtgatggcaaagcataactgtaagcgtctggtattctctagcagcgcaacggtttatggcaatccggcgagtgttcctatctatgaagattttccattaggacctaccacaaatccttatggtactacaaaattgatgattgaacagatcctaaaagatctgcatgtatccgattctgaatggaatatcgcattgttgcgttacttcaatccaatcggtgcacacaagagtggtttgataggagaaagtcctaatgatatccctaataatttaatgccttacattgtaaaagtcgcaaacaaagaactgccttttttacatgtatatggcaatgattatgatacacctgatggtaccggcgtgcgtgattacattcatgtggtggatttagccaaaggccatgtcaatgcagtaaaaaaagtcatggagccaatcggtgtagatgcgtacaatttaggtaccggcataggatatagcgtattggatgttgttaatacattcgcaaaagtgaatgcgattgaggtaccatatcaaattgatccacgccgtcccggggatattgcccaatgttacgcaagtacgaaaaaagcgtgggaagagttaggctggaaagcagaaaaaggattagaagaaatgtgtaaggatgcttggcatttcttacagacaacaaagaaataaagacaagtgatcgaaaaggcagcggatgggctgcctttcttcacagggggttgtatatgaaagcagtaattttagctgcaggtgtgggacatcgttttaaagaattgacaaaatataaaaataaagctttttttaccatcgggcaaactatggtaatcaaacagattattcagtatttattacaagcaggtattcgcgatattaccattgttaccgggcatcggcatgaagatttttctattttgaaaaagaactatcctattcatatcctgtataatacggcgtatggtgaatacaataatatccattcccttgctttaatcgcagaacaattgaatgaatgttggctgattcatggagatacggtcttattcaagaatatttttaaagaagcatttacacataccacgttttatacgatgctgaaacgtcccaatggagcgcctgttcgcgtagttgaagtggatgaacagcaccatattcaaggatttcatatcgatcgaggagaacgtagagtattgtccttgcttggtgtcagttattggcgtaaggatgctcagatgatcttattagaaactttgaatcatctgcatgagaaggaaaagaagcgctttgatggggaatgggaagagttgttacaagaggtagtaaaaaaagtcgaggtagacgcttatcaattggatcgcaaatatggcggtgatctaaacacgatgaaagattatcaagaaatcgtggagacgtatgatcgttattggaaatccatgcgtaagtgatgacattgcgaaacgtaaaatttataaataagagattatttactagaaaaatatgaaaatatttgaataaacacggaaaaccaccaagttgtgtcgtatgacatagtgaggtggtttttatgcgttgccaacgttgcagaaatgaggacatgaactatttttatcaagatgagggagtctggtattgtcgtaaatgcattggatttggcagaatagatgtcggaaaggaaccaataacgcgtccatgcatgcgcagacgatgtaagtgtcactacacgctgtcctatcccttaacaccaaaacaacaaatcgcagttgcctccattatgcagtacctgaaagaaggcaaagatgttttagtgtatgccgcttgcgggtttcgtgtcataatagtgacagtggcaaatagtctaggaaatataagggtttttgaacttctaccaaagttaaaaactaaaaaatatggttggtgtattgcttagagcgactataaaaatgatagttgttgtaagcagtacaccagctcaaaggaggagctagaatgtttcaagtcaatcgtgacacgagtaaagtatcatcttatgattttaagttatcatcaaggttatgtgaaagtatcgtagataaggcaaataagtaaagtgaggaatttattatgagattagtattaagaactatcttatttccagtaattcttattatgtcaatcatgcttgctttctcaaagttcattgtaagcattagtggtgtagttttaggagtaattgcatttttagttacactaggatcattggcttgttttgtgcaaaatgacccagtaacaggaatacaagctttaataattgcatttctacttagtccatatggtcttcctaaaatagcgatatggataatagcataccttgaatacggaaaagatagattaaaagaaatttaaatagcattaaacaaagacggtagagtaagaactatcgtctttttctttacacaaaatgcaaaggaggaagaagtaatgagtatgtatttgtttgacgagcagccaatacttgcaaataaaacgctcgcaagagaaataggcttaaatgaagctttagttcttcaacaaataaattactggatagaaattaataaaaggtctggaaataattattttgaaggacgatattggacatacaattctattcgagcatggcatgaaaatgattttgattatatgagtattgatactgtcaaaagaactttctccaagcttgagaagatgggatatttgattgttggtaactttaataaagatcctagagataaaacaaaatggtattccattaacgataaaaaactagaagaattatactatgaaatgaaagaaaaaaagctaaatcaagaaagagaaattcgtgaagaagctactcataatgctatgcccaatgcattagtgcaaaatgcaccaatggaaaagggcaaaatgcaccaatgcaaaaatgcagattgcactaatgcactagatgaaaatgcaccaatgcaatatagcaaaatgccccaaccattaccagagattactacaaagaattctacagagattacttcagatatttcatctaatacttccatctatccatccttctatgagattagcgatgacttagatatggaaggaatggtggacgggaataaaaaaataaaaacctatcaatcttgtttagaagaacttagggaaagtactggttacaatgaacactaccatataggcaatagagatattgctagaagctatgatgaaattattaaagtattagctgatgtaatgatgttgaatcctgatgatacggtaacgattaatcaagtaaagctaccggcatatattgttcaagaaagatttacaaaacttaattcatttcatatggactatatcgttgaaactttaagaaataacgaatcgaaaataagaaatgtacgagcgtttatcttaactgttgcatataacacaccaagcgatatggatgcttattatacagcacaggttaattatgacatgagggaggatggatattgatgataaatgatgaaatttctaatagagcagctaatatcgaagtccatgttgctaaagcaactttaaaagaaattcttaagcaaatacaaaggttgcgtgcaaagacaaaacaacatggtggacttgataacttgattaaacacgaaggcaaagaaatgaagcttaaagatatggtaaagaaaggtcagcttgaagaaatcaatgtaaaagatggtgaactaaaagaacttaaaaaagaattaaatagatgtggtgttaatttctcaataatgagagataaggagagtggtgttcattcggtgttttttcaagcaaaagatacgaaagtaatggatcaggcttttaaaaatgtacttagcaatattgaaaagaaagaaaaaactaaggaatcgattcataaaaatattgagaagtttaaagagatggctaaaaataacatttcaaaggataaagtcaaaaacaagcaaaaggaacaaagcctatgattgataaaataatcaaggacataaaagatttatttaaagtgcaagataagaagtgtttcgtattagagaacattccatatcttgcatttttctatgttggaaatattttttctcatcacataagatcgtatgttggtggagatatcatagataaaatatttcaaggattattagaaatcaatactttgagtttaattcctagtttacatttggttgatattgctgttggtataagcatttcagcacttgtaaaatctattatttatttcaaaggtaaaaatgctaagaagtttagacaaggtaaagaatatggatctgcaagatggggtaatgcaaaagatattgaaccatatgttgatgataaatttgaaaacaatattctatttaccaagacagaaaggcttactatgaatggtagaccacctaatcctaagtatgctagaaataaaaatgttcttgttataggtggaagtggttctggtaagactagattttatgtcaaacctaatttaatgcaaatgcattctagctattgtgttactgatccaaaaggcacaatcgttatcgagtgtggaaaaatgcttgaagataacggttatgagattaaaatccttaatacgataaactttaaaaagagtatgaaatataatccgtttgcttacataaaaagcgaaaaagatatattaaaactagtccaaacaattatcgcaaatacaaaaggtgaaggagaaaaagcaggagaagatttctgggttaaagctgaaaagctttattatactgccctaattggttacatctactatgaagctccaaaagaagaaaagaacttcgcaacacttttagaaatgatagacgcttcagaagttagagaagatgatgaaaattatatgaatcctgttgatagattatttgaagcacttgaaaagaaaaatccgtcacattttgcagtgaagcaatataaaaaatataaattagctgctggaaagactgcaaaatctattcttatttcttgtggtgcaagacttgctccttttgatattgaagaactaagagaactgacgaaagaagatgaacttgatttagataccttaggagatagaaaaactgctttatttgttattatctctgatacggatgatacatttaactttgttgtttcaattatgtattcgcagctgtttaatctgttatgtgataaagcagatgataagtatggtggaagattaccaatccatgtaagatttctattagatgagtttgctaacattggtttgattccaaagtttgaaaaattgattgcaaccattcgttcaagagaaatatcagcaagcattatcttacaagcacaatcccaattaaaagcaatttacaaagataatgcagatacaattgttggtaactgcgatagtacattgtttttaggtggcaaagaaaaaactacacttaaagaattatcagaaacacttgggaaagaaacaattgatttatataacacttctgaaacaagatctaatgccaatagttatggattgaattatcaaaagacaggtaaggacttgatgagccaagatgaaatcacagttatggatggaagtaaatgtatctttcagttaagaggagtaagaccatttctatctgagaagtttgatattactaagcataagaattataagctactggaagattttgataagaagaatgcttttgatatcgaagattatataagccgaaaaggtaaagcaaagttaaataaaaacagcgtgattacaagattatga

SEQ ID NO: 338 - DNA, 24296 bp, unidentified
  source 1..24296: mol_type = unassigned DNA
tcattccgcgcgctcatagcggacagtgaacccgcccgcgtccgccatccactgcgcaacggtcgcctccatcgccgcgacggtcgcgtcccagagttccgctgcgcgctcgccggagagataccgttcgcggcaggaaacacgttcatcctccaaaacacgctgcaagtcgttgtcgtccagatacgggtacagcgccgaatcgcgcgtgatgtccgttggcgtgagggagtccagcagcagctccggcgcgggcagcgtcagcgtcagcacagacccgtcgcgcgtcatggtcacctgctgcaaatcaatgccgaaactgccctcataggtgtaatcggcgttgatgctcgccactgtgccgaggaatgccgcattgacttcgtagttcagcgcgccctcttcggtgacgtgcagcgtttccagcttcgcgctctgctccagcttctgcgacagcacgacggatgcgcgaatcgccgcggcggactcatccggcatgatgcgcgcgacccacttcgcggcgtacggcagcagcacaatcaccagcacgagcgtcagcgcggaggtaatcagccccaacagccactttccgatgcgtttcacaggcgacctcctgtccagatgtgcagctgaacgagcagcggcacaatcagatagcggaagatttccacggcgacgaacgccacgccaatcagcgcgaaaacgtacagccagacgcggcgatggcggtgtttttcccgcttgcggcggcacggcggctcatcgggcggcggctggggaatataggtgctctgcgcgggcggcgtctgctgtcggaaacggcgaattgtgccatctggacgctgctcgtagcgttcgtcttgcggtagtttgggctgcatgagcgtcatctccttccgtggctgcattgtgtgattgcgaagggcaaaaagcgcggattcccacgcaaaaccgacgatgttggtcatgccccttccttattatacgacaaaatcagcaagttttcctgcattttcggaagaaaaagcaaaaaagcaggaaaaatacagacggcacggattttcctggaaggcaattgacatgccgaaacatgtgtggtaaaataagcaaggtggttcaggtgatttttgcgtacgattcgtcggacagaagatagcgtaaaaatttgccgaccgcaaaagcagtggcggtggatggaaggtggatggcggcgatgacggaagcaacggtacagcagccggcgacgaccacgcgcgagcagatttggctcaatcgtgaacaggtgcgcaaggaaaaaccggtctatcgggcgctgaagcgagtgcaggatgtgtttttctccctgctggcgctgattgtgctttcgccgctgatgctgattgtagcgctcgcgattgtcattgatgatccgagaggctcgccgatttttacgcaggtgcgcagcggcattgacggcaaggagttccgcatccacaaattccgctccatgtgcgtggacgctgaggcgaagctggcggatttgaagcgcagcacagagatgaacggcccgattttcaagcaaaaggatgacccgcgcatcacccgtgtggggcatttcatccgcaagtgcggcatcgacgagctgccccagttgtgggatattctggttggcagcatgagcatcgtcggcccgcgtccgccgctgccgtgcgaagtggcggcgtatacggattacgagcgccagcgcctgtatgtccgtcccggtctgacctgcatttggcagattcagccgaaccgcaatgacgtgacgtttgacgagtggatggacatggatatgcgctacatccgcgatcgcagcttcctgctggactggaagctgattttcggcacggtatggacggtttttgcgggcacgggcgaataaaaagcgtgcataaatatgccgctggacgggaaatgcaaagaaatcatcggaaagcgtgtgtgtgccaaggacgtcaccacgcttttttacgtttcatattatcctgttttcaaattcgcggcgcagctgggtgcattctcataaggcgacgaacattgctacactcggaaatatataataggaagaaaagctgataaaactgcattttccacaaaattaatcgaaatttacttgccaaataacggtttgcatggtataatggaaaatgcttgataggtatgtacctgtcggcagctggttcgccgcaatgtttgcatgacgaactttttttcaaaaacgagacgatggggggacagcatgagagcctacaagattgcggttgctggcgcaggctacgtcggcatggcgatggcggtgctgctgtcccagcatcatcaggtgacagtggtggatattgtgccggaaaaaatcagcatgatcaatcgccgccaatcgcctgtgcgggatgacgtgatgcagcaggttttgtcgcacacgcccctgcaactgagcgcgacgctcgacgcccaagccgcctatgccgatgcggacttcgtcgtcattgccgtcccgacgaattacgatgatgtcacccagcgcttccagacggcggcggtggaggaggttatcgggcaggtcacgcagtgcaatccggatgcggcggtggtcatcaaatccaccgtcccggtcgggtacacggcgtcggtgcgcgagaaattccataacaggaacatcctcttcagcccggagttcctgcgcgaatcgcacgcaatggaggacagcctgtacccaagccgcatcattgtcggcacggacatgcgggattcgcgcctgaccgcatccgcccgcgtgttcgctgcgctattgcaggaaggcgcggaaaagccgaacgttgacacgctgctgatgggcttcagcgaggcggaggcggtcaagctgttcgccaacacctatctggcgctgcgcgtggcatacttcaatgagctggacacctacgcggagagcaagggcttgaacacacggcagattttggatggcgtgtgtctcgacccgcgcatcggcagccattacaacaacccgtcgttcggctacggcggctactgcctgccgaaggacaccaagcagctgctggcgaactacgccgatgtgccgcagaacatgatttccgccattgtcgagagcaacaagacgcgcaaggactttattgccgaccgcgtgatggcgctgacgaaggaagatcatcccgttattggcgtctatcgcctgacgatgaagcgcggcagcgacaacttccgccaaagcagcatacagggcgtgatgcagcgcctgaaggcgaaaggcgcatccatcgtgatttacgagccgacactgccggatggtgaaacgttttccggcagcagggtggtcaacgacttggcgcaattcaaggcaatgagccgcatcatcgtggcgaaccgctacgacaaggcgcttgatgatgtgcaggatagggtgtatacgcgcgatattttccagcgcgactaagtacgactgaataagggagcggtaatcatatgcagcatggactaccagaacaggcgatagaaccgacagcatcccgcacgggcgcgaataaacttggctatcgtgccgtcaagcgggcgttcgacctgacggcgacggcaatggcggttatcgtactttcgccgctgttcctgattctttccgtcattgtctatctgggtgatcccggcgctgtcatctacgggcaggagcgtatcggcaagaatggcaagccgttcaaaatgtggaaattcaggagcatgtaccggaatgctgaccagatgattgatcagctgagcgaggagcagaagcgccagtatcatacggagttcaaaatcgacaatgatccgcgcatcacgccggtaggcaatttcctgcgcaaaacgagtttggacgagttgccgcagctgttcaatgttcttgcgggcgaaatgagcctcgtcggaccgcggccgctgctgaaatcggaaatccagcagtattatgcggattcggcggatgtgctgctgtccgtcaagccgggcgtgaccggctattggcaggcatacgcgcgcaacaatgcgacctaccagagcgggcatcggcagcagatggagatgacatacatccgccaggcgtcgatatggctggactgcaagattctaatgaaaaccgtggttgctgtcctccgcagggacggcgcgaagtgagggcaaagcaatgaattacctgattttcggcggctccggcttcatcggcacacacctgattcaccgcttgaaagatgcgtgcgtaaagcccggcgactgcatttacgatttggatttggtcatgcccggcgaagaaggcgttgtgcccggcatcgtggagaaaaacgagggagttatctatcgccgcgtggatgtgcgcaagccgattgcccttgatttcacgcctacgccggatgatgtgattttcaacctcgcggcggtacaccggacgccggggcatccggattacgcctatttcgagacgaacattcgcggcgcggagaatgtgaccgcctttgcggagcagcatggcatccgcaaaatcctcttcaccagttccattgcgccctatggtgcggcggaggagctgaaaacggaggatacgctgcccacgccaaacacgccatacggcatcagtaagctggtggcggagaaaatccaccagatttggcaggcaagggaagcgaaccgcgaactgacgattgtgcggccgggcattgtgtatggcaagggtgagcatggcaatatgacccgcttgtacaacagccagaagaagcactatttcttctatgccgggcgcaaggatacggtgaaggcgtgcatttatgtgaaggaactggtgcgtttcttccaatatcggatgattgaccatgattttccgggtgtggatgtgtacaactgcacgttcgagccggcgtacaccattgagcagatatgcagcgccatgcaggcggcgaccgggatgaagcgccatatcccgctgattccgggcggcctgctgatgaccgcggcgacgattcttggccccatcggcggcaagaaagtcggcattcacccggcgcgcgtgaagaaactgatggtgagcacgaacatcagcggccaaaagctggcgaagagcggctatgcgttccacgcggggctggaggacaccttccgcgactggttcgaggactgcggtaaacaaggcttgtattgaacatccgacgcgatgaggaggaaaatgatgaaagttgtcattcttgccggcggcttcggcacacgaatttccgaggaatccgcattcaagcccaagcccatgattgagattggcggtatgcccatcctgtggcatatcatgaagacatattctgcctatggctacaacgaatttgtgatttgtgcgggctacaagcagcacgtcatcaaagagtggtttgcggattacttcctgcacacctccgacatcacgttcgattacacgcatggcacgaacgagatgattgtgcacaacaagcacgccgagccgtggcgcgtgacggttgtcgacactggcttaaatacccagacaggtgggcgcgtcaagcgtatccgcgagtatatcggcaatgagccgttcatgctgacctatggcgacgcggtgggcgacgtgaacattgcggaactggtggcattccatcaggcgcacgggaaaatcggcaccatgtcgatgtacaacttcgggcagaacaagggcgtggtggaagtcggtgcgaatagcgtgattgacgctttccgcgagaagtcggacatggacggcgacctcatcaacatcggcttcatggtattccagccggagctgtttgacctgattgagggcgacgaaaccgtgtttgagaaaggcccgctgaccaaacttgtcgcacagaaacagctggtggggtacatccaccaaggcttctggcagtgcatggacacgctgcgggagaaacagaagctggagcagctgtgggcgtcgggcaatgcgccgtggaaggtgtgggagaaatgaagcagttcgatttgtcgttttatcagggcaagaaagtgttcgtgacgggacataccggcttcaagggctcgtggctgtgcaaggtgctcgccaatgccggggcgattgttacggggtattcactgaatccccctacgtcgccgtccttatttgaaatcgctgatattgcgcaggatgcgcactcggttatcggcgatatccgcgattatgcgacgctgaaggccgcgtttgacgccgcacagccggagattgtgctgcatctggcggcgcagcccatcgttcgtgacagctacaaaaatcctgcttacacctatgaaacgaacgtcatgggcacggtgaatattctggagtgcgtgcgaaacagcaattgcgtcaagtccttcctgaatgtgacgaccgacaaggtgtacctgaacaaggagtgggcgtggggctaccgcgagaacgaggagctggacggcttcgacccgtactccaattccaagtcctgctcggagctggtgacgcacagctacaagaacagcttctttgctgatggacgcgtggcgatttcgacagcgcgcgcgggcaatgtcatcggcggcggcgacttcgccaacgaccgcatcatcccggactgcatccgcgcggcgatgaagcaggaggatattgtggtgcgcaacccgttctccacccgcccgtatcagcatgtgctggagccgctgtatgcctacctgatgattgccgccatgcagtatgaggacggcaagtacgctggctattataacgttggcccggatgatgtggactgcttccagaccggcgcattggtggatttgttcgtgcgcaagtggggcgatggcatgaagtgggtcaaccgctatgacggcggcccgcacgaggcgaacttcctgaagctggactgcgccaagctcaagacgacgtttggctggaagccccactggaatctggacacggcgattgagaaagttgccgaatggagcaagtgctatctgtccggcggcgatgttcgcgcgtgcatggacgaagaaatcacggcatttttgtcggcaggagaataagatggagaatgtaattgttaccggtgcaaacggttttatcggcaaaacgctggtgaatgcgctgctggcaaagggctgccgtgtcacggcactggatgtccgctttgatgatgtgctggcggatgacccgcgcgtcacctgcatcagcgtgctgaacaaggacgtgcctgcccttgcgaaggagattcccgcggcggattatcactgcttcttccacttggcgtgggcgggcacatccgggcctgcacgcgcggattatgatgtgcagctgtcgaacgtcaagctgacgtgcgactacatcaagctgtgcgccgaggtgggctgcaagcgtgtggtgtatgcatccagcatcaacgagatggaaacctacgagtatcttcagtcggatgatattgacccggcgggcggctacatctacggcacgggcaagctggcggcgcacctgatgggcgaaacggtcgccaaaatgaccggtgtggaattcatcccggtcatcatcaccaacatctatggcgtgggtgaaaaatccgcgcggatgatttacaccgccatccgcaagctcatccacaaagagcattgctccttcacggcggggtatcagacgtacgacttcatttatatcaccgatgccatcaacgccatcatcgccgtggcggaaaaaggcaagccgttcaaccgctactacatcggttctggtgagcctaagccgctgcgggagttcctgctggaaatgcgggatttggttgacccggcggctgaaattgggctgggggatttacccttcaagggtgtgaacgtctcctacgaccagttcgatttgaagaaggttgaacgggacacgggctatgtcaatcagattccgtttgcgcagggcatcaagatgacggcggattatattcgggaggaagcataaaatggtgcagaagtttgattttcagccgctggatttgcagggtgcgtaccgcatcaagcctttttatgccacggacaaccgcggcggcttgattaaggattacaatgttgacaccttccgcgcgaatggcattgaccacgatttgaaggaagtgttctacaccatttccaagcgcggcgtgattcgcgcgacgcacttccagcttgttaaacagcaggcgaagctggtgcgctgcatctccggccatgtgtatgacgtgattgtggatttgcgcccggattcgccaacgttcgggcagtggcgcggcttccacctcacgggcgaaaacacggagatgctgcttgtgccgcagtatttcgggcacggctatctggtcatcgaggattcggtagtcagctacaagtgcgccgaggtgttctatggcgagggcgattccggcatcatgtacaacgacccggatatcggcattgaatggccttttgagttgattggcggcaaggagaacctcattatcagcgaaaaggacttgcacctgatgagttttgcgggctacaagcaactgtaaggggagtcgaggatggatatcgtctattcttccagcgacagctactgcgagattgcaggaatttccatactgtcgctcttggagcacaaccggaacgtcaaggaactcaacctctacctgattgacaaccagatttcggcagagaacaagcagaagctggagggcatgattgcctcgttcggccgcacactgacgtatctggcgcatccggacattgaaaagcgctccgccactgaaatcaacgtcggccgctggaacatcagcacgttctaccgcctgttcctgccctctatgctgcctgaaacggtgaaaaaggtgctgttcattgactgcgatacgctggtcatgcaggacttgacgcccctgtgggaaatggatatgggcgacaagtggctctatggcgtggatgactgccgcggtgctgcctaccgcaccaatttggggcttcagccgacggacaactacatcaacaacggcgttctgctggtggatttggacgcgtggcgcaaaaacaacgtcgaggacatgttcctgcgctacatccgggagaatcagggcgatatcacctttgtggatcagggcgtgcagaacggtgtgctgagcaagctggggcgttcgggcatcctgcaccccaaatataactgcatgacggtctttttcgcgtttgattacaagaacctcatcaagctgcgcaagccgcctgtgccgggcgaccccgcgcagtaccgggaagcggtggagaatccggcgattgtccacttccagtcgtgctttcgcatgagcatccgcccgtgggtggagggctgcaagcacccgtatgccaagacgtatctggcatacaaggcgaaaagcccgtggaaggatacgccgatgaagcccgacgaccgcacagtgccgcagaaggtgctcagtgccgtcacgagcgccatgccggaggggctgatggtggactgcatctcttttgtgcacaccaagatttacccgctggcgaggaatttgaaacagaggatgaacaaaaaatgagccgataggagaacacgatgcttgattttgatttgctgaaagactgctacggctgcggcgcgtgcgtcaacgtctgcccgcgcggcgcggtgcatatgacgcaggcagcggatggcagctacatccccgaaattgacgaggcgcgctgcatcggctgcggcaggtgcgaccgcgtgtgcatccatcagcacgcggacaaaaatcatacgccgttgggcaaggaaggctgctatgcggcgtatcagctggatacgcaggcgcgcaaagcgtcggcatccggtggcatgttcttcccgctggcgcaggaaatgctgcggcagggcggctatgtgtgcggctgcgtgtggaatgaacagatggacgcggtgcacatcgtctccaataagctggaagatgttgagcggatgcgcagttccaagtatgtgcaaagcgacatcggcaattgcttggcgacggttcgtggcctgctgaaggcggggacgcccgtcatgttctgcggcacgccctgccagtgcgcggcgtgcgcggcagtgacgggcaatccggaaaatctgctgctggttgcgctgatttgcgagggggcacccacggcgggcgtctggcagcgctaccgggatgcgaaagcggcgcagtacggcgagaaaatccgcaatgtgaacttccgcagtaaaacgccggtcggatggacgatgccgtattttgtgctgacgacaaaatcgggcaagcagcatcgggaaatgagctatcggcagaatccgtatgtgctggcgatgctccaaggtctgacgtaccgccaaagctgctatcattgcgagtttaagggcgacaacggcagcgcggatatcgtcgtcggcgacctctggaaggcaggggaacggcttatccagcaaagcgaaaatcagggaatttccgcgctgattgtcaacactcaaaaaggcaaagattgggtggataaagccgcaagcgcgtggttcatggaggaatatccgctggagcgggtgtgcgccaacaattcgatgctggtgcgcgcgggcaaggaaaatgcgcatcgggcgcagttcttttcacagctggatgctacgccgattgagacgaacctgaatcagtatattgtgcatgaaaatggcataaagctgcgcgtaacgcaagcgctggttgccgttgggctgtacaagccgcgcggaacgcggtgcgtaagctgcgccggagataaggaggcgcggcatgaagatactgcttgtaaacaaatactttaatatgcacggcgggtcagaaacctactttttcggtttggcggatttgctgcggcaggcggggcacgaggttatctttttcgccatgcaggatgaaaagaacctgccctgcgaacaaagcgcgtatttcgtcagcaatgtggagtttaacggggagttaaccgccgcgcagaagctgaaagctgccttccgcatggtgtattcctttgaagcaaagaaaaaaatctctgcgctgattgaaaaggaaaagccggatatcatccacatcaacctcttccaccgcgtgctgaccgcttccatcgttgatgcggcgaaaaagcacggcatcccggtcgtcttcaccatgcacgacctcaactgcgtctgcccgaatcatgtcatgctcgaccacgggaaaatctgcgaagcgtgtctgcacgggaattactggaactgcgtcaagcgtgtgtgcttcaaggattcgcgggcgaagtgcctgatggccgccatcgagagcgatttcaacaagcgcagcgggctgtacaggaaaatcgacctgtttatcacgccgtccgagtgttacaagaacaagctggaagtgtctggactgacaaaatcgcccattgtgcacatgaaaaacttccttccggcggatacaaagtacgccgtgcagggcaaacgcggcgattatgtgctgtattatgggcggctttcggcggaaaagggtatcctgacgctggttcgggcaatggagaagctggaaaatgttccgcttatcattgtcggcactggcccggaggaagatgccatccgcgcggaaatcgaagcgcatcatctaaaccagcgggtaacgatggtcggcttccagtccggcgaaaacctctggcagtatgtgcgcaactgcgcctgcgtggtcgtgccgtccgagtggtacgaagccagcggttataccgcgtgtgaagcgcaggcgatggggaagcccgttgttgcgacaaacgccggtggtctgccggagaatattgttgacggcgaaacgggtttcatcagcccgatgaaggacgaagccgcactggcggatgctatcgggcgtgtgatgcgcttgagcgacgaggaatatcagcggatggcagaaaaatccgtcgccaacgcgaaaaaactcttcgatgcgtccggctatgtggcgaaactgctggttttatacgcgaacctgaaaagaagaggaaattgatgatgaaagtatacacacaaacgtggtatcggggcaataattacggcagcgtactgcaggcctacgcgcttcaacataccatcagcgacatggggtatgcgtgcagcgtcttgaattataagcccacaaaggcggatatgtggaagctgaagttcatcaatcacagcctaaaagaaaccatacagtacaaaatcaacgaatatctgatgaagaagaacggcgcgtccgaagctgtcaacaacctctccctgtttgatgattttcgtgcgcagcatatgcagattacgccgccgtgctccactgcgccagaaattgctcggatttgcggtgatgatgccgtattcgtctgcggaagcgaccagatttggaatccatacatctatgatccttactattttctggagtttgtgcaggatagccgccgcaaaatcgcgtacgcgcccagcttcggcgtgatggaaatcccgcacagatgccagaagcggctccgcaaggcgattgctccgttccgctacgtctctgtgcgggaaaagcgcggggcggaaatcgtgcgtgaattgacaggcaaacaggtgatggtggcggttgaccccacgctgttggtgagcatggcgcattggcaaacgcttgcgaagccgattgacagcgaacaaaagtacctgttctgttattttctcagtgaaaatgcgcgatatttggaaaccgcagagaaaatcgcacgggaaaagcatctgacgattcggatgctgccgatggtcgctgcggacttcaagaagccgggaaccgtcaaggagcccgtcggcccgcgcgaatggctcggacttgtggaaaatgcagattatgtattaaccgattcgttccactgcacgctgttttcgattcgcttccataagcagttcaacgtcctccagcggttcaaggagggtgacaaacgcgggcagaacagccgcattcatgcgctgctgcaaacggcggatatgccgaatcggctggttgttccgggcgaggatgccatcacggaaacaattagcgacggctgtttccaaaccgcggatgcgcggatggcggcacaggcagcaaattcccggcagtggcttgaacaagcgctgcagtcgtgtgaaggcgcgggcaattcggcgaattgacaaaaatcaagatggaatgtgaagcagcttatgaagattctgcatattacctatgggtttaacggcggcggtgttggattcgtgattgcaaactattgcgcaaaccagccgatgccgggaatagcatttgacattgttggcgagagcatcggcaagccgcatcttttgcaggaactgtttgaaaaagcgggctttcacacgttttatgttacgcccaaaaagcaaagcctgctgaaaaatatcaaggaaatgcgccgggtgattcaacagggacactacgacgcggtgcatgttcattttgaagaatggtcgtttttgtacctgtggattgccaagctgtgcggcgtgaaagtgcgcgtttgccacgcacacatggcgtatatgaccggcgcttcggccaaaccgcactatcggctgttccgcatgctcctgaatcgctttgcgacgctccgcctggcgtgctccaaggatgcgggtgaccacctgtacggcaagcatccgtataccgtgttgaaaaacgcgattgaggcagagaaatacgtctatcatccggaaacgcgccgacagatccggacgcaaatggggttgacagacaagtttgtggtgggcgtggtcgggcggctgacgtatcagaaaaatccgcagttcaccgtggaaattttcgcgaaagttaaagaaaaaagaccgaacgcggtgctgatgttcgtcgggcagggcgaattggaggaggaaatccgccgcatggtgcaggcgaaggggctgacggatagtgtgctgttcctcggtctgcgcaccgatgtgccggatttgatgcaggcgatggatgcgtttgtgctgccatcgcgctttgagggattgggtattgtctatattgaagcgcaagccgcaggcttgaaaacttttgcgacagcggaggttgtgccgcaggaggcatgcgttgatgaatcgctgttcacctatctgccgcgagaggcaaccgcgcagcagtgggcagatgcgatgctggcggcggataccacccagcgggagaacaagcttgaggtgattcaaagccacggctatgacatccatcaggaagctgaaaaactgagagccctttacctgaaaggtaaggcagaaggggaaaaatgaggtacttcagaaatccgaattttatttcgttctgttttttaatcctgattaagcccggctgcatcagcggtatccccgtgctgggaatacttgacacgctgctgaacatgattcgcatcatgctggtgctatttacactcatcgtattgttcaaaaacgcgcaattacttccggttaatcggctatttggcgtaacaatgctggtggttgcgtcgattctctgggagccaatctccacgcttactggtggcggcagcattgcggatttcggcgcgctgatgaatgacttgggcatcgcactggtgtgctatattgggctgcgcgcgggatacgattccttcatcgaaggtgtcgcaaaagtttcgggcgcatatgtgctcatcaactgcctgaccgtgattttgttcccggcagggatgtatgcaactacgaagtattcgcaaaacttcttcctgagttaccggacagcgtggttcgtcatttacctgctggcgttgacaaccacgctgctttggaatgcaaacgttggttcgcgcttcacaaaacggtttgcgattgccgtggctgtcgcggcgactctgtcgatgatcttgcagtggacggcgacggggctgttctgctttagcatcggcggtctcgtgctgctctactgcacatggaaaaaaaggaatccgttcaagatttcgacggtgatgctcacggaagcggcggcgttctgggcaatcgtcattgcccgcctgatggacatgttttcgttccttctggtgaacattctgcacaaggacgtgacgctgacgttcagaacgcgcatctgggataacgcacttgcagccatccagcagaatttactaacaggggttggacgactggacgcagcgcagatggaagctattctcggctatggcgtgtcacatccgcacaatcgatacttgtatgtcaccctttgcttcggcatcattgggctggctttattccttctgattgtttactatgcaaacaaaggcacaatcaacccgcatagggtgcgtgaaggcagaattatgatggctgccttcattgctctgctgagcgctgcgcaggtggaatcgctctctgccacgggcggttatgcgattccgctgtatctcattgctgcggcgctccattgcaggaaaggcagaagaaaggaaatgggggagattccgcagcacatgttgacggcgcgcggaaaaacaactatttatagtagaaaaatctaagtgctgagacgggatgcgcgtcgtgaagggaaattaatatggagaaaagagtaacttccgcatttggctggaagttttttgaaaggatatccgtacaaggaactaactttctggttacattgctgcttgccagactgcttacaccgtccgactatggaacagtgtcagttgtaacaatttttattgcgttagcaacgacatttgttcagggcggatttaacacagcgttaattcagaagaaagacgttgatggcaatgactatctcacgattctcatgttctctgagattgtcgcagcggcgctgtatcttgtgatttttttcactgcaccttttattagcaatatttatcatacaccggagctaagcagcctcctgcgcgttatggcaatcgttctatttccgggggcgtttaatgcggtgcaggttgcctatgtaacaagagatttgcgtttcaaagtgctgaccatttcaagctttgtgtccgctttgctggcggcggctgtcggaattggcttggcggttgcaggatttggcgcatgggcactggtgatacagcagttggtgaaccaaaccgcgacctgctttgtcacatattgtattgttcggtggattcctaaaggaagattttcagtccagagcctgcggcgacttttgccgtttggcgcaaaagtgttcgcatccaatttcattgtcgccctgtttcttgatataagaagcttgctgattggccagatttattcatcagaagctcttggatttttcaatcgtggcaagcagtttccgcaagccgttatggaaagtgtgaatggcacgattcagacggttttacttcccgtttattcaaagaaacaggattctgttagcagtgtcgcgaaaatggtttccaaaacggtgagaatatccagtctcctgctgtttcctatgatggttggattggcagcggtcgctgaaccgttggtttcactgctgttgacggacaaatggctggaatgcgtcccgtatttgcagattttcgctattggatacctctttcaggcgatacagctggcgattattcaagcgattaaggcgattggcgacagcggcacaccgctaaagctggaaatcatcaaaaaatgtgtggaagtctttttcctgattgttacgattcggcaaggcgtgctgattttcgcgtcctccttgctgatttgcagtgtgatttctcatctgctgaatatgttcgcagccaaaagaattctaaactatacggttaagcagcaattgatagacattctcccggccaccctgttttcggcagtgatggcggcttgcgtcaagtgcgttactcagcttttgaatggcgcatttgtaagccttgttgcaggaattgcaactggcgtggctgtctaccttctgctgtgcatgctgttccgtgttcccgaaatcaagcagctgaaaaataagctattcaaacgtaagcatgcttaaagcgatgatggtagaaagtggcgggcaaatgtcatgtttcatagctgctgccacaaaatatgggaggcaatacgctatatgaaggggattatccttgcgggtggctccggcacgcgcctttacccgctgacgaaagtaacatcaaagcaacttttgccggtttacgataaaccgatgatttattatccgatgtctgtgctgatgaatgcgggcattcgcgatatcctgattatctccacgccgcaggacacgccgcgctttgagaatctgctgggggatggccggcagttcggcgtgcacctgacgtacgcggttcagccgtcgccggacgggctggcgcaggcgttcatcatcggtgaggatttcattggcagtgactccgtggcgatggtgcttggcgacaacattttcagcggacatggactaaacaagcggttacatgcggcggtacggaacgcggaaagcggcaggggcgccaccgtcttcggctactatgtggatgacccggaacgcttcggcgttgttgagtttgacaaggccggaaaggcgatttccattgaagaaaagccggcgcatccgaaaagcaactattgtgtgacaggcttgtatttttacgacaaccgcgtggttgagttcgccaaaaacctcaagccgtccgcccgtggtgaactggaaattacggatttgaaccgcatttatctggaggatggctcgctgaacgttgaacttttaggtcaaggattcacttggctggatacgggcacgcacgaaagcctggtggatgcgacgaacttcgtgaagacggtagagcagcatcagcaccgtaaaatcggctgtctggaagaaattgcgtatctcaacggctggatcagcaaaaaggagctgatggaggtctatgaagtgatgaagaagaatcagtacgggcagtacctgaaagatgtcatggatgggaaatatcaggaacatttatactaaggggggggagaagcacgatgacgattattgttactggcggcgcaggttttattggcagcaacttcattttccatatgctcaagaagtacccggacgatcggattatctgccttgacaagctgacgtatgcgggcaatctgtccacgcttgcgcccattatggataacccgaatttccgtttcgtgaaggcagatatttgcgatcgggaagcagtctacaagctgtttgaggaagaacatcctgatattgttgtcaattttgcggcggaatcgcatgttgaccgctcgattgagaacccggaaatcttcctgaaaaccaatattattggtacggcgacgctcatggatgcctgccgcaagtatggcatccagcgttaccatcaggtttcgacagacgaggtgtatggcgacctgccactggaccgccccgatctgttttttaccgaagaaacgccgattcacaccagttcgccgtacagcagttccaaggcgggcgctgaccttctggttcaatcgtattaccgcacctatggtctgccggtgtcaatttcccgctgctccaacaactacgggccgtatcattttccggaaaaactgattccgctgatgattgtcaacgcgctggcggataagccactgccggtctacggcgaaggcttgaacgtccgcgactggctgtatgtggaagatcactgcaaggcgattgacctgattatccacaagggccgcgtgggcgaggtttacaacgtcggcgggcacaacgagaagcagaatatcgagattgtgaaaatcatctgcaaagagctgggcaaacccgaaagtttaatcacgcatgtcggcgaccgcaaagggcatgatatgcgctacgccatcgatccgacgaaaatccacaatgagttgggctggctgccggaaacgaagttcgaggacggcatcaaaaagacgatccaatggtatatcaacaaccgcgaatggtgggagacaatcatcagcggcgagtatcagcattactacgcgaagatgtacggcaaccgctgaaccggaggaaatgaacgtgaagttttttgtaacgggtgttggcggacagctggggcatgacgtgatgaatgagctgctcaaacgcgggcatgaaggtgtcggctcggacattcagacggcttatagcggcatcatagacaattcaccggtgtcaaaagcgccgtatataccgctggatatcacagatgttgacgcggtggagagggtcatcacggcagtcaatcccgacgcagtgattcactgcgcagcatggacggcagttgatctggcggagaatgcggagaatcaggaaaaggttcgcgccatcaacgcgggcggcacgcagaacatcgcaaatgtatgcaaaaagttaaattgcaagatgacttacatcagcacggattatgtgtttgatgggcagggaactgcgccgtggaagccggattgcaaggattacaagccgctgaacgtctacggtcaaacgaaactggagggtgaattggcagtcagccggacgctcgataaatacttcatcgtgcgcattgcgtgggtgttcggcttgaatgggaaaaacttcatcaagacgatgctgaacgttggcaaaacgcacgacaccgtccgcgttgtcaacgaccagatcggcacgccgacgtacacgctggacttggcacgcttgctgattgacatgaacgaaaccgacaagtacggatactatcacgcgaccaacgaaggcggttacatcagctggtacgatttcacgaaggaaatctatcggcaggcggggtatacgacgcaagttgtgcctgtgacaaccgctgaatacgggctgagcaaagcggcgcggccgttcaacagtcggctggacaagagcaagctggtggaagctgggtttacgccgctgccgacgtggcaggatgcactgcaccgttatctgcgggaaattgggcagtaaggagaacgccaaaatgggacagattcgagtcgaaaagaacatgaacggcattgcaggactttgcgtgattgaaccagcggttcatggagatgcgcgcggctacttcatggagacgtacaacgagcgcgacatgcgggaggcgggcatcgacgttcacttcgtgcaggacaaccagtcgatgtcaacgaagggtgttctgcgcggactgcacttccagaaaaagtatccgcagtgcaagctggtgcgcgtcgtgcggggcacggtcttcgacgtggcagtggatttgcgcgccgattccgaaacttatgggaaatggtacggcgtcacgctgtcagcggaaaataagaagcaattcctgattccggaaggctttgcgcatggtttccttgtgctgagcgacgaagcggaattctgctataaggttagtgacttctggcacccgaacgatgagggcggcttggcatggaatgacccgacaattggcatcgactggcatgtgcggggcgaatatcgcggcagcgcaagtgcggatggctgcacgctggcggacggcacgccgctgaatttgagcgagaaagatcagcagtggctggggctgaaagatacctttaagttttaagacgaatattatcgtaggaggaagctatggcaaacgggcacttcctcctttttattttgcggcagcgggaaaaatcggccatcagcgtgcggaaaaaacacaaattccaaacggaaaacaaaactttgcataaaatgttcggaaaaacgcttgacagcggcggaagaatacggtacaataaagtgtacccaaacggcgcgggatgtgcagtctgggaaatcggcgaagggggaggaaacgtcatgacgaagtgcaagggtgctgttatgatgggttctctttctttccggggacaagcagttgcaggagcgcaccgttcaggggactgaacaggcggcgctcttttgtttgcctgacggcgaaggaggtttcgactttcatgaagaaagttgcagtcatcatgggcagcgacagtgacctgccggtgctgaaaggggcgtttgagcagctgaaaaagctgggcattccctttgaggcacatgtttattcggcgcatcggacacctgcggaggcggcggcgtttgccgcatccgcgcgggaaagcggtttcggcgtgctgattgcggcggcgggcaaggcggcgcacctcgcgggggcgctcgcggcgcagacgacgctgccggtgattggtattccggttaagtcctcgacgctcgacgggctggatgcgctgctatccaccgtgcagatgcccagcgggatgcctgtggcgacggttgccatcgacggtgcggcgaatgcggcgctgctcgcggcgcaaattcttgcggtcgaagacgagaccctggcggaaaagctgctggcgatgcgcaaggcgcagcatgatgcggtcatcgccaaggacgcggcgctggttgttgaataacataaaacacgaacattctaaatctgcaagcatcaactgttgcggcagacaaccgtgatataataggaggaaacagcaatgaagaagcttgaacagctctatgaaggcaaggcgaagaaggtttttgcgacggacgatccgaacgttgtgctggtggactacaaggacgacgcgaccgcgttcaacggcctcaagaagggcacgattatgggcaagggcgtcatcaacaaccgcgtgacgaatttcctgatgaagatgctggagaagaacggcatcccgacgcattacattgaagagatttccgaccgcgagacgctggtgaagaaggttcacatcgtgccgctggaagtcattgtgcgcaatatcgccgccggttcgctgtccaagcgcctcggtctgcccgaaggcacgaaactcaagcagactgtgctggaatactgctacaaggacgacgagctgggcgacccgatggtcaacgagtaccatattatggcgatgggctgggtctccaagccggtgcttgaccaaattgccgcctatgccctgcgcatcaacgagctgctgacggcgtatttgaaggaagtcaacattgagctgattgacttcaagctggagttcggcatcacgaatgacggtcagctggtgctggcggacgaaatcagcccggacacctgccgcttctgggatacccgcacgggcgaaaagctggataaagaccgcttccgccgcgatttgggcaacgtggaagacgcttacatcgaaatccgcaagcgactgatgggcgaataagaatatctgcaccccggatggcaatcgactgtccggggcgcttgtgtggtaatcaaacactggtcagcatgaaggagcaatgaagatgaacaagctggagtcagcctgctatcttgcggagggggacgaagcgccgtttgacaagctgcacgaggagtgcggcgtgttcggcatttaccgcgcggattccgccaacaagagcgtcgtcgcggagacgtatcatgcgctgtatgccttgcagcaccgcggtcaggagagctgcggcattgtcgtcaacgatgatggcgtgatgaaggcgcacaaggacaacggactggtgacggaggtgttcacgcgcgacgcgctgagcaaaatccacgagggaacgatggcggtcggtcactgccgctacggtacaacggggatgcacagccgttccaatgcccagccgctgctgattaaccatcaaaaaggcgcgatggcactggcgcacaacggaaatctgaccaacgcggcggagcttcgcgaacagctggagaagaacggcgcgattttccactgcacgtcggacaccgaggtgattgcctacattatcacgcaggagcgcctgaagtgcggttcgattgaacaggcggttttgaacgccatgcaggtcatcaagggcgcgtattcgctcgtcgtcatgagtccgacgaagctgattgcctgccgcgacccgcatggcttccgcccgctgtgcatgggcagaatcggcgacgatgtggtgtttgcgtcggaaagctgtgcgctggatgccatcggcgcgacgttcgtgcgcgatattgaggcgggtgaagtcgtcgtcgtcaacgaagaggggattcattcctataagatgcccggcgcgtgccatgacggcatgtgcatcttcgagttcatttatttcgcgcgtcccgattccgtcattgacggcagcagcgtccacgaggcgcgcatccgggcgggcagcttcctcgcgcttgaccatccggttcaggcggatgtggtcatcggcgtgccggattccgggctggatgccgccattgggtacagccgcaccagcgggattccctacggcatcggcttcatcaagaacaagtacatcgggcgcacattcatccagccgggacagaagcagcggcaggatgccgtgcgcatcaagctgaatgccatttccgccaccgtcaagggcaagcgcgtcgtcatggtggatgattctatcgtccgcggcacaacctgcgcgcgcattgtccgccttctgcgcgaagcgggcgcgacggaagtgcatgtacgcctgtccgccccgccgttcaccgacccatgcttcttcggcacggacgtggacagcaaggagaacctgattgccgcacaccattcggtggaagaaatcggcaaaatcatcggcgcggactccatcggctttttgtccctggaggcgtgcgacaagctggcggcggacagccactgcggattctgcaaaggctgcttctgcggcaaatatccggttgatccgccgctggtgacggagaaaaacaaattcgaccagcccattcacggcggcaaggtgcaggacgacgactaacgcgacgaatgcgacaaaggagcagacaaccatgatgaagagcgagagcgaaagctacaaggcagcgggtgttgacattaccgccggttacgcgtcggtggaactgatgaagaagcatgtcgcgcggacgatgacggcgggctgtgtcgagggcatcggcggcttcggcggcctgtttgcgctggacgcggcgggcatggaagagccggtgctcgtttccggcacggatggcgttggcacgaagctgaaaatcgccatgctgcttaacaagcatgataccatcggcattgactgcgtggcgatgtgcgtcaacgacgtgatttgctgcggcgcgaagccgctgttcttccttgattatatcgcctgcggcaagaatgtgccggagaaaatcgcgtccatcgtcgcgggcgtggcggaaggctgcgtgcaggcggaatccgcgctcatcggcggtgaaacggcggagcatcccggcatgatgccggaggacgactacga

SEQ ID NO: 339 - DNA, 7360 bp, unidentified
  source 1..7360: mol_type = unassigned DNA
ttaatattccttatcaccatcaggtgtcttcatccataccttttcatgcttccacttaataagaatcatatacagccataggataagacctacacccatatatcccgcaaatcctaaccatgttgcctttccaataccgatagtacagaagaatgcgataattgccataattataagagaggctatcttaagtcctgttgcacatttgtatggtctctcccattcaggatgcttctttaaaagcaccagtgaagatattgaagtaatcacataacacaatgcacatgcgaatgccataaggtcaaagaatgctgtaatactctgcattgcaatgaatccaatacttacaacaagaataagtatgttaggaagtgttggctggttgtacttattagtgtatgagaactgctttggaaggaaattctgacgacccatagcgtatatcatacggacgcctgaataccagaaaccaagtactgatgtaccaattgggaatacaactccgacaatacccattataaggacaaaccatgcaatcttatcaccgaagcagtactgtaatgcttcaaatgtgatgaatgggtggcagtcaccgccattagtaagctctgcccaaggcattgcacctgcaagacagaagtagaaaattgtatatatagcaccacatgttataactgaaccaagaatagctttcttctggtccttaattgggaagtcgccctcctcaaccattgctggtactgtctcgaatccgaagtatggtgttatcataaatgaacatccaacaacccatgcaataccggtcgcaaagttaccaccccactgcttttcattgctgcttgtaaagaaatctgcgaaattagcaatgctccagtgtccactgaacagaaaaagcaatgaacatataagaatacctgcgataccagccataagcatgaatgactgaaccttgcctgctacaacatttttataaagactgagtacgcaccagaagcacagtactaatgaaccgacaataactgccttgccacctgtaagtcccagaccaaactgatgatttaaccattcgataattccaagtacacctgctgcaggaacggctatccatgcacacatgataagccacgctgaccagaaacctgcatgcttgttaatacctaccgtattgaataccagacacgaacctgtacttggtaacattgtcgagaattcagcatacacaaatgctgttggcagtactgccagtgtcataagtgcaaatgccaagaatgttccgggacctgtatatgacatgaatataccatcccagtaacacataaatgtaaatattgctcccgttgccattgcatatacataaatcagcttcattgatttagataatgcatttgttttcttttcgcccataatagcttcctcccttattgttgttcatgatttgttgtcacgaagatttcttatgtgcctatccaaataatctaagatacctttcggctaattccatggttccgtccatccagccgacacttaattctgctaccggacctgattcctgatgagatgcaagccatgcagtaagctgtaatcttctcatcattataaatgtgtctatttcttcaaaatccgtatcagtgaacggaagaaccttcttatatcctgcaagccatgcatttacaagctttggaacaattggcttgtcctcaataaaactaagtgctgacgcaaggtcatgtaagtgccatccaaaaccgcagtcatcaaaatcaataaccttaatctggtcgccctcaataagtagattagctaatcttaaatctgcatgtatgagtccaaaattattctcattagttccatatctttcaagtcttctcttaataattcttgaaacctctgacaatatattttctgcctccggggtcatctctggaaatgctctccagtcaccccatgcagcatgttcacctattatcgtgtcgtaagtccataccatacggtcaagcttgtctgttccgttccatatctctgtctgacggtgaagataagctgttgtctcaccgagatatctgaactgctttaccatctgctcctcgttattctcatcaggtgcttctcccagaagaaaatcacatataacgcagaaatatacatttccatccggtcctgtaatctcctgtatattcttaccatcaagcccttttataggattagctacaagaagcggtgtgtagtcattaatctgtcttaaccacttcatctctgaattaagctcatccaatgtgtgataacctggtctgcttattctaagcactccctctttttcacctgtttctttgttcttgaccatataggttgcattctccgacagcactatgagtttcgcctcacatctgtcctgccatccgtatttttcaagcgaagcatttgcaaccgcatcaaataaatcaacattttcaaatgccatgtcattatcctccaatcagaaaaggcgtacacaaatctttccgattcatgtacgcctttgtacttttcttatatttaattactgtcccatagatgttgtttccggcaatgtgcttccgccatcaataactatctgtgttcctgttatgtagcttgattcataacagccaaggaatgctgcaagctctccgacctcctcagggtcagccagcctctttaaaggcaccgcatctgcaattgcctgtatcgctctctcaggattctccgggtctgactgctttgccattccttcaacaagcggtgtccttacatatcccggacatattgcattaactcttatattcttgtctgcaaattctcttgcaagcgcctttgtaaatcctaccagtgccgccttagatgttgcatatgcaacctcccccggatcagctaccatatctcctgttacagagcttgtaactacgattgcaccaccgccatttgctatcatgcttggaataactgcttttgccacattccatgcacctttgacattaatatcaagatgtaagtctctattttcaaatgtgtcatcttcaagaaagtcttcaagaacacatacacctgcgttacatacaagcacatcaatctttccatatgttttctcagcaacttcaacaattctttcaacactcttgtaatcagatacatcaacctgaacacctgttgcctcatacccttcgctttttaactgctctgcaagttcaagcaccttagggcctcttgctgcaagcacacattttgcaccatactttgcatacactttggcgattccttcaccgatgcctttagatgctccggtaattaccgcaacttttccttctaactttcccataacgccacgcacctttcttagtttcctgaatgcaaaaaaagacacgaaagctttcaccttcgtgcccctttgcacttcgccattaactatagtaccaagtgcctgaaattgcaataacaaaaatatgcattttttctttaattcttaaggaattttcaagaaaaaatctttattcataaagtgggtacttgtctgtaagtcccttaacaagctccattgccttagcctggttagcatctacatcatcaacaagcatagcaattgcttctgcaacaacatccatatcagcctcattgaagcctcttgttgtaacggctgctgtaccaagtctgataccgcttgttacgaatggagaagccgggtcattaggaattgtattcttgttacatgtaatattagctgcatcaagaagcttttcaacttccttaccagtcttgcccttgcttaagaggttaacaagcataagatgattatctgtaccaccagatacgatatcaaagcctctgttcataagtccgttagcaagtgctgatgcgttcttaacaacattttcagcatataccttaaagcttgggtcaagtgcttcctttaagcacactgccttaccagcaataacatgcataagaggtccgccctgaattccagggaatacagacttgttaagcttgaacttctctgctgcctctgctgaagcaagaatcatacctcctcttggtccacggagtgtcttatgtgttgttgttgttgtcacatctgcataaggaattgggcttgggtgtgcaccaccggctacaagacctgcaatatgtgccatatctaccataagtaatgcgccaacttcatcacagatttctctgaacttcttgaagtcgattgttcttgcataagcagaagctcctgcaataatcatcttaggcttgcattccttggcaattcttaatacttcatcataatcaataaatccgtctgctgtaacaccataaggaacgatgttaaagtattttccagaaatattaactggtgaaccgtgtgataaatgtccaccacagtcaaggctcatacccataactgtatctccaggattaacaagtgcgaagaatacagctaagttagcctgtgctcctgaatgtggctgtacatttgcatattcacagccaaaaagcttctttgctctttcaattgcaagtgtctcaacaacatcgacatactcacagccgccgtaatatctctttccaggatatccttctgcatacttattagtaagagggcttcccatagcagccataactgccttacttacaaggttctcagaagcgataagctcgatgtggcttctctgtcttccaagttcatcatccatagccttagcaaggtctggatcatagtttaatacttcatcaaatgaatacatataacttcctcccattatactttagtgaaacaaagtgtccctagttacttatgatataattaaattacggattagtcaatttaaagttgtgaattcctgctttttttaatatttgtttctgtatatcgactgcaactccatatccctgctcctcaagttcatatgttgattgttcaagtgccatctcaaatttttcaaccatacttaaaaaatgctgcgttgctattccttttccaagaccaagtttctttgcctcattctcaaacgacttctgatttatattccttatatcatattcgccatctatgttaagcgacattttctctgtgctgctgtcatatataacagtacttaataaatcatatgccggagctaatcttattccttttaaatcctcactatataaaagagcaatatttttaatatcctgcaattattaatttgggttgtaccttatgggtatagtatatatttatccaatcagaactttttgccttcaaataaaaaacgaacccacccgaagatgagtccgtttcatagtcttaaaccggcagattcttcatactctcaagacttataacaagtgttgatgtattatgaagaagtgctgaagttgtaggctgtatgacgcccgttacaccaagtgcaataagtgcggaattgaatccgacaatcacacggtaatttctgttaatcttcttaatcagactgtcacttaatttcttaagcataagtatctggttaagatcatctgcgccgacagtgatatctgcaatctctcttgcaatctcagcaccatcacttatggcaatacctacatctgctgctgaaagcgctggtgagtcattaattccatcaccaatcataattacctttcgtccggctgcccgctctttctctacgaacttagccttgtcttctggaagaacttctgaataatattcagtaactccaacctttctggcaatagaggcggctgttctttcactgtctccggtcatcatgacaacctttgatattccagccttcttaagcccttcaataacctccggtgcttcttctcttaatggatcaattatgcatataactgctgcaagctgaccgttaattgccatataaagatgtgagcagtcatctggaagactgtcaaataactcctgctttcctgctggaattacacatgcctcatcctcaaatacaaagtgatggcttcctatgataaccttgcttgtattgataaatgttgatattccatgtgcaacaatatattcaaccttagaatgcatctcttcgtgcataaggtttcttctgccagcttcattaacaacagctttagccattgaatgtggaaaatgctcctcaagacacgcagctattcttaacagctcatcttccggcattccgttaaatgaatataccctgcttactgttggcttagcctttgtaagtgtacctgtcttatcaaatacgatagtatccgcttcagcaattgcctctaagaacttaccgcccttgactgttgcactcgcctgacttgcctgtcttattgctgcaagtaccgtaataggcatagcaagtttcaatgcacatgagaaatcgaccataagtattgacaatgccttagtagtattgcgtgttaacagatatgtaagtgcagttccaccaagtgaataaggtacaagcttatctgcaagatgctctgcttttgactcaagacctgattttaacttctcagattcttcaatcatcctgacaatcttgtcatatttgcttgagcctccggcacgcttaaccctgaatactatctcgccctcttctactacagttcctgcaaatacagaagttccctcacctcttcttacaggctcagattctcctgtaagtgaagcctgattaaccatagcctcaccactgataacagttccatcaaatgggattacattacccatccggattattacattatctccgtccttaacatctttcacagatacctgtacttctgcatcatctgtctttaaccagaccttattaacgttaagtgacatcgttcttgccaggtcgtcaaccgacttcttgtgtgtccagtcctctattatctcacctataccaagaagaaacattactgaaccagctgtattaaagtctcttcttaagatagaaactcctattgcagttgcatcaagaactggcacttcaagttttcttgcaagcagtgtcctgattcctttataaatgtacttcattgaagataccgttgttaataccgcacataccggtgccggaataaacaatttcttagtcattctccacaacacctgatctgccagcttttcagtataatgagaattgattgctcttcctgatgttgcaagaacatcttcaggaacctctacattgctgtatctgaacctagcaatagcttcaatcacggtttttcttgaacatctgtactcaacgactgcatcagcagttctctcatacactttgacattcgtgacgccctgcagattcttaagataatactgcaaagtatctgcctgtgtaaaagtcatgccagaagcatccatgtgaacgcggattcttccgggcacatcatgctttattatgaatttcat

SEQ ID NO: 340 - DNA, 8399 bp, unidentified
  source 1..8399: mol_type = unassigned DNA
  misc_difference 1614: note = a, c, g, or t
  misc_difference 1615: note = a, c, g, or t
  misc_difference 1616: note = a, c, g, or t
  misc_difference 1617: note = a, c, g, or t
  misc_difference 1618: note = a, c, g, or t
  misc_difference 1619: note = a, c, g, or t
  misc_difference 1620: note = a, c, g, or t
  misc_difference 1621: note = a, c, g, or t
  misc_difference 1622: note = a, c, g, or t
  misc_difference 1623: note = a, c, g, or t
  misc_difference 1624: note = a, c, g, or t
  misc_difference 1625: note = a, c, g, or t
  misc_difference 1626: note = a, c, g, or t
  misc_difference 1627: note = a, c, g, or t
  misc_difference 1628: note = a, c, g, or t
  misc_difference 1629: note = a, c, g, or t
  misc_difference 1630: note = a, c, g, or t
  misc_difference 1631: note = a, c, g, or t
  misc_difference 1632: note = a, c, g, or t
  misc_difference 1633: note = a, c, g, or t
  misc_difference 1634: note = a, c, g, or t
  misc_difference 1635: note = a, c, g, or t
  misc_difference 1636: note = a, c, g, or t
  misc_difference 1637: note = a, c, g, or t
  misc_difference 1638: note = a, c, g, or t
  misc_difference 1639: note = a, c, g, or t
  misc_difference 1640: note = a, c, g, or t
  misc_difference 1641: note = a, c, g, or t
  misc_difference 1642: note = a, c, g, or t
  misc_difference 1643: note = a, c, g, or t
  misc_difference 1644: note = a, c, g, or t
  misc_difference 1645: note = a, c, g, or t
  misc_difference 1646: note = a, c, g, or t
  misc_difference 1647: note = a, c, g, or t
  misc_difference 1648: note = a, c, g, or t
  misc_difference 1649: note = a, c, g, or t
  misc_difference 1650: note = a, c, g, or t
  misc_difference 1651: note = a, c, g, or t
  misc_difference 1652: note = a, c, g, or t
  misc_difference 1653: note = a, c, g, or t
  misc_difference 1654: note = a, c, g, or t
  misc_difference 1655: note = a, c, g, or t
  misc_difference 1656: note = a, c, g, or t
  misc_difference 1657: note = a, c, g, or t
  misc_difference 1658: note = a, c, g, or t
  misc_difference 1659: note = a, c, g, or t
  misc_difference 1660: note = a, c, g, or t
  misc_difference 1661: note = a, c, g, or t
  misc_difference 1662: note = a, c, g, or t
  misc_difference 1663: note = a, c, g, or t
  misc_difference 1664: note = a, c, g, or t
  misc_difference 1665: note = a, c, g, or t
  misc_difference 1666: note = a, c, g, or t
  misc_difference 1667: note = a, c, g, or t
  misc_difference 1668: note = a, c, g, or t
  misc_difference 1669: note = a, c, g, or t
  misc_difference 1670: note = a, c, g, or t
  misc_difference 1671: note = a, c, g, or t
  misc_difference 1672: note = a, c, g, or t
  misc_difference 1673: note = a, c, g, or t
  misc_difference 1674: note = a, c, g, or t
  misc_difference 1675: note = a, c, g, or t
  misc_difference 1676: note = a, c, g, or t
  misc_difference 1677: note = a, c, g, or t
  misc_difference 1678: note = a, c, g, or t
  misc_difference 1679: note = a, c, g, or t
  misc_difference 1680: note = a, c, g, or t
  misc_difference 1681: note = a, c, g, or t
  misc_difference 1682: note = a, c, g, or t
  misc_difference 1683: note = a, c, g, or t
  misc_difference 1684: note = a, c, g, or t
  misc_difference 1685: note = a, c, g, or t
  misc_difference 1686: note = a, c, g, or t
  misc_difference 1687: note = a, c, g, or t
  misc_difference 1688: note = a, c, g, or t
  misc_difference 1689: note = a, c, g, or t
  misc_difference 1690: note = a, c, g, or t
  misc_difference 1691: note = a, c, g, or t
  misc_difference 1692: note = a, c, g, or t
  misc_difference 1693: note = a, c, g, or t
  misc_difference 1694: note = a, c, g, or t
  misc_difference 1695: note = a, c, g, or t
  misc_difference 1696: note = a, c, g, or t
  misc_difference 1697: note = a, c, g, or t
  misc_difference 1698: note = a, c, g, or t
  misc_difference 1699: note = a, c, g, or t
  misc_difference 1700: note = a, c, g, or t
  misc_difference 1701: note = a, c, g, or t
  misc_difference 1702: note = a, c, g, or t
  misc_difference 1703: note = a, c, g, or t
  misc_difference 1704: note = a, c, g, or t
  misc_difference 1705: note = a, c, g, or t
  misc_difference 1706: note = a, c, g, or t
  misc_difference 1707: note = a, c, g, or t
  misc_difference 1708: note = a, c, g, or t
  misc_difference 1709: note = a, c, g, or t
  misc_difference 1710: note = a, c, g, or t
  misc_difference 1711: note = a, c, g, or t
  misc_difference 1712: note = a, c, g, or t
  misc_difference 1713: note = a, c, g, or t
ttattccgtccagctgtacacccattcgccctgctggttgatgtagccgtattgggtcgtgccgtcgtcctgcaccattcccacatacgccagcttgccgtagaactgcgtcacaaagctgaattgcagcggaatcgccagttcgccgctttcgtcgagataccctgccagcctcgtgccgtctatatcgtacactgcctgcaatcccgacgggaaatacacgcccgtctggtcataatccggaaaattccacttcgcttcgctgatgattttaccctgcatgttcacccaaccgcagcggcgctgtctgcccttctccacaacgtacatgcacaagccgttctcctccggcgtccacagccgcacgatattttcgccttgcagggtgaacagctcctcgcccgccacgctgtacatcgtgaagctgtgttcgcccgtcggcagcacatagcagccatgccggacgtctgcatagtgcgtatccgtcgtgcgcatcacaactttccccgtttggtcgatgacaccataagtgccgtcggtcaattcaacctccgcatagccatcctcaaactcgaaggcatacgcgaactgcggctcaatcaccacttcgccgcttgtattgcagtagccgtataagccgtttgcacccaccacttcaaacagcccgtcaccaatctcaatatcgcagtattcctcatggatgccctccggcaggggatattccttccccgtttcgtcaatcagcagtgtctgcacaatgttgtaatcatcatcacagactgtgacaacggcgtacccatcataaaaattggaacccatgttgtccgaatcatactttgccggaatcaccatttcgcccgtatcgcggctgacatagccccacttgccggtttcgtctgccacggcaatcaagcggctgttcgactccctatgattcacgccccgccacttcaagccgctgtaaacaccgctctgcacatcaaagaagccttccagccattccgtgccgagactgtttttccccgtcgccttcttgtatagcagccaaatgcccgtttcgcgtccgccgtaatagaagccatcatagccgctgtctgtcactacattctcatccagtagcagcacaatttcgccgtcgcggttcgcgaagccttcccggtcgccctgctgaatccacgcataattgccccggaagtcgcccgcactgtcgaatttcggcggaatcacccaattccccgcctcgtcgatatgcccccacaagccgttgtcgcccttcgcggcgtaccaatacccctccgctgacgcgcagcctaacagcatcagcaggcacaatatcccgcacagcagtttcttcatgtgttttccctcctatggtgatttctgccttcatgataccagccttgcgcccgtttcgcaagcgctccggcgcaattgttacaattgaaaaaggcagggagaacgaatccccctgcccatattgattagttactccgccagcagcggcgcgacaagcccttccagcaccgtcagcgtcaccgacccgaccctgttgtacacgattttcccgtccgcatcgacaatgaccgtcatcggcagctgcgtcgagccgcccannnnnnnnnnnnnnnnnnnnnnnnnnnnnnnnnnnnnnnnnnnnnnnnnnnnnnnnnnnnnnnnnnnnnnnnnnnnnnnnnnnnnnnnnnnnnnnnnnnncgtgaaatcagggcatttcatgccgacttcgtagccaaccggcgtgtcgtcgtccggcgcttccgtggcttcgggcgcaagcgtttccgtcgcgacgggctgacttaccgattcttccaccgtgtccgccttgtttacctgccacatcaccacgcccagcactaccagcgccgccgtccacgccgccatcacgcgaatgcggcggttcgtgcgctttttgttgtcttccggcttcatcggctgcacttcgttcgctttcagcgtaattttgcccattttcatgctgatggctttcgtcgggcaaacgtccacgcacgatgcgcagtggatgcactcatggtcgcccacatgccgaatatccatcttgcagtgcgccacgcagcgcccgcagttcgtgcatttgcttttctcgaccttcacgccgagaatcgacacacgcgcgaacagaccgtaaatcgcccccagcgggcagaggaagcggcagaacgcacggtagaagaacacacacgccagcagaatcgccaccatgatgacgaatttgcgcgtaaagaggatgttgaggatggagaacttgcccgcattgaccgggttcgccagcaagcccattgcgccctcgaacgtccccgccgggcagatgtacttgcagaagcccggcacgggatactgctgcaagctgtacgccagcgggatgatgaccacaaacaccgccaacaggacgtatttgagatacgacagcgcatgggtgaagcggcttttcttcaccttcggcgtcggaatcttgtagaacaattcctgaatcagccccagcggacagagccagccgcagatggtgcgccccaggatcagcccgtagagcatcagaatgcccagaacgtagtacggcgcgcgcttatccgaggaggccagcgcgttttgcagcgcccccagcggacatgcgccaatcgcgcccggacaggagtagcagttgaaccccggcacgcaaacgttcttgatgctgccagtgtaaatgtcgcccttgatgaatcccttcacataggcgttgtagagcagggcggcgtaaacctgtatgagccgccgggtggtgggcttatgggcgctccaccatgccgcaaatttcttagccaaggccgatacactccgtacaaatattgattgccttcaccagcacatcgaacatgccgctgttcatcacacccagcacaatcagcgccaccgccgccgccgcgatgatcacgcggatgacgttcctgcccgtcgtcttttctgaagcggctgcatccggcttgcgcttcggggcgctcctgcgcagttccaattccttcatcaacaggcggaaattccactgctcagccgccatcaggaggatgaacgccagcccaatccacgggaacgtttcaatcaccatctggcgcacgacgacttccaaatcacgcgaggcaaaattcgaccagtccagcaggaatcgccctgccatccccccgcaaatcaagcacagaatcgccgcgccgcaccatacgcccgtgcgctgttttttcactttgcggatttcgtctgtctcctccgtccgcgcacgcagcatcagtagctgattctccaccggcgcgcgaagcgattccttctgctccggctttccggcgatgatgttcgccgccagcagcgccagaaagacccacacgctccacgcaatcgaggcgaagtgcgccgtgacaatttcccggctgtaaatatcgtgaatccgcagcccgttttcgcccatgttttccggcgcgatgccctcatgatagatggtcacgcactgccaaatcaacagcgccgccatcagcaccgtcgccactcccagcagccaccgaagcatggtgcgcaccgagcgtttgctctctgccttcattccgcgttcctcccactttgccgggcgcgcagtacgcccggaacgctactgactccattatagtgcagcaaaggggatgcgtcaaacaattcatcggattttcgctgtttcttttccgtttttccgattggaacccggcggcattgtgaaaaaatcatcaatttttgtccattttgtgccgtccgctcttgcttttccgcatcatctgtgataccataaacgcacaggctgcttgttcagcccttcaccatgaaggaggaaatatataatgggttttctggcaggaaagacggcgattattaccggcgcgggctatgcgaagctcagcaatggccgctgcggttcgattggctacggcattgcgaccgcttacgccaaggaaggcgcgaatctggtcatcacggggcgcaacgtgaagaaactgaccgacgcgaaggaagaactggaacgcctctatgtcgtgaaggtggtgtgcgtgcaggcggacgtgaatgacagcgcggacaacgaggctgttgtaaacaatgtcgtcaaacaggcgattgacaccttcggccgcatcgacgtgctgattaacaacgcgcaggcttccgcatccggcgttccgctggctgaccataccaccgaacagttcaatctcgcgctgtattccggtctgtacgccacattctattatatgaaggcgtgctacccctatctgaaggaaacgaagggtgctgtcatcaacttcgcctccggcgcgggtctgttcggtaactacgggcagtgcgcgtatgccgcggcaaaagaaggcattcgcggtctgacccgcgttgccgccaccgaatggggcaaggacggtatcaacgtcaacgttgtctgcccgctggcatggacgacgcagctggagaacttccagaaggcatatcccgaggcgttcaaggcgaatgtcaagatgcccccgatgggccactacggcgattccgaggtggaaattggccatgtgtgcgtccagctggcttccccggacttcaaattcatgtccggcgaaaccatcacccttgaaggcggcatgggtcagcgcccctaaccgctcgcatctttgctcccttctgcgcaccgcggaagggagttttttgtccctcattggaggttttttcgcatgaataccgaccgaatcgcgtattttctcgccgtcgtccgcgaaggcagcttctccgccgctgcgaagaacatgtacgtctcccagaccgccatcagccagcagattgcgtcgttggaaaaagaaatgggctgcgcgctgttccaccgcctatccaccggcgcggtactgaccgaccaaggcgagcagtttctcccctacgccgagcgcctgatggggattcagcttgaattgcaggacgctttcgccgatgcgcaccgtgtgagcgccatccacatcggctacaacgggccgctggaaaaagaactgattgtcgatgcgtacctttccctgcatccgcgcctgcccaatttggtgattcacccgctgtacctctcgctgacggccatgtccgacgccctctatcgcgggcaatgcgacatggtgctgacgcttcccggcgaaatcgaccagcggaacacctatcaggaggtactctacgatgtgccgatgattgccgccgtttccgaagcgtcgccattagcggaaaagtcggttgtgtcgctttctgatttacgcgcgcatccgttgattctgcttgcccccgaccaatcgcgcagcggacgcggcgcgattcacgactgggcgcagaatctgggattttcgcatccatcgattatttatgcggattcggcagatatgcaaattttgatggtttcgctgaatctggggatttccttctttccagcgagaaagccagcctatttcaagggcgtgaagctgattccgctgacggaggatattgggcatcatcggtcggtgctggtgtgcagacggctgacaccggcgattcggatgattcgcgactgcatgatagaggaaatgaaaaagggctaaacacgcggaaaaagcagcgtggcgaaaccagctcaatcgcgcggagtccagcggagacgaccaaagtgttttctaatcgtccccttgaccccttgggtcgccactaccagcattgacttgttccgcagtacaacgaatcacacccatccccgcactcaaaaaaagcaccagcccttcgcagcatttgccgcttcggtctggtgccatttttatcaaccgattactgctggtttgccgcgttttcacccgcaatgcggcccatcgacagcgcgttcaggaaagacgaaccggacatgtagaccagatcgtacagcgcgccgttggaggcttcgcccgccgcgtacaagccaccgatgaccgtgccgtccgcacgaagcacctgcgcggaggtgtccgtcacaacgccgccaatcgtgcctgtgtactgaggcgcaatctgcaccgcgtagaacgggccaaccgtcgcgaaattcatgaaatccacgcgcgcgccaaacgccgcatccacgccggtttccttcgccgcattgtagaccgcgatgcagtcaaggaacgcctgcttatcaaagcccagcttgtccgccagttcttcaagcgtgtccgcagaggtcactgccgggtcatcaacgttgttcgccaaaatcgccgcatagtcctcacggtcagagccgtagatgcagtagtacggcgccgcatgacggtaaatcaggctcggataattcagggaatggcagtattcattgacgaagcggacacccgtgttgtccacaatcggcgcctgactccacgggccgcccagagaggtcagctccgcgttcgtgccgtcgcccacgacataggacatgcccaagcgcgcacccttctcgtaaaccgccgcgccgatggcctccgccatcagaatgccctcgccggtctgacccgcggagccgtagaagtacgccacctgcgccgcgtcaacgggcgtgaagcgttccatcatttcctgattgttgccgaagccgccagtcgccaataccgtgcccttggcgtagatgttgaaggtctgaccgtccttttcgaccgtcgcgccgatgcagttgccattttcgtcggtcagcagcgccgttgccttcgtctccatccagtattccacgcccagctcctgattcttcgcatagagcaggtcggtgggcttgccgttggaggcatagtggaagcgatccacgccctcaatcaggtcgaagctcatcggacggccgaactcgaagccgttctcctccagccagtcaatcaggcccgccgcctgacccaccacgaagcggatgcggtcttcatccatgccgctgtctttgcggaaatactcgttgtggttgtattccacccacagatcgacgtaggcttcgcaggtatcctcgatgccgtacttcttctgctcggaggattccggcgccgcaatgccgccgcccgccatcgcagacgtgccgccgatggtcgccagcttttcaatcgcaatgacctttgcgccggcttccgcagccgccatcgccgctgctccgccagccgcgcccgtaccaatgaccagcacatcgcaggtcaggtcggtatagttttccttctccgccgcctcgaccttcgccaagtccgcgttcgtcagccccagctccgccagtgcagccgccgcggccgctttcaccgcgtcggatgtcaccgtcgccgccgtcacgccgtccacctcgacggagttgtttgccagcatctgctccgccagcaccttcgccgccgctccaccgatggaatcagtctgcgatgtcgcgtcgatttccacgttcaccagcttgtcgccgtccacgctcagcgtgaccgtcacgtttccgccgccaaacccttccgccgtcgcactcgctgtcttgacctccgccagcgccgtcgcgcaggccatcgtcagcaccatacacaggctgagcagcagcgccgtcagcttcttcatgatgaaaacccctttcctttttttgaatgtccccgtgcagggaagacactctggttgctcttcgcaactttgtgaaaaatataccatacttctctccaaaacacaaacatcaattcaggaagggggctataaggatttcttatactatttccagatgaaaatgcgcggcgcaagcaaatagcgcaaatgaattggaaaatcgtattatttttctccgcaattttcccttacccctggaaaaacgcaccgctttatgcgtctaatccattgaaatcaccatgaaaatgaaaggagggcaaagcatggagcagcaatcccccaatgaacgccgcttagaagattggatgcgcacctacggcaccgccatcctgcgcacatgcttcgtcatcctttccgacgcgcgtgaagccgaggatgccatgcaggacaccttcctccgcgcctggcgcgccatggacaccttcgagcagcgcaacggcgcgagcgtcaaaacgtggctgatgcgcattgccatcaatgtctgccgcgattatcagcggaaacggtggtttcggcacatcgacatgcggcacgcgctggaagacttgccgcagggcatgatgaccgtgctgccagaggatcgggaattgatgctggacatcctgcgcttgcccgacgacctcaaaaagccgctgattctctactattatcaggacatgaaccttcaggaaaccgccgatgcactgggcatcagcaagtcgacggtgcatacgcggctcaaaaaagcggaacaggcgctcaaactttcgctgacaggaggtgactgctatgtctga

SEQ ID NO: 341 - DNA, 9240 bp, unidentified
  source 1..9240: mol_type = unassigned DNA
  misc_difference 7480: note = a, c, g, or t
  misc_difference 7481: note = a, c, g, or t
  misc_difference 7482: note = a, c, g, or t
  misc_difference 7483: note = a, c, g, or t
  misc_difference 7484: note = a, c, g, or t
  misc_difference 7485: note = a, c, g, or t
  misc_difference 7486: note = a, c, g, or t
  misc_difference 7487: note = a, c, g, or t
  misc_difference 7488: note = a, c, g, or t
  misc_difference 7489: note = a, c, g, or t
ctcggcattcctgctgaaccgctcttccgatctgtaatccgcggcgggtgttggcgtgcgccagctgcactgcttcgtccagactggtgcagagctgagcgtcaaagtgatattttgccttctcggtcagacgccgggtcagctgctcctccacaccggtaggcgtgacgagatacaccttatcaaagggactctcgctcatgcctggcatggtggatttatcctttttctgttcctcggggctcaggccggtttccagcgcggagaagaaggcttcggcgccctcctcctcggtcaggccgatgatggcgctcatgtggcgcaccttagccatgttcagcacgcgcagcagcgcagccgcctgctgcggggttcgacaggcatccagaatgaccagcgggcgctgagaaagcacccggatgctgcagcggttgtccacggcagcaatgccatccagaatcgcttcatcggagatgtctgcccccttgcggcagagcgccagtgccagctccaccgccatggcggcgttgcctgcggcgtgacgccccagaaaggccagcggcaccgtatagccgccgtagtccacccggctggcgaactgttctgcttccaaaaaggtgatatcctccgggtcgggcactaccagctcacagccgcacttgcccgcagcaacaatcagctcactgagcaccgccttgggctgttccggcgcggtgacgcaaatgctgtccttgcgcatcacgccgcctgccagcgcagccagacgctccaccgagcggctcacgccgtccggccccaccgctgtgacagcacacaccggcatttggggcagtgccgcagccagacccgcgtccggcaactccaccaccgccagcgtgcagccggcttcgccaaagcagtacgcagcggcggcaagctccgccgcctgcataggcagttcctcatgggcggcaagagcatcggcggcgcggcacagcagtacctcgtccaccggctcgcctgccacccggatacgggccgcaaggggctcgcacccaacatgatagacaccggcacgaatgccctgcgcgtgcaggatggccgtcagcaggcgcgccaccgccgttttaccggcagtgcctgccacgcccacaaactgcacctgctgcaccgaggcgggcagcagcgcgcccagctgttccgggtcggcaaagccgtccggcagagctgcaaaatactgatttgcctgttggatggtcattcgtgtctccttttcatgtgataatacagcccctcacaagccagcagcagcacgatggcgacaaggatgcctgccagaacaccggcagaatccagccacacatcggtgacctgactgctgcgcccctccgagaagagctgaatggtctcatcggtcagcgctgtcagcacaccgcccagcatgggcacggtgatatgccgcagcgggtggcggctgtacacccgcatacagagcatgagcagaaagccctccagcatatactcgcaaaagtgtgccagcttgcgcacgatgtgcatggtcaggcgatcagccagtcccggatgacccaagcggcgcaggataatgcgcatccatgccagcacccggccgctggagccggtggagactgttgccaccgccatggagttggaaaagatgaaccagatgcaggcaatcagtgcagcggtaaagatcacccgccccgcaatgacccacaacgaggtgcgctccgtatcgttatagcgttccacagtctcaacccagcgccttgatgctctgctcaatgttggccagcttgtcctgactcttggcgaactttgcgcggatttcctccaccagagccgccggggcacgctccacgaacttggggttgttcagctggttgccaaacatggccatttccttttcagccttggccttttccttgttcaggcgtgccagctccttctcgcggtcgatcagctccatcatggggataaagccgcgggcggcgtgggtggacacctgcaccatgccgtcggtgctgccctcgtacttttcggtaaaggtcacatcggtggcaaaggcgaacttagccagatagacctgtgcgttctggaagggggctgcatcggcagtctcgatgatcatgctggtctttttggcggggtgcacgttcatctcggtgcgcatggtacgcacagccttgatataatccatcaccttttcaaaggcttcttcctcggctgcccagttgtgagcggtgtcaaaggtgggccaagcctgcgtcatgatggtctcggcagagccgggcagagcctgatacagttcctcggtgatgaagggcatgaagggatgcagcagcttgagcgccttatccagcacatacaccagcacacggcgggcggtatcggcctgctgtgcgtcgccggagttcaggcggggctttgcgatctcgatgaaccagtcgcagtagacatcccagataaagctgttgatcttggcagcagccagacccatctcatagtgctccagattgtcggtcatagcaccggccacctgattcagtttggtcagcacccacttgtcgctcatgtccagcagctcttcacagggcagacccggctcaaagtcctcgggcaggttcatcagcacaaagcgggtggcgttccacagcttattggcaaagttgcgggcagcctccaccttcttttcgatatagcgcatatcgttgcccggggtggagccgtccaccagcataaagcgcagggcgtctgcaccatactgggcaatgacctccagcgggtcgatgccgttgccaaggctcttggacatcttgcggccctgactgtcacggacgataccgtggatgcagacggtatcaaacggagccttgccggtgtaagccagaccggagaagatcatgcggctgacccagaagccgatgatgtcgtagccggtgaccagcgtattggtggggtagaaatacttgaggtcggcgctgtcctcgttgggccagcccagcgtgctgaagggccacagggcagaagagaaccaggtatccagcgtgtcggggtcctgcgtcagctttgcgccgccgcacttggggcagctgcagggagcagactttgccaccacggtctcgccgcagtcatcgcagtaccaagccgggatctgatgaccccaccacagctggcggctgatgcaccagtcacgggtgttcttcatccagttcatatagttcttagtaaagcgctcgggcacaaacttgatctcgcccttctccacgctctcgatggcaggctttgccagcggctccatcttgacgaaccactgcttggagaccatgggctcgatggtggagtggcagcggtagcaggtgcctacctcatgcttgaggggctcgatctccttcaggaaaccgccctccttcaggtcagccagaatggccttgcgggcttccagcgtggtcatgccggcgtacttgccgcaatccagcacctgaggctcgttgacggtgtttttgccggcagcaaacagggcatcggcggcggccttgtcggcagcgccggtcatgtggccgtcgtaggtgaacacgcgcacaatgggcaggtcgtgacgcagaccaacttcaaagtcgttggggtcgtgggcgggggtgatcttcacgacaccggtgcctttggtcatatcggcgtgctcatcgcagacgatggggatctccttgttcagcaggggcagcaccacatggcagccgtgcagatgggcgtagcggggatcctcgccgttgatagccacagcagtatcgcccagcatagtctcggggcgggtggtagccagttccagcatctcgccggtctccttgaccgggtacagcagatgccagaagctgccgtccttctcctcgtactccacctcggcgtcggagatggaggtgttgcagtgggggcaccagttgaccatgcggttgccgcggtagatcagccccttgtcgtacaaatgcacgaacacttccttgacagcctcagagcagccctcgtccatggtaaagcgctcgcgctcccagtcgcagctgctgccaagctttttcagctggctgacgatgcggttgccgtacttggttttccatgcccaggcgcgctccagaaaaccgtcgcggccgaccatttccttggtcagaccctcggcgcgcatggcctccaccaccttggcttcggtagcaatggaagcgtggtcggtgccgggcacccacagggcggcatagccctgcatccgcttggtgcggatgaggatatcctgcatggtgttatccaccgcatgacccatgtgcagctgaccggtaacgttcggcggcggcatcacgatggtgtaaggtttcttgtccggatcggccttcgtgtggaagtagccgccatccagccagaactggtagatacgatcttccacctgactgggatcgtactgctttgcaagttctttcatagtgtcctcccaaaaatttgatgaagtgggacgcaaaaagccgccccacggagcgttccatgggacggctgtaatacataaccgcggtaccacccaaattgcgcggaaagctccgcgccccttgatgcccctgtaacgtaggacagacccgaaagcggcttaccggctcagctcaccgcttctgctccaaagtgacagtgccccgccggtatcccgccgggttttcagctgcccccggctctctgtgcggtcccagacgatgcacactctttttcaacgcatttataaaaagaatatagcgttttttgtgggatttgtcaatcagtttttcaaacctttcacccaacgcaccagcttccatacctttgcgcccagatgtgggcagtaacccatcatcagcgcctgcagcttctggcttttgtgctccgacgggatcttccacgcagcgtggcggtgcgtggaagccagctccagcagtgttttttccttttccgggtcccgctccggctggttgaccagccggaaatacacctcggcgcaggacatgatgcagcgctgatccgtagtactgcggaaggggtccggctgctcctttgccagctgccagacccgttcccatgccagtgccgccgtataaaagcgcaggctcggcttctgccgcacggcagaatctggtcgttcaagataggcatagagagggcagttcaaaaacgccagactgccagccttgagaaattccatcacaaaaaacagggtatcctccccatataacagtgccgggtcaaagcggatatcccgtaatatctctcggtgggtcagcatccgccagcagtgcccgccgctccattcccgcatccacgagtaattttccgccgtgatcctctgcggtgccgggcattctgtcactgtccacagggactggttttcctgtataccgcggtagcggcacatggacatccgggtaccgcagctgcacagggcatcgtacagccattccagatactgcggcagcacaaagtcgtcggaatccacaaagccgatgtattcgccccttgccacatccagcccaaaattgcgcgccgaggacactccaccgttttctttgttgaaaatgcgcacccgggcatcctgcgccgcatagcgctgcatgatctgccagcagtcgtccggcgagccatcattcacaacgatcagctcaaaattccggtaggtctgcgccagcaggctgtccagacacgcgggcagatacttttccaccttatagaccggtacgatcaccgagatcagggggcttttttctgtattcatccggctctcctttttaaaatttccaacccacgccgcttcagcgcttcgtactccacgctgcgccggtagagcaatacgatcactcctgcaaacaccgccgtataaagcagtccgtccaaaacaaaaacgctgaaattgcccaccggaaagcgctttacccagagcatggctgccgccgagaccgccgccacgatcattgcacgcttcaggtactccgcaaaataaacccggagcttcttctgccatgcatcctgaacgccatacttcaaaaagatatagggctccacccagacacaggtgcacaggctgctgatgatggtacccccgataatgccgaccacgccgtaccgctgcaccagcgccagagagaccaccagattgatgatggactccgccacagccttatagcggtcgttccagaacagacccatgacctcccggaacaacaggttcgtctgccgcatccgcgagatatagaattctgtcacaatgatcgccacggtcgtcatcgggaaacagtattccctgccaaacagcagctcgatcaagggattgaacagcatcatcagcccgccagtcaaataggcagactgcacaaaaaagagaaagtccatctctttatatacttggtacagccggtcagagttttccagcgccgcaaaattacccacgctgccggaaaaagccgtggcaaacttgttcagcaggttgttcagcgcgttgagtaccaaccggtaattggagtaaagccccaccgttgccagaccgatgaaggaggacatcagcaggctgtccgtgttgcgcacgatgacggtggccagcttgtgcatactcatggcgccgatgtttttcaggatgccgttccgttcctccttttccggcagctcccggcattccttcagatagggaaattccttatccgccatgtgggagatgatgatgttgggtatgaactgcaccaccagttggatggcaaggtacaggataaagttaccggtcagcagtaaagccacgatctgcacgacagtacggatgcactcgcataccagcgtccacccagtgcagatatagcttttctggtaggcctgataaatagagcttttatagttcagcaggtaagagcaggcagaggaaagcacatacatcatgtagatcagggtgatatgctcaatgccctcgccgcctttgatgaggtacggcaaaaacggcagcagcaccagcccgaacagcagcaccgaagctgccaccgcccggtacatccacttataaaggttcatcagccgcgccagtttctgctcgtcatcccgggcggccggctcgtacatactgaacaccatagccgtgccgatgcccagctccgcgaagttaaggatactgagcacatcggtaaacagaccgttgacgcccagatatgccgccgaaaggcagcggataaaaaccatccggccgataaaggacagcagcatcgtcaaaaactgcccgccgatgttgaccagcatattgatgatagaatagcgtgttctcatgcgttttttctctttctcctcagcccttgaacccccgcagccggctatatgtctgcggtaagcgccacagcagccagctttgcagccaaagcccgcccggaacgttgcagtactgccgggtgcggctgaccacctcaaactgcatccgcagcatttcccggctgcgggatgccttgcgcagtgccgnnnnnnnnnnttccctacacgacgctcttccgatctacccggctcacgctgcccatcgtaaattttgctgcatttgccagcgcatcgtatgcaccattttccacaagacagtcccaataccgctgtgctgcctcggcagcatcaaaatggcgcagtgttttgcttccgttcataatgctgctgccgcgctgcacataataatacagcgcctttggcaccaccacggccttttggatctgcaaacagacctccgggatcaggaacagatcctcgttcagcttgccctccgggtagcgcagctgtgcaaagatggcacggcggtacagcttgttccacgcaggctggatcatcgtatccgtggcatttttcaacagttcccgtccggtaaatacctgctctgcaaggctgatatgcatcggcgggcaaggtgcgcccgtctcgtccacctcggcgtaatcacacagggcaaggtctgccccggtgctttgcacggccttgtacagtgcttcgtacatttccggcgcaatgtagtcgtctgaatccacaaagccgatccattcgccccttgccacatccagcccggcgttgcgggcggcagaaagccccccgtttttctggtggatcacccggatgcgggcatccctcgcggcggcggcatcgcacagcgcagggcaattatccggcgagccgtcctccacaaggatcagctcaaagtccgtaagggtctgcgccagaatggaatcaatacattttggcagatagcgttccacatcgtacaccggcacgatgatgctgagcaatggtttttcgcagggcacagtgtgttcctccctattattttcaatccgtcacctcggtgcgcaggcgggcaatgagccgttccatcagcgctacccggttaaaaggggtcatcaggtaaaagccgtccgcatagggcgcagccgccttggcggcctgcaccgagacttccaagcccagctcctcgcctgcggtacggtccagcccttcaaacttctggatgatggcttcgtccacatggatgccgttgacctcgttttccataaagatagcgttgcgctggctgaccaccggcaggatgcccgccagaatttttgcccgctcacccagcgtctcgcgggtctttttcaggttttccactgcctgtgccgacagcagcggctgggtgagaaagccgctcatgccgttttccagcttttctgcggcgcggcgcagctccacctcaaagttgcgggcgttcaggttcagcgccccgaacaccgtgatggggctgggcatctcccgcccctccccggccagcgatacgatatactgcgccagcttgcgggagttgaactggtacacgtttttcacctcgtcccgctcggcggtggggatggggtcgccggtaatggccagtacctcccgcacaccctcggcgtacaatcccagcagcagcgccttggtggcgttcaggttgcgatcccggcaggtcatgtggggcagcacgttcatgcccagctcccggtgcacccggcacgccaccagcgaggaatccatccgcgcccgggcaatggggcagtctgcaatggtcagcaggtcggcaccggcggcctgcaaccggcgggcacccttgagatacgcggtcaggtcagcgtccttgggggaatccagttccaccgcgatgacccgctgtccggtgcgcagcttgcgcaaaaaaacatcgtccgtttccactgcaggctttgccgtagcggcgggctt

SEQ ID NO: 342 - DNA, 18547 bp, unidentified
  source 1..18547: mol_type = unassigned DNA
  misc_difference 12398: note = a, c, g, or t
  misc_difference 12399: note = a, c, g, or t
  misc_difference 12400: note = a, c, g, or t
  misc_difference 12401: note = a, c, g, or t
  misc_difference 12402: note = a, c, g, or t
  misc_difference 12403: note = a, c, g, or t
  misc_difference 12404: note = a, c, g, or t
  misc_difference 12405: note = a, c, g, or t
  misc_difference 12406: note = a, c, g, or t
  misc_difference 12407: note = a, c, g, or t
cagtgccagcagatttacagtctgtcccctttggccactcgggaatccacccataattcctaagtcagtctgctaactcaggaaactttctgcattttatcatatatatcttatcttggcaagtgttttttacaatatttattaattaataaaacatattaaccgaagtaatacgaaatcccttatacttcttaaaattatcattgctaatagctgatgtgtaatcatatatattaacagtttcttctggcacgaaagatatctttacaataccatcatttcctacaatatctgctggtatctttaaagtattaaggttatcattcaccttatcttctctttccctgtcaccatattcattcttatggtacttaaccgctccctctgtttcattatatgcagttatagttccaatatattcatcattagcatatactttagtatctgtattatagcttgcaccatacacttcaagcacaatgtctttctcaactcttgttacaaatctgtaataaagtgctgcctcattacctttattagtatatatccctgtatgaagtgaatagaaaccctttgtgtatctgtaaggaatgttcaatgcagaagctattgtcttatcctcatctttatcagctgtagaattatcatcagcatcttctgatacataattattctctgctgctaacattttttggaaatatttatcaatggcagaatctctgttagactccacactatcctcattaacctcatcagcctcttcttcatcatctgttataatatcgccataaagcttctgttcttctaataactttttatattcttcaagctttgatatatcatatatctctgtattaccaaagtaatagtcaagaccattttcacccggccactttgacaattcaccatctacatagtaaagcttatattcatctgatacatcaagcttactgccaagcacaagcgttgcaagatagaacactgcaagaatcacaacaataatatatgcaattatattaatacattttttcttattattcatcccaactctccttttctacgccgtaaatgcgttgacacctgctgtaaaccataaccatataagaaatgcttccataactactgcaagaaataccgccagccactttaagtctttcttatctgcaaaataatcatataaaccaatgtatacaacataacttccagctataaatctgcacattgacataactccgcccgtaaaaggaattataagtgttatgacagcaaatagaacttctgaataatatctacatttaagcatatatacatacacgattattgccagtatcataaccagcggaatccagtatctttctgcatatatattattaaagaaatcccatatcatattacctatccagccagcaccatcttctctccatgctgcctgcacatttctgaacgcccacgcatctcctgtcacataatacagatgcatcatattaacaaatatgcctgccggacataagaatacctgcaatatcttaactggatttttaaacatatgtactataaaactgccaagctttccaaatgttatcctgccctcatataaatcaaggtacatctgcaatacgagcgggaatacaagtataacaccaactattcttgtacagcttgcaagcatagccgcagctgctgaaatccagtaattattaatattgcccttttctttttttagatagtaaaagaacactgcaataagcatcataaataatgtttctgaatatacacaatgaagatagaatgagtatggtcccatatatacaagaaccactgcaaaatatcctaatctgtcaggcttataaagccttactgtcttaacaagaaatatccccattatatacacatatattaagctgagaaatattcctgcctgtgcataattaaggaagaaaaatatgtatttaaacaatcttattgatactggaaataatggaaagaatgcccagttagcctgtccatctcccggctttatgcttccagaaagactatatcctttttcagcaatcttaatataccaatctgcatcgccaccaagaaacatcttagcaaatgtaatattattgccaaatgctgaattggtaacacagccaataaatatataaaatagtcttgatacaagcaaaatcaaaagaacatttttcgcaatctgcttattctctttagtagcaatcctgttccataatccaaccgccttctccttcatacgtttacctttcttcttaattagtaaatacggatacacaataacgaaacattaaagttgttgggttctgaccctgacattataatcatttctattcgttacctgtagcctgttcctgttcttttaaatatttaatatacctttccacagcattctgccaggttggaagcggtgtaaatcctgcctctttaagctttgatttatctaatcttgaattaaatggccttgccgcctttgaaaggccatattcttctgtggataccggaataaccttaatatccattccggcctgtctgtatatttcacacgcaaaatcataccacgaaatatagccaccctcattagttgcatgataatatccatatttctctgtagctatcatatcaactaataatactgccagatcaagtgtatatgttggtgttcctatctggtcattaacaactcttacagtctcgtggttctttccaaccttaatcattgtctttataaaattattgccattagcaccgaatacccatgctattcttactataaaatatttagaaagtgtatcagcaaccgcaagctcaccctcaagcttagtctgtccatatacattaagcggcttgtattccttgcagtccggctcccaaggcttctcaccctgcccattaaacacataatctgtgcttatatataccattttacaatcaagcttcttagccgcctttgcaatattagctgtccctttggcattgacagctcttaccttctcaaccttgtcatcatcttctgccatatctactgccgtccacgccgcacagtgtataataacatctggtgatacactgcttataacctcatctacaacagcctcatctgttatgtccatcttgacatattccattgttgtaacagcactattatcctgaataccactgtaattatcagctatatcacttcctattcctgtgtaccctcttttatcgagttcattcataacgtcatgacctaactgacctgacactcctgttactaatactttcatactttctccttaatgtcttctattatctttcaatttaattataatccagcgcattaatactattacaaatattatttatatacaatataaataatttaatcacttgtaatgaaatcatacacaactttcccaagtctatcaggtgcatatcttttaactacatttgcatatgcttctgtatcaacctctgtattatatgacaataattcatctgcaagattgtttatctgctcatattcattacatcttatattaaatgtattaatattgccgtctgtaatctcatcaaatataggaagattacttgctataattggctttttaaaacgcataacctcaataatcggcataccaaacccctcggccttcgacggaaacacaaaagctgacattgaggcatacagctcgtgctttttatcgtgggtcacataatcaagataagttatatcttcatctaacatcattgccgaccttacaatctggttaatctcttcttcctgcatttttccaccaagaataagtttcttctttccgccccggttcttatattgcaaatagccttttataagaaggtcaacgccctttcttttctccatattgccaacataaagaaaataatcatcatctttattatcccattgtttcttaacaggattagatattatataagcattaacattcgctatgctcttagcttccgggaaaaattcttccgttgtacttttggtctgttctgaattatatagaatcatatctgtattcttaagtgtctttttaagattgtacttaaaatacatactatatacttgtccgaaatattcaacatattctattggaaacatatcgtgtattgtaatcatagtcttaaagctaccgccgaggttaatcggaattatcgtattaacttcccagaatatatcaggcttaataatatcaagctgctttttcacatatgcaaaataagcataaactccggcactcttatacacctgttttccctttgtatatacttttattccatttttaataaatgacttaatatattcactctctgcaacatctgatataagaacgaattccaaatcctcatatttcataagctgcttaagaaagtcattaagatacattcccactccgcttggtctgctgccaagcgttcttgcatcaaccgctatcttcatctttttaatccttattctgcatatttgtccataattcctgcaattatatgggctgacctgtcccacgaatgatttgaaagtacattctgcactgcctcgtcactcaccttattcttttctaacagctcatctatattcacatcaggcttatgacagttgacatatgtagccgcatttttgtaaatctcgtgcagcaccggaatatcaccaagaacaatctcagctcccatacagagtgcctccataggtggtattccaaagccctcataggttgatgggaataaaaatgctttgcagtatttcataagtgctctcgcctctgaatccctggcataaccaatcgccactacattgccaagcttttctattccagacctgtccccaagactttcacctgctattacatatgtactttctgggtgaagcttcgcattattaagaatccagttaagattcttattaggtgctaatgaagccatatacagataatatttatgtctttttattcttgaagcatacttgtcaaatatactctcgtctatgctgttcacatcaaagtgctgccagccattgcctgcaactactatttccttaccatgggtattataattatcaatgatttcttttctggaaaacccactgaccgttattatcgcatcagcactcttaaaggctttaagatacataagctttctgaacaatatctcatgccagtcacccggctctctaaagaactccttatgtgtcttaaatgctatgtcgtgtaccgtaactattccatttttcataaacagtgatacttcattacataaatatacaggcttagccttctgcttgtccacatatctctgaaacgtgaactgttcccacattcttccagattttccagccaatataacaatcttaatgttattatagtgtgtcttatagctgttaatctccgcagatgtaccttctgaatcaatctcgggcacagctatctcaacctcgtaaggcttatccgccatatatttatcaagttcttttgttatttgtcttgcgtacctctggacacctttaatatgtccatacaaaaagcttccatcaataatatatttcatagtaacctctttttgcagtttcttattgtatatcattatccgatacatggtcaggcttataagttggaacgaattcctttacaagccgtcttactgccatcgcatcttctttgtaagctgtttccttaaggacttctagcttgtcctcaaaattgtctttatcaaattcaataggcttgcctatatgaataagcttattctgtgtatcctgaagcccttcctctgccataagaagttcttcatataacttctcaccaggtcttaaaccagtatatttaatctccatatccacaccaagtgtgtaacctgatagtcttataagattctttgcaaggtcatctatctttaccggctcacccatatcaagaataaatatctcaccacccttggcgtatgcacccgcctgaataacaagcgacacggcctccggtattgtcataaaatatcttattatatcagggtgtgtaactgtaaccggaccccctgctgcaatctgcttcttaaaaagaggaattacagagccattgcttccaagtacattaccaaatcttacggctacgaattctgtattagatactccattataatactgaattatcatctcacatatacgttttgtcgcacccattatattagtcggattaacggctttatctgtacttatcattacaaatctcttggtattatatttgtctgccattcttgcaagattccaggtaccggctacattattcttaactgcctcattagggcttccctccataagcggaacgtgcttatgtgccgctgcgtgatatacaatatccggtctgtaatgtgagaatatccactcaagtcttgtgttatttcttattgaaccaataagcgtcaccacattggcataaggacaattcatctttaattcctgctgtatatcataggcactgttctcatatatatcaaatataataaggcacttagggttatgcttgactaactgcctgcaaagctcagaaccaattgaaccaccgccgcctgttacaagaacagtcttgcccgatacatatccaagaattgactccacatcaacattgataggatcccttccaagtaaatcgtccacatcaacatttctgatatcctgaacattaatctcgccgtccatcatctgatacacgccaggtataatctttaaattacagttagtttctttacagatattaagtatctgtcttttagtttcctgcgatgctgatggaatagcaaatattatctcatctatctcatagtatcttgcatattccttaatacgctcccttgttccaacaatcttaacgcctcgtatatactttccaacctttttagggtcatcatcaataatacatacaaccttggaattatcaaggtatcttgaattagcaatctctctcataagaacattggtagcctcaccggcaccaattatcataatcttaatctgctctgatgtatgtctgtattcctgtaaaagtgttcttataagcctgtacataaaacggctcgcacacattgcaactataagaaatactactgacataaaataacaggctctaggaagcggtgttcccataactgttgtaagacagacgtgtgccacctccgatacaatacaagcctcaactatcttataaagctcggctatactcgcatactgccacaaactgtgatacattctgaaacaccagaatataagcagtgttataagtgtaaatggtacgcaggtactcttaaaattctgtatatattgtgactctatcgccgccagatcaacgttaaacctcattaccagcgatataaatacacagccgttaacaagaattatatctgttattataagaaaaaagcgtctgactattaactgtagcttatctttccttgtctcttccataattaacctctttttgatttatccataagtcctgctattgtgcctattccataacttaaatgaagaagcaggaataatacaggaagacaggcattagttatatttcttttatcttcagctttaaatgcagatactgccgccataccagatgccattaaagcatagagcacccacataacagttgtaagcactactgttacttttcttaatgccgaaataccttttccaagtgtatggttgtaccttttcttaatgcactctgcaagtcctgtcgctccaataaccgaacctgaagctattattgcactgacaaatgcaaatggcacaaaatgatatatgctaaggcacttaggacataccttgcttgtctttcctatccagtagccgttagcatacttctgcttaagcattgccttaagactgcttcttgtatactggtatgatattatatcagggtcaaagcacagcttatatccagcttttctcattctataatgaatttcattatcttctgtacgcacaagttcctcattaaagaaaccaaccttttcaaatacttctcttctatatgctgcgtgaaataacgatttaacataagtctttccaggattattcctgtatgaagcaatgcttgaaccaaacatactgctctctgcaagaagaagtgtctccttaaatggagttggcttgtctattatgttaggtctttgtccaccacatatatattcgcctgtttcaagcaccctcacattcttactgacaaaatcctctggaattacagcgtgtgcatctacctttattatcgcatcacccttatattccctcaatgcaacgttccagcctgatggaagtgtctttttaggattgtcaagcactacaacccttctgaattcatctttattatcaagtgcaaattcacacataagtgctcttgtattatcagttgatgctccgtctacaagcacaacctccatattgttatggtcataatcctgatttttaatacattctaatattccattaatattctgttcctcgttatatgcaataacacacatagtaataagcatatcagacatttattatctccttctactctttgtcactgaaagcctctcgcttccaacaacagattcaaatgtatcccaaagcaccctgcaatcctctgcaaaaccaaactttcttaatgcctcaagattatacttcatcttcgcaggaagtacttcctcaacatacgctttatccggattggcggcattgcctaatattttatcttcatctttataagctatgcttgttcttgatgtaagcccagccggcaaaagcagtgttgcatacatttctttagaatactgctttacatactcaggcacttccggtcttgtgccgacaagtgtcatatctcctgcaagaatgttaaataactgtgggaattcatcagctcttatctttcttaaaagctttcccattcttgttattcttctgtcattatccacagtcacagaagcaccaagctcattagcattaacaaccattgtcctgaacttgtatatcttaaatattcttccatactgtgtaactctttcctgtctgaaaaatacaggtcctcttgaatcacattttataagtattgcaattattaacatcggcaatgcaagcacagcaagcattattgatgcaactacgatatcaaataatctcttcaccattaaagaagctctacgtttattaactatattgtaatattttcttacttcccttgttctcataaactttggaagctcattccattttctaagctgcataccaacctcttttctgccagtctgttaaacctgttatttaaggctgttaaaattctctataacatattctatctgttcatctgtaagattagtatgaagtggaagtgtgacttcattgtgatacatttcaaaagattttgggaaatcttttatatcaaagccaagctgcttatatgctgtgtgcataggaagcggcttgaaatgtacattcgttgcaattcctgcttctgccattcttattataaactggtttctgtcttctacatctcttccaaggagtcttgtaagaaacagatgtccacttgatgaatattcatctgtataatggcacaggcactcaacatcatctgccttaataccctctgtatacatattaatcatctgctttcttcttgcaagcatcccctcatatcttgtcatctgagcaagacctatggcggctgttatatctgtcatattacacttataaagtggtgcaataatgtcatattcccacgcaccaagcttagtctttgcaagtgcatcctttgactgtccgtgaaggctcataagcataatctttttgtatatttcttcatcgtctattccgtcaagttctctccatacaaggcctccaccttcacctgttgtaaagttcttaacagcatggaaagaaaatgatgtaaagtccgcacattgtccgctcttatgtccatttcttgacgcaccatatccgtgtgccgaatcagcaagtataagaactcttccaagtgcctcctgataagcattagccggcttaaataaagccttcttgctctcaagtattgcccttatcttatcataatcgaccattacaccagctatatccactggaataactgccttggtcttctctgttatggctgcttcaagctcatcataatcaagatgataagttccctcctgcacatcaataagctttaaagttgcaccaacgtggcatacaacacttgctgatgctgtatatgtgtatgccggaactattacctcatctcccgctccaattccgaataatctaagagccgtctccatacacgctgtagctgaattaagacacgcacctctcttagtgccagtgaactctgccatctgtctttctaattccttggttcttggacctgttgtaatccagcccgaccttaatgcttcgcttactgcttcaatttccttttctgatatatctggtggtgaaaatggtatattcatcttttttgtcattattatccttctgcctcttttctatacattctgcataatctaattagaagatgtggctgtaggcgttgttaccgttggcgtctgtacagtcgcagtctcacttgtctttgtcatatccggaaacgcatatgtcatatcacctgctgtattaggtattgatatagtatagcttactgtattatacccagattgtgacaatgttatagtcttgttgccacttgatttgctaaatgagcagggaacaacacctatgtatacactatctacatacaaagccgctcctgatggtgctgttatattaacactataaccattagtaaggctcgctgatgtcgtctttgctgttgttgacgagcttgtacttgtcatatcaataaccttagtcttgtaatctgaattaaccgtaaatgtctctgtataagtttcataatggttagcctgtaatgtaagtgtatgagaaccatatgttaatgacacaggctttgagtaatcaacttcacttccatctattgccataattgcattctctggtgtaactgagaagttgattgcaccctttttagctgaaagctgcttatattctgagaaatcaagcgttgaagtcgcatctttcttaatagttactttcttggttgctgtcatatctgcactctgaagctcaacatcataagtaccaactccgacagtaagcatcatatcctgtgtaacaccatacaaaagactgcttcctaatgtcacataaccacctacaaatgcatctattcctgtcagttccagatatccgtgcccattatcaaccgatattgagtacagcttatcatcaattcctcttaacgtaagttcatcttcctttacaatctgtgcaatgcttataagattacctccagaggttactaccgtataatccctgtaattaagcgtagtctgtccaatcaccacactcttagagctttcatcaagctctatatccgtaactgatgtcctgctccacgcattctttgaaccatatatcttggttgccttgccatatttgttgcagtatacatcatatatctctccgggctgtatcaatgtcgccgccttaagctttccataagcatcctgtatatcagtaccacctgtatacattactgaatattccgttccagtttcaacatcaataaaatgtatattcttaagcgtggtatctattgacgatactatccccactagtgttgcattgtcactgttcttggctatgtctgttacattgccctttttcttcgctggtgtaattgaactgcccggtacaatcgctccgttacttcccgatgttccacaacctgtctggcatattatcataatggcagtcattataataactgccattctctttacaaccgaatatggcttaactatgttaaacagatgtgtcctgcttcttgtaataccactttcgttctttgttctattagctttattatatataaatgtatgtttcattccctgtatcctgattataatcgtttattggctatacctatgggaattttaccacacacagcatattttatcaattaattctcttcttctttcattctgctcaataaccttccttagtttatctacatttttatctggaatccacgatttattactattaatatactggttaattatcttccagaatttctccggatatgacaaaagtgtcataagaagttcaagctcattatcatcaagaggacatattctgtcatattcatcaagaagcctgtagaacacactattttcccagttatacttctccataacttttcttatgaactggtacaaatcactaatctggcactcattcttatatctgtcaaaattaacaacataagtatcctttccaccgataagcacannnnnnnnnnatatgtggagcacattatggtaagtatagcttccatgcgaaatctctccattaaccgccgcatctagaagcctctcatcaaatctttcgtccataagcctctcgcttgcattgcacgcctcctcataatagtcaccgatatgcttaaatgccagctgctcaaatgtctgtctgccttttttctgcttaagataattgtatgctttctttaattcccttgtgtgcttcacatatgtctttcttagtgctgtttccttcctgttctggcatgccttaagctctgcctgtgcatactccttgtactctgtctcaccacatggattaatcttaagctcgcttccagcctcccttaacgccatatgaagatacgccatcatactcaccgctctgcacatatcccccatatcctttacatcactttccttcgcatcaaaccagtcttttaaaatatatcttctgccgtcctcatcctgcgacacaagctgtccctcattatttcttacatatgtatctgtattgccaaatcccgctgattttaatatctgtgtaatattattctccctctcataatacttgtcaggcttctcacactgggtaaaaagcttatacccctgtccagttgcaataataataccgcccctgcctcttatcatacggttaatgctgatattatattgttctaacaccttttctgatttctcattcacgaatataccctccaatccaactaggcctacttatcatatgcatgtgttcaataaaaaatgctttgccattcagtgacaaacatagttttttttgttaaaattatgggcagtaataatgcgaactattgcaaattttatatagccaaataacagatttaaagatttaaaaatgaaatcaaaataataatttaaagattggtaattaagtatggattatagtaattttaaaattgatatgcctaatgacgttgaatttataatcaacacaattaaaagccacggccatcaggcttatgctgtaggtggctgtgtccgcgattctattatgggactcactcctaatgactgggatataacaacctctgcactcccttccgatatcaaagaatatttcaacaagacaattgataccggaattgaacacggcacagtaacagttatgttgcacaatgttggatatgaggttacaacctacagaattgacggcgagtacaaagacggcagacacccatcttctgttgaattctccgacaggctgacagacgatttatgcagacgtgattttacaataaatgctatggcttacaataatgtaactgggcttgtcgatgaatatggcggaatagacgatattaataaccgcataataaaatgcgttggcaacccaattgagcgttttacagaagatgctttaagaatgatgagagccataagattttctgcacagcttggctttaccattgaaccggatacatttaaggctattgaaaagcttaaccgcaatatagataaagtcagtatggaacgtgtatgcgtagaacttaaaaagactcttttatcagataaccctgattattgcagtctttatgcaacaacaggtctttttaataatattctgcctgtaatagcagataatcttaccggcagatatgccaagaagctgcttcttacctgcaaatatactgataatgagcttccacttagattagccgcaattctttttgtatgctcacctgatgaggcaagaacagctttaagaaatcttagaatggataacaagactattgatactgttgtaaagatattaacatacaccccgcttcacattgatgaaactgaacctgctgtaagggaagcacttcatcagtgtggacgtgacatttttatgttagtaataagattacagcgtgcttctattaaagcaagtgaagagattacatttataagtaaccctgccaagtataaccatctgaataaattacagcatatggcagatgatatacttgaaagaggtgactgctttacaataaaagaccttgatataacaggagttgaccttatcgaatatggtcttaagggtgcagaaatcggcaatacacttaatacactgcttgatattgtaattgagaaccctaagcttaatgataaggctactttaattgcacttcttgataatttaaagtagtcatatgtgcaccaatcacaggtgctttcctaatacataaaaaggctcagccctagctgctggaattatccatcagcttgaggctgagctttttatatgacaaatatttttgatattctgtatatagcacaacagtttcctgcactattttaaaatgctgcatttttaaacactatgttatcttaaaacatcgtatttatcagacaactatcgcttatattaatacttcatataatccttaataacattatggtctttaagaaccttttcaattacagttccctttatccttctaagtagtggtttcttaatgttatcaagcacgccaggaagttctatttcaagaggtgacttgccgtccataagcttaacagaagcatctaagagatctcttacatcatatacgcttccccatacttctggaacgcccctgtctacgccaagaagtccgtatacagcctccatagctgttcttactgaatattctgttgtgaatatagtatctcttggtgtctcagcaaactgtccaaggaatgcaaagttcacacagccatctggtataacgtctggtctgtcaccttttcttcttggcataaagaatgctgtgatataaggcatcatcgtaggtgttgtattgcagtggttcttagcaagttcatctatttcatctactggtattccaatatggtataaccactctgctgtaatctcttgaccagtacactctttcataggcttcttgacataatcaccagctacatctgtaaataagctgtatacccatacgcatacttcatctttcttctgttccttgaactgtccctgtctgttaattgtccagctaagaagccagcttgaatccttacagcttacgataccgcctgtaacaacatttcctgttctagggtctcttttacatatcttcttaatatgatcgataatcttttcatcacttgttgtaactgtagctgactcccagttagacttagatacattgccacagaacttttctgggtgtccaaatgatggatcctgctttgcaatattcttccaaagactccagcagccgcttgttcttacctctgcatctcctacaggtgcgtgagtatggtcaccatagattgtactctctgtacagcttccgttagttacaaacacaaggtcattctctgtaagctcaattgtttcttccttacccttgacattgcactctattgtcctggcaatcttcttgccatccttgaactcaaatataacattttccacccttgtattgaactggaacttaacacctgctgcctcaagatacttctgcataggcaggataagtgattcatactggttatacttagtgaatttgagtgctgagaaatctggaagtccgcctatatgatgaataaatctctggatataaagcttcatctctaacgcactgtgccagttctcaaatgcaaacattgttctccagtagagccagaaatccgagtcaaacacttcttcatcaaagaaatcctcaatcttcttgtcatacaaatcttcatctttagtgaagaacaatttcattatctccatacagcccttctggcttaaattgaatttgccatctgtatgtgcatcttcaccctgattaactgttgccctgcaaagtgaatagttagggtcgtgcttattaagccaataatactcatcaagcactgatgcacccggcttctctaatgatggaatacttctgaacaaatcccaaaggcactcaaaatgattctccatctctctaccgccacgcattacataccctcttgttggatcattaatgccatcgcacgcaccaccagctatatccatagcttcaagaatgtgaatatggcttcccttcatctgtccatctcttacaaggaaacaagctgctgcaagtgaggcaagtccgctacctacaatatatgctgacttagcatcaacgccctctggcttttctggtcttgcaaatgcttcataattaccatttgagtaatatatacccttgctgttcttatcatatttaccacgctcagtatttctgtactgctcgtattctttcttctgtatttcttttatctctttcttctctgtaccgttcttattctttgcattaatagccgcaactcctgctcctactgcaaggagtgctgctcccgcctttaatgtcctgcttccgattgacttcttactcataagcttctcctttcacatatctgctgacctgcaatcaacaatgtccataattctcatagctactcttctttacaggagtttcactccatatcttatcagcatatggcttccacgcattggcatatggaacacatttgctgcaaagatgctctgctgtctctggcgactgtaaatctgttgatttagcacctgtttccttgaccattttctgtaaaatctcaggattttcaagcataggacaaggtcttaaatggttcttattaaatggctggttctttctatatgccataaataatggctggttaagtatctcaagtaatgtattagttcttatattcgcacctgaataatgaataaatacacaaggctctgcatcaccatttgcattaatgtggaaatagtttcttccgcctgctatacagccaccaacgaactcaccatcattctggaaatcaaatgtaaataagccctgtcctgttgtaagacttcttatctgtcttatgcggtctttcatatatattctctgctctggtgttggaagcaattcaactgaagcatcatttccaactggcatataatggaaatacattgcataacggcagcccttatctaccataagctgtatgaattcatcacttgttactgtttctgtattcttagatgtgtagcatattgaagtaccgaatacaagaccatttttctttaaaagatccattgcattcataaccttgccatatacaccatcgccacgtcttaagtcattgaccgcttcaaatccctcaagacttattgcaagataaagattaccaactcttttcatctcctgacaaaatgcttcatcaacaagtgttccattagtaaatgaaagaaatgcacagtcattatgcttctcacataactttattatgtcgctctttcttacaagtggttcaccgcctgtaaacatataaagatatattcctaactccttgccctgtgttacaacactgtccatttcgtcaaatgtaagattaagcctgttgccatattctgccgcccagcagcctgtacaatgaaggttgcaggcacttgtaggatccataagaatgagccaaggaacattacagttatacttttctctcatctttcttattgtcttagttccatttaagaatgcctcaaatccaagattaagcaccatagtctttaatacattagggtctatctcatctaatgccttattaatatacttattaagtgcactgtccttatctttgattttctttctcacgctgtcaaaatcaacatcaagcttctcaccatccatatatttttccataaaatcgacaagctttaatatctctttttctctatctttatcaagatttttaataacaacatctgctgcttttcctacggctactcttcctgctttatgtgtaattgttcccatttttttcaactcctgtcgcttttaatttcttctttattgtataaactcttataatccgtattaattatttattactgcattaattatttattaatattccaattgctaactactgctttaattatctatataatcactgccttaatgctttgtctgtcttaaccgtatctatcacgataacaagattaagaattccatccatacacagattaagccctataagccttaccataagccttgttgtctcacccggcattaatataagcaatatgccaatcgcagctacaataactgccagtataagcatcagccaccagcggcttattcca

SEQ ID NO: 343 - DNA, 10119 bp, unidentified
  source 1..10119: mol_type = unassigned DNA
atggcacgttacttttttattgttatatttattctgatttctacacagtttaaagctcagttatcagaaacaatccgtgtagaggagtcggatctttcgttttcgcgtatggaagaatttgattgtgttacgtggcaaaagagttctgaatttacggaacagataaatgcccctaaacttcctgtcattatagaatcattcgttattccttttgatgcgcaagttaccaatattgatgtggttgtgaaagggaaaaacttgttgaatagaagtttgttgattgtacctgttgatcctcctatttcaataggaaattattttgcaacatcatcgctaaaaccggatggtgacatttataattcatctcttgtttaccctacagaaaatgtgaagatcatttctgatgtatacgaacatgggtatcatgtagtgacagttgaagtttgtcctttcgaatatgttcctctaaataaagcattgtctttattggatttgacatttacaataaattatatgcaatcacgtggagttattgaatacccacaatatcaatcttctaaatcggcaaaccgtgcctatcgttttgtttattctaaagtgaagaacaagcaagacatgaatcgtttttcaaatcagagaactggtatagtatccaatgagtcattgaatatgaatgaaaggagtttaggtacttctaatacgatagtaaatataattcctgagtatttgattgtgactaataatgagttaaaatctacctttcaacgtttggcagattggaaaacgaaaaaaggtgtaccaactgtcgtaatgacaatagaagaagtacaggaacaaaatgaaggatgtgatcttgctgagaaaataagaaattatctaaagaaatgtaggcaaagttggggaggtgacttctttgttcttttaggaggagatactaatattattccagagcgaatggctactaatgggccagatcgtaaagatagttataataaaaacactgatgtatatacgaaagattctactatgagggcacaagatttatattttacagcattagatgggaattggaatatgaataataatcatgtttacaatgaatattatcaatatcaaaaagggaataaatatccttctgatacaatcaatattgatcatgctgatttcggaagggatatatatttaggacgcgctcctgtaaaaaacatcagtgaggctgagaacttcgtgaataaagtattgatatatgaaaaagctaatactaatattgattattcttatgttctcaatactcttaacgtagatgcattcattgacaagaatgaaaatacgggatatttgcgtgatgatgcaagaagttctatagatggttattatagttcttattctcgattgcatccttggtttcttttcgaccattataattgtacttgtaataagcattcacaatatgtaacgaattctcgtggggaagaattgaataaaaataattttatggctgcgctccaaaatggtggaaattcaggattaaatcattttcatttagtttatcatatggaccattcttctccaagaggaatgggggcttcttcattggataaaaatgaggcaatatataatatggatgtagatcagttgataaatggaaattatttacaaatagtattgtcaagtggttgtgaaccggctacttttaatgaagattgtattgcagagcatttcattaataatcctaatggtggtgctgttgcatatataggtaatgcagacagaggatggtcaaatgagtattttcgacttgatagtctgttgatagctttgtattccgataaattagtctatcataatttgggctatgtttttcaatatacgattggtaaaagggacaataataattgtcggttaacccttttaggagatccggaaatgcctgtatggacagcagttccacaaacgttgaatgtatctgttacccctaatgctataaccaatggtgagaacacaatttctatacaaatcaataatttgcctaccaatcaagaagcactggtctgtttaatgaaagaaggagaaggatattctactttaactataaatgatcgggcggtacatttttttacttttactccgtatacatccggtatggttgatgttacggttactacaaataatttccgtccttttgaaacaacgattcccgttagtgtaaatccgaaagcggttcttcatatttcagatttagtgtttgatgatgataaacagggagatagtaatgggaatagtgataaacaactggatgcaggagaaactgtcgaactttcggttacactaaaaaatgaaggaagtgttgcttctgatattgtgactggagaattgatatgtagctctccggaaattaacctgattaaaaatgtagcttcatttggtgaaatcggtgcaggaggtagccgaacatcagataggaagtttgtatttactattgataaagattgtcaagaatatctcatgaacggaatagatcctatcgagtttatccttactataaaagacggggcaagttctataagtgaacattttcaagtggatatctttactcctaaaatagaaatagggaatcaaaaaattacttggacgagtaatggaaacactacaatagaagcgggtgaaacggtaaaaatgaatattgatttgatgaatgtgggaaaatctgaggcaacaggactgaacgctgtgctgatttcgcataattcgcaggtgtcatgttcatctacgccaattgtgtatccttctattgccttttctgagactaaaacaaatacaattgcttttcagttccagacatcaagcagttatgcggggatattgagtttcacattacaagtaagtaatgagtatggaaggacttggaactttccagtaaatccattgtcaagaccctctgttattaaaacatcgactcttgattttcagccttatgcttcttctatcaatgtgtattggacacctgtcaaggaggtggccggatataatatataccgtagtgacaatggagaaaatggcatttatcggagattgaatagatttccattgaaggctgcatattatttagatgatagccttgccgaacgaacattgtattattataaggttgcagcaatttcaacaaacggaaatgaaagtgaatggagtgcggcttaccggacatggacttcttatccggttgttagtccattccccaaaagattagctaccggtgtttattcatctgtatcttgtccaaatattgcagatgtggataatgacggcaaacaagagatattctggatctatgaagatcggtatgatactcatacaagttacataatgggatttcgtccttcgggcgaagagttatatgatatcgatggaaatgtgaccacagtaagtggttttgctaaaacacctacaatgttgactgggcaagtggcttttggagatttgtccggaaatggggaacaaaatatagtagcatctacttgggaagatgataaaaaatatcaggaaaaaagagcagtctattgttattctccgtttgatagggatggggaccataaacctgatttgttgtgggaaaagcgaatttcttattcaatgtttcaaagtccggtcattgccaatttggatggtagtgccgatggtacaatggaggttattgtaaaatcgcatcaaacttctgatatttttattttagatcatgacggaaatgaagtgagacgtttgaatcctaatgttcatattacgactggaaaagaccataattattcagcattaacagtggctgatttggataatgacggtaagatggaaatcatagcttcgtatgattctttaggaatttatatttggcggcaggatggaactccttttacgacgaatccgttttggggaacaggaattcccagattagcttctgctccggtggtgtgcgatttaaatgaagatggtaaaaaggagatattgttttctcaacggcaaatggcagaaagtaaggtatttgctattagtttggatggggataaaacagttgcagggtgggatggaagtcagacaattccatatacagtcaatgctgttggatctactttagatcatactttatcagtgggtgatataaacaatgacgggcacttggaggtggttatattggggcatgaaacggtaaaagcatggacacatacagggaagcttatttttagcaaatcgattaaaggcttatttccacaagaaaattatgcgtctaatatgaatactccaattttggccgatgtggatggagatgctgtacctgatattgtattctgttgtaacaattatatttatgctttacataatgacggtagtgatataatcggatttccgataatatcggatgagaaatttttagatactccttgtgtggcagatattgataatgatggtaaaagcgagttaatagccggtaatgaacatgaattgtatgtctggaaaaccgatggtgttcctacggccatagagtggggtgttaagcgtgggaatccacagaatacgaatgaatatttcccaaccgtttgtcaaccaacactgataaattccaatgaagtatgggacggggaatcaccctgcggaaatgtagtgttgcagtcgggacgattacttattcctgccggtaaaacgatggtgctgaataaaacttcttctgtgatcgtccgttccggtgctgtgcttgaagtagatggtggaagtattttgaatgcaaggcttgtcgtgcaaaaaggcggtacggtcatcgtcaagaacaatggtttaatcaagttacgagcaggctccgactttgacatggaaaaaggggctatacttgatttctcttttggagcaattgacataccttgataaaagaacagaatcagcagtaggataaatataattaagagatgaaccacaaacactatcggttcatctcttaatttttacttgtcccgtctttttccgtgaaatacttatgcgttcagcgcctgctctatatcggcaatgatatcttcggcattttcgatgcctacactgaaacggatgaggtcggggcgaactccggcttccatcagttgctcgtctgtcaattgccggtgagtatggctggcaggatgcagcacgcaggtgcgtgcatcggctacatgcgtaacgatggcagctaatttcagcgaatccatgaatttaatagatacgtcgcgtccgcctttcagaccgaaggagatgacaccgcaggaaccgttcggaaggtatttctgagccagttcataatatttattacccggaaggccgcaatagtttacccatgccacccggtcgtcattcgacaggtattcggccactttctgtgcattacggcaatgttgaggcatgcgaaggtgaagtgtctccaatcctaaattgagcaggaaagcattttgcgggctttgtatactgccgaggtcacgcatcagttgggcagttgctttggtgatataggccattttaccgaatgccttggtataggtcagtccatgataagattcgtccggagtacacaatccggggaatttatcggcatgggcatcccaatcgaaattgccgctatcgacaatacagccgcctacactcgtggcatgtccgtccatgtatttggtggtggaatgtaccacgatgtctgctccccattcaaaaggacggcagttgatcggagtagggaaagtattgtctacgatcagaggtacaccgtgattgtgagctatgcgggcaaacttttcaatgtcgagcacttcaagagagggattcgagatggtttcgccgaacagggctttcgtgttcgggcggaaagcagccgaaatctcttcttcgctggcatcaggactgataaaggtaacatcgataccgagctttttcagcgttacaccgaagaggttgaatgtgccgccatagatggctgaagaacacacgaagtgatcgcctgcctgacagatattgaatatggcatagaaattggctgcctggccactggatgtcaacattgctcctacacctccttcaagagcggctatcttggcagccactgcatcgttggtggggttttgcaaacgggtatagaaatatccactgtcttcaaggtcgaaaagacgggccatctgctcgctggtttcatatttgaaagtagtactctgataaatgggcagcacacggggctcaccctttttaggagtccatcctgcttgtacacacagggtttcgggcttgaattgttttgccataattgttattgtagttacagttttatttctttaaaaagttatatcgatgcaaaagtagagaaaataattggtttaaaacattatctttgcgagtgaaattaacgagaaagaagaaaaaatgaaagccgacagcataacatcacctatacgcaagcaggggtttcgtgcttctatgacagtgaagtggtaaatttgaagttcagttcttcgtaggaagttcagtggttaaaatccctgcctgcgtatagctgagaaccgttgtgggctattttgcacacgacacgacaaacatcaaatgactatcgaaatatgagtttattaaacaataaaaaagttgcaattatcggtggcggaccagttggactaacaatggcaaacttgttacaacaaaacggtattgacattaccgtttacgaaagagatgaaaacccaaaagcacgagtttggggcggaacgcttgaccttcacaaaaattcaggacaagaagcaatgaaaaaagtaggattgttgcaaacctactatgatttggcgctacctatgggcgtaaactttgctgatgagaagggtaacattatagcaacaagaaacccgacactcgaaaataagtttgacaaccccgaaataaatagaaacgcgttgcgaaaaatgttgcttggcagcttgaaaaatgacacagttgtttgggatagaaaatctattgggcttgaacaagaaaacggaaaatggctgctacattttgaaaataagccaactgcattggccgactttattattgtttccaatggtggaatgtctaaaataagaaattttgtttcagataatgaagtcgaagaaacaggtacttttattattcagggcgacattcctgaaccagaaacgaactgccctgaattttataagttgtgcaacaacaatagactaatgaccgcacatcaagggaatttattagttgcgaatccatttaacaacggaatgttaacttacggtgtcattttcaaaaagcctgaagaatggaataatggaaaaggattagattttaaggacacaaaaagcgtttccgagttcttgacaaacaggttttcaaattggagcaatgaatacaaggagttaattcgttcaacaacttttttcgttggtttaacaataaaaatatttccgctagacaaaaagccttggaagagtaatcgtccgttacccataactttaattggcgacacagctcacctaatgccaccttttgcagggcagggcgtaaacattggactaatggacgctttgattttgtcagaaaatcttacaaacgggaaatttggaacgatacaaagtgctattgatgactatgaacaacgaatgtttgtttacgcaacagaagcacaagcggactcgacaaagaatgaaatagaaatgcgaaatccgagctttacttttcaacagctaatgaatgtataactcgacagacaaaaaaaacagcccacaacaatcggcttgaaacgcaaggcggggtaaacgtcttcgattgaacatttttttctaattttacggtatcggcttcgattgaaaggtagtggtaaaaacccgccctgcgtcaagccgccggacgttatgtgccatttttgaatgacaatgcgaatagatacagacaaacaaatgaatttacttagtgataagaacgttgcaataattggtggtggacccgttggactgactatggcaaaattattacagcaaaacggcatagacgtttcagtttacgaaagagacaacgaccgagaggcaagaatttttggtggaacccttgacctacacaaaggttcaggtcaggaagcaatgaaaaaagcgggattgttacaaacttattatgacttagccttaccaatgggtgtaaatattgctgatgaaaaaggcaatattttatccacaaaaaatgtaaagcccgaaaatcgatttgacaatcctgaaataaacagaaatgacttaagggctatcttgttgaatagtttagaaaacgacacggttatttgggatagaaaacttgttatgcttgaacctggtaagaagaagtggacactaacttttgagaataaaccgagtgaaacagcagatttggttattcttgccaatggcgggatgtccaaggtaagaaaatttgttaccgacacggaagttgaagaaacaggtactttcaatatacaagccgatattcatcaaccagagataaactgtcctggattttttcagctatgcaatggaaaccggctaatggcatctcaccaaggtaatttattatttgctaaccccaataataatggtgcattgcattttggaataagttttaaaacacctgatgaatggaaaaaccaaacgcaggtagattttcaaaacagaaatagtgtcgttgattttcttctgaaagaattttccgattgggacgaacgctacaaagaattgattcatacgacgttgtcatttgtaggattggctacacggatatttcctttagaaaagccttggaaaagcaagcgcccattacccataacaatgattggggatgccgcacatttgatgccgccttttgcagggcagggagtaaatagtgggttggtggatgccttgatattgtctgataatctagccgatggaaaatttaatagcattgaagaggctgttaaaaattatgaacagcaaatgtttatctatggcaaagaagcacaagaagaatcaactcaaaacgaaattgaaatgtttaaacccgactttacgtttcagcaattgttaaatgtataaaatggaataaaacggcacataacaaacaaattggcaatagagccggtgaagtacttctattgaacttttgtgcaatgttgaagattagtaattctattcaacatttgtgctaaaagtcggctccatcgccaatttgccaaacgttgtacgacatagtaaaaccgaaccaaacaaaatgaaagtcagagaagaaaagttaagaacaattatagaatggtcggagaaaaacgaagatgtaagagttcttcttctgacaagttcacttgtaaatcctttagcacttgttgacgaatttagtgatttagacattgaatttgtttttgaggataatacaaattacatttcagacaaaagctggacgcttaaattcggaaatccaattgctatgattgaagaagacgaaagttgttttaaccataaacacgcaatgaaaatgctactttatgaagacggtgtgaaagtagattttaaactttacagcaaatcaaaatttataaaggaaacgcaagagaaagaattaccagaagattgggatattggttataaaattttaattgataaagatggtattacaaagcaaatgctgaaaccaacttatcaaatttccattatcaaaaaaccgtctgaaaaagagtttcaaaatctaataaacgatttttggtgggacacaacttacgtggcaaagtgtcttgtgagagatgaaatattctatgcgaaatttatgtcggaaaccgttattcgcacagaatatctaattcctttaattgaatggcacattgcaagtgaacacaattggaacataacgaccaataaatatggacgacttttcaaaaagtatcttaaccaggaaatgtgggctaaaacagaacaaacattttcagggagcgatataaaggaaaattggactgctctattttcaatgactgatttagtttcagaaataggaactgaattgtcaaaaaaattagagtacaaatacccggataaattagaaaatgacatacgaaaatatttagctggactaaaacccaaaacataa

SEQ ID NO: 344 - DNA, 14259 bp, unidentified
  source 1..14259: mol_type = unassigned DNA
  misc_difference 4121: note = a, c, g, or t
  misc_difference 4122: note = a, c, g, or t
  misc_difference 4123: note = a, c, g, or t
  misc_difference 4124: note = a, c, g, or t
  misc_difference 4125: note = a, c, g, or t
  misc_difference 4126: note = a, c, g, or t
  misc_difference 4127: note = a, c, g, or t
  misc_difference 4128: note = a, c, g, or t
  misc_difference 4129: note = a, c, g, or t
  misc_difference 4130: note = a, c, g, or t
ttatgcctcctgtctgtgggccgcaaagcgggtgcctgcggcacggccctcggcgatgtcatagagcagctcggggtgggcgccgttcgcgatgaccatgtcagctccgctggaggtcaccatccgggcggcccggagtttggtggacattccgccggtacccagcgccgaaccggctccgtcggccagcgccatcacctcgggcgtgatgtcctccaccagcgggatgagctttgcgtccgggtgggtgtgggggttggcagtgtagaggccgtcgatgtcgctcagcagcaccagcaaatcagctttgatgcagcaggtgacgatggcggcgagggtgtcattgtcgccgatggaggtgatctcgtcggtggcgacggtgtcgttctcgttgatgatgggcagtgcgcccagctccagcaggcgggtgagggtgttctggatgttctcgcggcggctggcgtgctcgatgtccacaccggtgagcaaaatctgcgccaccgtgtggtcgtaggcgctgaacagccggtcgtaggtgtacatcagctcacactgacccacggcggcacaagcctgcttggaggacatatcggtagggcgggcggaaagcgacagcttgcccacacccatgccgatagcacccgacgacacgaggatgacctcatgtccggcgttcttcaaatcgctgagcactttcaccagctcttcggtgtggcggatgttcagccgcccggtggagtgggccagtgtggaggtgccgactttgactacgatgcgcatagatcaaccctttcccatctctttggtcttgttgtaggaggcgatgacggcgtccatcaccgcgccccgcaggcccttttcttccagcacccgcacgccctggatggtgctgccgccggggctgcacacggcgtccttgagtgcgccggggtgttggctgctctcaagcaccagctttgcgctgcccaggaccatctgggcggcgtactcctgcgccttggcacggggcagaccgcaggccacgccgccgtcggccagcgcctcgatgaactggtacacccaggccgggccgcagccggacacgcagctggccgcgtcgatgaggctttccgacacagcatccagccgcccggcgggggccatcaatttcaggaactcggcctcttcctcggcggtgacgttggaggtgcagtactggatcataccggcccccaccgaagcgggcgtgttgggcatgatgcggatgacggggcagtcgctgcctgccatctcctgaatgcgggcgatggacaggcccgccgccatgctgcacagcacgaagcggctgggccgttcggccagcgtgaagcggagcggtgccagcagctcctccatcatctggggcttgacggctaagaagatgaggtcgcagcggcctgccacctcgtcgttgatggtggtgttgcagcccagctcagcggccagagcctctgccttggcggcggtgcggttggccagccagacgttctgcgggtctgccgccttgcagacggcccgggcgatagccccgcccatgttgccgcagcctaagaaaccgatggtattcagcataagaaaaccctctttcccaatcaaaagaacaggggagatgccccctctgcgtctccattgtaagcagggccgggggagaaatcaagaggaaagccggaaaatgtcaaagcttttcggaaagctcctgatagacgcgctgcggcggagcaggcttttttgctgtccaaatcttaagaaaacataaaaagttcatgaaaaagtcgaaaaaggtgcttgcacctgcacgggcagatgaggtatcataatagatagaagttggaaaactccgcacagaacggggcaaacgcgaaaggatgggcattctcgtggcacagacgacaaaacgcgcgctggaagcatcgctcaaaaagctgctgctccgcaagccgctgaataagataacgataaacgacattaccgaggactgcggcgtgaaccgcatgaccttttactaccatttcaaggatatttacgatttggtggactggatcctggtggaggatgccacagaagcactggaaggccatcaggactttgagacgtggagcgacgccttccgcgatatgctggaaaaggtgcaggccaaccgggtgctggtgctgaatgtctaccgctccatcagccgggaacaggtggagcagtacctctataaaatgcttgaccctctgctgcggatgtttgtagagcgtgaaaacatctcggtgcaggaagaggacaagcagttcatcattgatttttataagtatggctttgtgggtatggtgctggaatggatacgccgcgatatgaagaccgaaccagccatcatggccgaacggctcaacatcatgatgcacggtgatctgaagcgggcgctgctgcgcttcagcaccgacggcagagcatcaaaaaccgacgactgataaaaatttgaacaggcagagcaggatgatagaaaaactatcaccctgcttttgttgtttatagaacctttgtcggaaaaatgttaaagtattgtcaaaacaaagggctggcaaagacccacacaaggaggcagacttttatgagtatcgcgttggagtcgttgaaccataaggtacagcgtaccgctgtcggaacaatggtggatgtggcactggctcatgtcagcaaagaccgtcagaaggcgtttgccgagatggtggacgtcgccaagcagttctatggcgactcgttcagcgaggagacgtatgagcacgcccgcgcagtactgaccgatgcggacagcaagtggtcgaagctcatcaactgtgtgctcgaccagaccgcgcccagcgtggcacgcaccacggcgctcaaccttggctatgaggcgttcttccgggggacaaagaccatccgcgagaaccgcacaaagtaccactgcaacattccgtggctgatcctgttcgaccccacttcggcttgcaatatgcactgcgtgggatgctgggcgggcgagtacggccacaaaaacaacctcagctttgaggatatggacaaaatcatcaccgagggcaaggagctgggggtctatctctatatgctcaccggcggcgagcctctggtgcggaaggcggatattctccgtctggcaaaaaagcacaacgatgtgcagtttgcgatttacacgaactctaccctcatcgatgagccgttctgcaaagaggtcgtagaactgggcaatatcgccttcatgctctcgatcgagggaactccctctaccaatgatgcccggcggggcgacggccactatgccgctgtcatgaatgcgatggacttgctcaaggcccacgggatcctttttggcacctccatctgctataccagagacaatctcgaagccgtcaccagcgaccactttatgcggatgctctgcgacaagggtgcgcacttcgggttctacttccactatatgccggtaggcaatgaggctgcgccagagctgatgcccacgcctgctcagcgcaagtacatgatcgagcgcatccggtatctccgctcagagaagagcgatattccgttttatccgatggacttccagaacgatggcgagtttgtgggcggatgcatcgcaggcggacgcaactattttcatatcaattcggcgggcgatgcagagccgtgcgtctttatccactattccaacgccaacatccacgacagcagcatcctcgatattctccgcagcccgctcttcatggcctaccacaacggccagcccttcaataaaaaccatctgcgtccctgcccgatgctggaaaaccccgagcttctgcgccagatggtgcatgacaccggtgctcacagcaccgacttgcagtcgcccgagagcgtagaccacctctgcgacaaatgcggtgcatatgctgccgactggcagcctgtagccgacgagatctggtcgcacgtcaccctcagggagagccggtacgagaattacaaggactgggaaccggcgcattccactgctcacgcgaaatgactttatcggtctttcaaagataaaaatgtgcagaaaagcccccatcttcaccggctgaggcaagatcggnnnnnnnnnntgaggcagccgggaggatgggggctttatcttgttattttattcttcgccggaatcaatgacgatttcggtttccgttccttcatcttctacaggcgcgggagccgggtcgccgggatcgccgaactcgtcgtggtagacggtcatctggtcgagctggccgttgcggcgcaggccatggaagaccagcttcttgatgacgtcatagatgacggcgaacagcggcacgcccacgatcatgcccacgaagccccacagaccgccgaacagcaggatggagaagagcacccagaagctcgaaaggccggtggtgttgcccaggatcttcgggccgatgacattgccgtccagctgctggagcaccagaacgaagagcacgaaccagatggccttgatggggctctggatgaggatgagcagcgttgcaggcacggcaccgatgaagggaccgaagaaggggatgacattggtgacgccgatgatgaccgacaccagcagcgcgctcgggaacttgaagatgatgcaggcaaagtagcagagcacgccaatgatggcggagtccatgatcttgccgttgatgaagccgccgaacatcttgtctgcgtagaggacttcctcctggatgagctgcgcccagcggggcttgacgacgctgtagaggatcatcttggcctgtttggcgaactttttgcggctggccagcaggtaaacagcgacgataaggccgatgagcaggttcttgaaccaggtcaccacattcatgacgccgacgcccacaccgctcaggatgccttgtatattctgcagcgaggggagcagggtggtgcgcagagtggtcagattgtcagcaatggcatcgtaggcatcgttgaaatagcccatcagtgtctcattatccaagaagacttcctgtgtgttcacccaccgcatgaaccgggtaatgctggtctgcgcggtgtagtagagggaggtgacgcttgtgatgagctgcggcaccaccatcatcacgagggcgtagaccaccagcacaccgaacagcagcgtcgccgcaatggcaagcatattggccatgctgtggagcttttcggggaagattcggtgcagaaagccctcaatggtgttgcacaccggcttgagcagataggcgatgacggcaccgtagatgaagggcatcaggataccggtcaccttggagaccgcgtcgccgaacccgtcgaagcggtagatgaagaagaagaacaggatgcttagacttatcgcaccaaagcccgcgagcattccgtagatatagggcttgatgtgcggctttttgtccatcatgtgtgactccattcctgccgcagacggcaggagccggtacggcgatgtttagattttgttgctgcggcgccagatgtgcatcttctcggcctctttgataagctcctcgcggaagtcggggtgtgccacattgatgagggcttcggccttctcccaggtggtcagacccttgaggttgacgcagccgtattcggtgcagaggtaatgcagattggcgcgggtatcggtgatgatgctgccgttttccagcgtgggacggatgcggctctcgagctgaccggtcttcttattaaagaaggtagaagacaggcagatgaagctcttgccacccttggaaaggtatgcgcccagcacgaagtccagctggccgcctgcaccggaaatgtgcttgacgccggcgctctccgcattcacctggccgaacaggtcgatgtccaccgcattgttgatggagatgaagttgtccagcgcggagatgctgcggatgtcgttggtgtaatcgacgggagcagacatgcactcggggttgttgttgaggtagtcgtacatcttctgggtgccggcaccgaaggcgtagacctgacggcccttgtccagctgcttgtgtgcgccggtgatcttgccggccttggcgatgtccacgaaagcgtcaacatacatctcggtgtggacgcccaggtccttcaaatcgctctgggcgatgaggctgccgatggcgttgggcataccgccgatgcccagctgcaggcaggcaccgttggggatctgcggcacgacgaggtttgcgaccttcaaatcgacctcggaagcggggccggcagcggccatctggccgatgggcggattgtcgccctccacgatgccggtgacctgggagatatggacacagttctccataccgccgaggcagcggggcatattggtgttgacctccacgatgatcttccgggccttctcacagacggcacccagatgggaagcgctggggccgaagttgaagtagccgtgctcgtccatcggagtcacctggaagacggcgatgtccagcgggtcgggactctcgcggtagtagcggggcagctccgaatagcggatgggggagtagaacgagaagccctgtgcgatggctttgcgctcaatgccgcccatgtgccagctgttccaggtcatgtgggcagcggggtcgtcgatctggaagatctcaggcacccacatcaggatgccgccgcggaaattgacgttctccagttcgggcaggcgcttggcaagggcggcgtccacggccacgggggtgttgacgcaccagccgtaatccacccagtcgccgctcttgaccagagaagcagcctgctcggcagtcatctttttctgggcatacatttccatgaaatccattataaaccatcctctcctttaagaacataaaagaattgtaaatttattatttacaattctacgggacaaaatcttagccggaaatttaccgtttcttcccagtccggacactgtcttatcacaccccggcggtatccttggggtcggcagggcagaagcctccggcagcggcacacctgcacagcttagttataacattaacaaacattataatcaagccctcttccgcgaaaaaatgtctcgcaggacaatttgactaaatttcttaggtatttgtggcgattgtttggtatagcaaaaacaatttttttcgaaaaagtacttgataaaattttgacgatatggtttactaagggtgtaccaagatgatgcgccccagtgcgacgttaattgactaaaaattaacgatattgcgatggcgatgcggcctggtacttgaagcaggaactgaaaagtgctatcatggcaacaccaaatgcgcttttccaaagcgcgcaaataaaggagaccataccgatggcaacagcagtttaccccgggtccttcgacccggtcacgagaggacatctcgacatcatcaagcgagctgcaaagataaacgaccagctcattgtggcagtgctcatcaacagcgcaaagaaccctctgttcaccgtagaagaacgggtggcgctgctgcgggagtgctgcaaggacatcccgaatgtgacggtggagagcttcgacggcttgaccgtggacttcgccaagaagcgccacgcttcggtgatggtgcggggcctgcgggcggtgacggatttcgaaaacgagatacagctcgcccagacgaaccacgcactgatgcccggtatcgagacgatgttccttgccaccagcatcaagtggagctacctttcctccaccatcgtcaaggaggctgcccgctacggcagcaacatctccaagttcgtgacgcccaacgtagagaatgccatccacgccaaagtggagcagctccgggcggaaggaaagatgttctgataccttttataatgcagaaaggcctttgggctttttgataaatagttttacgaaaccccgaaacatataaattcaggaggctattaacatgaagaaaattgttatcgcatctgcttgccgtaccgctattggtaagtttggcggcaccctggcaaacgtccctgctgcagagctgggctccatcgtcatcaaggaggccctgaaccgtgctaacgtgaaacccgagcaggtcgatcatgtttacatgggctgcgtcatccaggctggtctgggccagaacgtcgctcgtcaggcttccctgaaggctggcctgcccgtcgagactcctgctgtcaccgtcaacgtggtctgcggctccggcctgaactgcgtgaacatggctgctcagatgatcgaggccggcgatgctgacatcgtggtcgcaggcggcatggagaacatggacatggctcccttcgcaatgatgaagggccgctacggctaccgcatgggcgctcccatgggcaagagcgagatcgtggataccatggtcaacgatgctctgtgggatgcctgcggcttcaacaagcacatgggcatgaccgctgagaacgtctgcaccaacgagacctatcagaagaagtacggctacagccccatcacccgcgagatgctggatgatttcgcttaccacagccagctgaaggctgacaaggccatcaaggacggcgctttcaaggatgagatcgttcctgttgtcatcaagggcaagaagggcgacaccgtgttcgataccgatgaaggcccccgtctgagcgctcccgaagtgctggcaaagctgaagcccgccttcaccaaggacggcatcgtcaccgctgcaaactcctccgctatcaacgatggcgcagctgctctggtcatcatgagcgaagagaaggccaaggagctgggcgtgaagcctctggctacctgggtcgcaggtgctctggcaggcgtcgagcctgaggtcatgggccttggccccatcgctgctaccaagaaggtcatggctaagaccggcctgaccgttgctgatatggacctggtcgaggccaacgaggcattcgcagcacagtccatcgcagtcggcgaggctttgggcttcgataaggacaagctgaacgtcaacggcggcgcaatcgctctgggccacccggtcggcgcttccggtgctcgtatcctcgtcaccctgctgtatgctatgaagcatcgtggtgctcacaagggtctggctaccctgtgcatcggcggcggcatgggctgcgcaaccatcgtcgagatggactaatttccctttggagggtcactccggatattgatacagcccggacagtgggcgagaccggagacttgccccttgtccgggggctgttttgaataagatataacctgaatggaggttttcacaatggcatttgtaaaaaccgaggtgcagggcgcagtcgagatcatcaccatcgaccgcccgaaggcactgaacgccctgaaccccgaagtcctggcagacctgaaggctgcttttgaggcagttgaccagtccgccatccgctgcatcgtcctgaccggcgaaggcgacaagagcttcgtggcaggcgctgacatcggctccatgagcaccatgaccaaggccgagggcgaggctttcggcaaactgggcaatgatgtgttcctgatgatcgagagcttccccatccccgtcatcgcagccgtcaacggctttgcactgggcggcggcaatgagctggctatgagctgcgacatccgcatctgctccgacaacgctgtgtttggtcagccggaagtcggtctgggcatcaccccgggcttcggcggtacccagcgtctggctcgtctggtaggcatgggcatggcaaagcagctggtctactctgcactgaacatcaaggctgacgaggcctaccgcatcggcctggtcaacgcagtgtatccgcaggctgagctgatggagaatgtcctgaagctggccaacaagatcgccaagaacgctcccatcgccgtgcgcaactgcaagaaggctatcaacgacggcatcagcctccccatcgagaaggctgtcgaagtcgaagagaagctgttcggcgactgcttcgagactcatgaccagaaggaaggcatggcctgcttcctgagccgtgaaaagccgaagcccaaggcagtgttcacgaacaactaaactaaaccataacgcctctgcaacgcctccccggaaaggggaggcacggagaggcactacattcagaagatataataaaggagagatttcctatgaagatcggtgttatcggtgctggcactatgggccagggcatcgcaaaggcatttgctcaggtcgagggcaacacggttgctctgtgtgacatcaagcaggagtgggccgagaatggtctggcaaagatcaagaagggctatgaaaagctggtcgctaagggcaagatgactcaggagaaggctgacgctatcgtcgctgctatcactccgggcctgaaggaagacctgtgcgctgactgcgacctcgtcgttgaggctgctttcgaggatatgaaggtcaagcagaccacttttggcgagctggataagatctgcaagcccgagtgcatcttcgcttccaacacctcttctctgtccatcaccgagatcggcaagggtgtcagccgtcctctggtcggtatgcacttcttcaaccccgcagaccgcatgaagctcatcgaggtcatcgctggctgcaacactcctgctgagaccgttgagaagatcaaggagatctccgttgccatcggcaagaaccccgttcaggtcaacgaggctgctggcttcgtcgtcaaccgcatcctgatcccgatgatcaacgaggctgccttcatcaagatggagggcgtttccaacatcgccggcatcgacaccgctatgaagctgggtgccaatcacccgatgggtcccctggagctgggcgacttcatcggcctggacatctgcctcgccattatggacgtcctgtacaaggagaccggcgacagcaagtatcgtgcatgcccgctcatccgtaagatggtccgcggcggcaacctgggctgcaagtctggcaagggcttctacgtttacaacgcggaccgcaccaagacccctgtcgacgagctgtaaattagtttgaaatttctctcggtcgtcccgaagaaaacggccgggaggaatttgtttgcacaggacatgagtgtagctgccctgtgctgaaagaaaaacatccgttaggaggatatagcgatggattttactctgtccaagcagcagcagatggtgcagaagatgtaccgcgagtttgctgaaaacgaagtcaagcctctggcaaagaaagtcgatgccgaagagtatttccccaaggagaccgtcgagaagatgggcaagctgggtatgatgggcatttacttccccacctccgttggcggtgcaggcggcgacgtcctgtcctacgtcatggctgttgaggagctgagcaaggtctgcggcaccactggtgttatcgtttccgcacacaccagcctgtgcgcagcacctatttatgagaacggcactcccgagcagaaggaaaagtatctgcccaagctgtgcagcggcgagtggctgggtgctttcggtctgaccgagccgggcgctggtactgacgctcagggccagcagaccactgctgtggaagatggcgattactgggtgctgaacggctccaagatcttcatcaccaacgcaggctacgctgacgtgttcatcgtcatcgctgttaccgataaggtcctcgacaagaagggccgtcccaccaagctgtgctccgccttcatcgtggagcgtaccgacccgggcttctccgtcggcaaggctgaggataagatgggcatccgtggttcttctacctgcgagctgatctttgaggactgccgcatcccgaaggatcgtatgctgggcgtacgcggcaagggcttccagctggctatggctactctggacggcggccgtatcggtatcgcttcccaggctctgggcatcgccgagggcgctctgcaggagaccgtcgcttacgtcaaggagcgcaagcagttcggccgcagcatctccgctttccagaacacccagttcgagctggccgagatgaaggcccgtatcgaggctgcaaagtatctggtctacgctgccgctctgaagaagcaggaagctatgaatggtgcaaaggtccgctacagcgtcgaggctgctcaggctaagctcatcgcagcccgcaccgcaagcgacgtgacccgccgctgcctgcagctgttcggtggctacggctacacccgtgactaccccatcgagcgcatgatgcgtgatgccaagatcactgagatctacgagggcaccagcgaagtgcagatgatggtcatttccggcgcgctgctgaagtaagggaggcaagatttacaatgaaagcaatcgtttgtgtaaagcaggttcctgatacctccggtaaggtggctgtcaaggcggatggtactctggaccgtgcctctatggcaaccatcaccaaccccgatgacctgaacgctctggaggccgctctgaagctgaaggacgagaccggctgcgaagtcgtcgtcgtcaccatgggtcccccgccggccgagggcatgctccgtgagctgctggcccgcggtgctgataaggctgttctggtctctggtcgtgagttcggtggttctgataccttcgcgaccagccagatcctcgctgctgctgtcaataagatcggtgtcggccccgaggacgtcgtgttctgcggccgtcaggcaatcgacggtgataccgcacaggtcggtcctcagatcgctgagaagctgcacctgcctcaggtgacctatgttgctgacatccagaaggatggcaacagcctcacggtcaagcgtatgctggaagacggctacatgatggtcaaggtgcagactccctgcctgctgacctgcatcaaggagctgaatcagccccgctacatgagcgtcaatggcatcttcacctgctacgacaagccgatggaagtgttcgattacaacgctctgaaggacgatccgctgatcgaggtcgataccatcggcctgaagggttctccgacgaacgtctttaagtccttcactcctccgcagaagggcgcaggcactatgctgactggcgacgataccactgcacagctggctggtatcctggccaagaagcacctgatctgatgaaaggagcataggattacaatggctgattttaacgaatacaagggcgtctgggtcttctgcgagcagcgccagggcgcactgatgtccactgattttgagctggtcagcgaggcccgcaagctggctgatgagctgggctgcgaagtcaccggcctgctgctgggcgacaacgtcgaaggcattgcaaaagagctgggcggctatggtgccgataaggtcatggtctgcgacagcccgctgctgaaggattacaccactgacgcatacgccaaggtcgtctgcgacatggtcaacgagtacaagcctgaggtcctgctgatcggtgctaccaacatcggccgcgaccttggcccccgctgcgcagctcgtctgcacaccggtctgaccgctgatgctacccatctggacatcgacactgcaaagtatgtcgagttcctgaaggagagctccaccatcgacctgtccaagcagaagttcgattacgaggaccgcaacctgaagatgacccgtcctgcttttggcggccatctgatggctaccatcatctgcccccgtttccgtcctcagatgtctaccgtccgtcccggcgtcatgaagaaggctcccttcgatcaggccaaggccgatgcctgccagatcgtgaagcccgcattcagcctgaccgctgacgacatcaagactgaggtcctgagcgttgagaaggcagctgagaagctggtcgacctcatcggtgcagacgtcatcgtctctgttggccgtggcatcagcaaggacgtcaacaagggcatcgagctggctgagcagctggctgcagctctgggcggcggcgttgtcggcgcatcccgtgctgtcaccgatgccggctggatgaccgctgaccatcaggtcggtcagaccggtaagaccgtccatcccaagatctatgtggctctgggcatctccggcgctatccagcacaccgcaggtatgcaggattctgagtgcatcattgccgtcaacaagaatgagtccgcccccatcttcggtgtggctgactacggcatcgtgggcgacctgttcaaggtcgttcccgaactcatcaagcaggtcgaggcagcaaaggctgctcagtga

SEQ ID NO: 345 - DNA, 9049 bp, unidentified
  source 1..9049: mol_type = unassigned DNA
  misc_difference 2920: note = a, c, g, or t
  misc_difference 2921: note = a, c, g, or t
  misc_difference 2922: note = a, c, g, or t
  misc_difference 2923: note = a, c, g, or t
  misc_difference 2924: note = a, c, g, or t
  misc_difference 2925: note = a, c, g, or t
  misc_difference 2926: note = a, c, g, or t
  misc_difference 2927: note = a, c, g, or t
  misc_difference 2928: note = a, c, g, or t
  misc_difference 2929: note = a, c, g, or t
  misc_difference 8202: note = a, c, g, or t
  misc_difference 8203: note = a, c, g, or t
  misc_difference 8204: note = a, c, g, or t
  misc_difference 8205: note = a, c, g, or t
  misc_difference 8206: note = a, c, g, or t
  misc_difference 8207: note = a, c, g, or t
  misc_difference 8208: note = a, c, g, or t
  misc_difference 8209: note = a, c, g, or t
  misc_difference 8210: note = a, c, g, or t
  misc_difference 8211: note = a, c, g, or t
ttagtaggtgatgccctgagccatcatggcagtagcgaccttcaggaagccagcgcagtttgcaccgaccatcaggttgccctcggagccagcggccacggatgcatcgtaggaagcgtggaagatgccctccatgatgcccttcagctttgcatcgacctcttcgaagctccagctcagacgctcggagttctggctcatctccagaccggaggtagccacgccgccggcgttggaagcctttgcgggtccgtacaggatgccgttggacaggtagacctcgatggcctcgggagtgctgggcatgttagcgccctcgcagaccacggtgcagccgcccttcaccagagcctctgcggactccttgttgatctcgttctgggtagcgcagggcagggcaatgtcgcaggggacagtccagaccttggtgcagtcagcaacgtaggtcgcatccttgtgggtctcagcatactccttgatgcggccgcggcggacttccttcagatccttgacgtaagccaggtcgatgccgttggggtcgtagacatagccgttggagtcggacatggtgacgaccttggcacccagctgggtagccttctcacaggcatagatagcgacattgccggagccggagatgaccacggtcttgccctcgaagctgtcgttgcgcatgcacttcagagcctcagcggtgaagtagcacaggccgtagccggtagcctcggtacgggccagagaaccgccgaaggtcaggcccttgccggtgagcataccgccctggaagctgttggtcagacgcttgtactggccgaacatatagccgacctcgcggccgccgacgccaatatcaccggcggggcagtccacgaactggccgatgtggcggtacagctcggtcatgaagctctggcagaagcgcatgacttccatgtcgctcttgccgtgggggtcgaagtcagagccgcccttgccgccgcccatgggcagggtggtcaggctgttcttgaaggtctgctcgaagccgaggaacttcaggatgccctgattgacagaaggatggaagcgcaggccgcccttgtaggggccgatggcgctgttgaactggacgcggtagccgcggttcacctggaccttgccctggtcatcgacccaaggcacacggaaggtgatgatgcgctcaggctcgaccagacgctcgatgagggcggccttctcgtactcgggatgcttctccacgacgggctggatgctctccagaacctcgcggacagcctgcaggaattcgggctcgttggcattgcgcttttccaggccctcgtagacacgcttcagatattcattcgtcagcataatgatatactccttttcccttaactctattgtgtggaggcttcggctttcccgtttcccacggcgggtgcgataagcctctgaccactttgctattataaagctttatctgccgatttacaagatggcccgccccgcaaaaaaccggaaaatctttcaaaatacaatggaaaagatgaatgcacttcacgaaaaagacgggacacatcaaaaaattgcgataaaacctgcttttataaagaaacaaaaaatccctgcaccggcccggaacaggcagtgcagggaggaaaagtcttacttcagcagcttctcgcaggcgtcagcggcaccctcgaggaactgtccgccgtaggtctcgatcatgccggcgtcggacagcgcagccagctgcgggtcgatggggcatttggccagaacgggcaggtgatgctttgcggccacctcgtccacatggctgtcgccgaacacattgatgtgcttgccgcagtcggggcagacgatatagctcatgttctcgacgatgcccagcatcggcaccttcatcatctcggccatgttcacggccttggccacgatcatgctcaccagctcctgcgggcttgccacgacgacgatgccgtccacgggcagactctggaagacggtcagggggacgtcaccggttcccggaggcatatccacgaacaggaaatcgacgtctttccagaccacatcggtccagaactgcttgaccgcaccggcgatgacggggccgcgccagacgacggggtcttcctcgttctccaccagcaggttgatgctcatcacgtcgatgcccatccggctctggatgggccagcagcccttgtcgtcagccatggcacggccatggatgccgaacagcttggggatggacgggccggtgatgtcggcgtcgaggatgccgcagtggtagccgcggcgtgccattgcacaggccagcagggcgctggtcatgctcttgccgacgccgcccttgccggatacgacgccgatgaccttcttgacgctgctattggggttgggtgcgtcatgctggggcgcagcattgcgggaagaacacgctgccccgcagttggagcagtcatgggtacattcttcgctcattgtctcgttgcgcacggccgtggtaccggggtgcgcttcctccttgcattcttagatccggtctggcggaacattcccgccagatacaatatatatcatatcataaaactgggaaagaaacaacccacggccccgctcatatttcccagagcagtttacatatttataaaaagatacactggggaaagggaggggtgcgctgtgcggcagagctatctgaaaaacgcagccctgatgaccggggcggacgtcctgctccgtctggcgggcatggggctgcgcatctggctggcgaacgccctgggcggcgaggggatggggctgtaccagctggtgctggcggtctattcgctcttcgtcacactggcgacggcgggcgtctcggtggcggccacccgcctgatggctgaagagctggcccgcagcccggcggaggcccggnnnnnnnnnngatctgcccgggggatgcttcactgtctcctgctggcgggggccgggctgggtgtgctggcactggcggcgcagttcgggctggcgggtctcgccgcaaaatggtggctgggcgatgtccgggcagcgggggcgctgcgtgtctcgtcgctgggcctgccgtggatggcggtgtcgtcggtactgcggggctttttcatcgcccggcggcaggtggagccaaacgtcctgagccagctggccgagcagaccgtccgcatcggcatcgtctactttgcgctggagcgggccgacgtcctcggctgggacgttggcgggcgctgcacggcagtgctgggggcaacggcggtcagcgaggccgtcagtaccgggctgatggcacttttttaccgcaaagaggcccgccgctgcttcggtacgcggcctgcctgccgcccgcaggagccgggaaagcgcctctgggacatcctctggccggtggagggaggacgttgtctcgccagcgctctccacaccgcggagaatatgctggtgccggcctgcctggcagtctatctgcagttttccggcgggcgtgccgaagccgtggcccagtacggcaacctcaaggggatggccctgcctctgctgacctttcccttcggactgctggggagcctttccgtcctgctgatgcctgagatcacccaggcccacctctggggccagaacgggcggctggcggctctcatcgacaggatgctccggctcaccggctatttctcggcgctggcaggagcggcgttctgggtgtggggtcagccgctggccgaagccctctacggcagtgccgaggcgggcagctaccttatcatcctcggcccggccatgccgctgatgtacctcgagagcatggtggacggtgccatgaagggggtaggagaacagaaagccgtgttccgctacagcatgtgggactcctgtctccgcattgtgggcgtgctgctcctgctgccccgcttcgggatgaagggctttctttttgtgatattgctgtccagcttctacacctgcaccgccaacacggggcggctgctgtccagctgcggcctgcggctgcaactctggcggtggctgggcgcaccgggctttgcgggagccgtcagcgccggggccgggctggccctgcggcatcttttagcggactggctcaccggcggagtcctcttgcagctggcggcggtagcgctgggcggcgcggggatggcagtggtctgctttgcggcggcgtggccgctgggcctcggcgaagagctgcgggccgtggcggcaggggaaaggcggcataagaaaaatgtccaaaaagtgaaataactggacacggggaagagaatcgagtataatactaaagatattatggggtgataggcccttgaaataaaaacggcagctgacatcttcggatgccggccccgatgaaaaagaggatattctgtgaaggaaaagaaaacaaatctgctgcaggtactggcccgccgggctctgctggtggtgctggacggagccatcgtagccttcagcttttatttcgccctgctgctgcgcgcagacggtgctgtcgaggcctcctggtggccccacaaccgcgccctgctctacgcgaatctgccctggatcgtggcagtctacctgctcagctttctggccgggcggctctacaccatcctttggaagtatgccggggagcgtgacctcatccgtctggccgggatgatcgccgtcccgacgggcatcgtctatctggtcaaccgatgcttcatccacggtgtgctcttcaactcggccaacgccatggcggcggtgctcattttcctgttcatcggcgggagccgtctggcctggcggctcttcctgaaccacccgctgggcgagcgtctgcgcggcaacaccagcaaggaccccaaccgccctgtcatgatcgtgggtgcgggcgaggctggtgcgtgggccatcaatgtctgcaagaccaacaccagctacggccatgtcatcgtggccgtggatgatgaccccaacaagctgggccagaccatccatggtgtcccggtgcgtggcacgctggaagaaattcctgacctgtgtacccgctataacatccacaccatcatcgtggcgatcccgaccctgaagggaaaccgcctgaaccacgtcatcgacctctgcgtctccacccactgcgccgtgcagatgctcagcgatccccagctggtgggtgcaggcacacctcagcagggtgcgttccgtgagctgaacaccgccgatttcctctcccgtgaggaagtcacactggacatggagaaaatttccggctacctcaccggcaagaccgttctggtgacgggcggcggcggcagcatcggcagtgagctctgccgtcaggtcatgcgcttcaaacctgcaaaactgcttatcttcgatatttatgagaattgtgcctatgaactgctgatggaactgcagcagaagtatggccgtgatgtgccggtcacggtgctggtcggctccatccgggacaaggcccgtctggacgaggtatttgagacgtaccacccgacggtggtgttccatgctgccgcccacaagcatgtcccgctgatggagatcagccccgccgaggccgtcaagaacaatgtctttggcactaagaacctgctcaccagtgccagtgaacacggcgtggagcggctggtgcagctctccaccgataaggccgtcaaccccaccagcgttatgggctgcaccaagcgcctgtgtgagatgcttatccagaccttcgcaggcaacaccgacatgaagtgcgtcgccgtccgcttcggtaatgtgctgggcagccacggcagtgtcatcccgctgtttgaggcgcagatcaaaaagggcggccccgtcacccttaccgatgccaacatcgagcgctactttatgaccatcccggaggcggcacagctggtgctgcaggccggtgcgctggccgagagcggcagcatctatgtgctggacatgggcgagccggtcaagatcatggaccttgcaaaacagctcatccgcttctacggctatgagccgggcgtgaacatggatattaagatcgtgggtctgcgccccggcgaaaaactctacgaagagctgatgatggacgaggagcaggacaagatgcgccgcaccgtccacaataagatcttcgtggctccgccccggaacatcgacctgggcgagttctaccagcagcttcaggagctggccgtcgccgccgagcacaacgacgacagcgtggtggagcagttggccaaaatggtgcctacctttacccccacccgcgaaaacctcaagctgtaaaaccgctggctgcacggcacccttgctgtgtaaaaatatatgagagggatgtacaatcatggaaaagaaaccgtttttgactgagtcgatggctcaggacatcattcaggacgtacccacccccttccacgtctatgacgagaagggcattcgcgagaacgcccgccgcatcaacaaggcattcagctggaacaagggcttccgcgagtattttgcggtcaaggctctgccgaaccccgtcatcctccagatcctgaaggaagagggctgcggcgtggactgctcctctctgaccgagctgatgctcagcgaagtgtgcggcttcagcggcagcgacatcatgttctcctccaaccagactcctgtggaggacatgaagaaggcttacgagctgggcgcttatatcaacctcgatgacgccacgatggtggacttcctcgaccgcgtggccggtgtgccggagaacatcttctgccgttacaatccgggcggcaccttccagttgggcgagagcaaagagggcttccaggtcatggacaagcccggcgacgccaagtacggcatgaccgaggagcagatgatcgacagctacaagaagctggctgcaaagggtgccaaaaactttggcatccacgccttcctcgcctccaacaccatctctgacgcctattatcctgagctggcaggcatcctcttccagctggctgtccgcgtccagaaggccaccggcgtgcatatcgcctacatcaacctgtccggcggcgtcggcatcccgtaccgccccgagcagacggagaacgacatcatggccatcggcgagggcgttcgcaagaagtttgaagaaattctggtccccgccggcatgggcgatgtctccatcttcaccgagatgggccgcttcaccaccggcccctacggcgctctggtagctactgccatccacgagaagcacatctataaggaatacatcggtctggatgcctgcgcggccaacctgatgcgccccgccatgtacggcgcttaccaccacatcaccgtgctgggcaaggaagacgcaccccacgaccacaagtacgatgtggtcggcggtctgtgcgagaacaacgacaagtttgccatcgaccgtatgctgcccaaaatcgacatcggcgacatcgtgtatatccacgataccggtgcgcacggctctgccatgggctacaactacaacggcaagctgcgcagcgccgaggtcctgctctgcgaggacggctctcaccgcctcatccgccgtgccgagactccccgcgactactttgcaacgctggacttcctgcccttcatgaagccgctgctgggcgagtacaacgacgactgagcacgcttctgactccatcaaaccagaataaagcgaggaacgacgcagatgttttttggattccaactcacctgtggcctgatgctggtcttttacggctattcggtcatgaaaaatccacgggtctggggcgaccagggccgtcaggccgtcaaggccgaaaatttccccgagtactgccgccagaacggcctgtttttcctgaaagctggcttcatcatggcgctcattggtgcgctggacgcgctggtaacgctttcgggtctgctgtacgtcctgctgtacctgtttgggctggcgtttgcgttctacccgctgacccgctggtgcaaggagaacgagggcttctcgtggccctggccccgcgtcgagagcgagaaaaagcgcatcaagaaactgcgccggcagcaggaggccgaaaaggcggaacgagaagaaaagtaaatagcaaaaaataagaggtcgctgtaaaagcaacctctcagtctcacttcgttcgacagctccccctaccgaggggagcctctggcgaagagattgggctnnnnnnnnnngggaggtggcacggcgaagccgtgacggagaggttgaacacagcggcctctttttgttttcttaaatcaaaccattttctttgcagtagtggtaaataccatcctcagcacagggacgacagacctcgctggcgatggctttcaaatcggcagaagcgttgcccatggcaacgctgtgaccgacagcctgaaacatttctatatcgttgttgccgtcgccgaaagccattgcatcctcgggcgtcaggccgtaataggccagaactttctggataccggctccttttccgccggagatggggatgatgtccaccgccctgtcccaccaggcagcgatttttgcaccgctcgtgcctttgagaatggcgggccagtcgctttcgcggcagcccatcagcaactggaaaacttcacctcgggagacttcatcgaacttatcggaaatgaccggcgctcgtccgccgatggcgtaatatgctgccaaatcgtcatccgttccgttggagaggagctgcgtccgtcctgcaaccgacaccggacgaccaagcgctgcggcgttttgaatcagcgtctgcacatcctgcggcgggatggggctgacgaaaatatcgccggtcatgttgtagcagaatgagccgttgtaggtaagaaagacgtcgaactctacgccgtcgaatttcggcacaatgagaggggaacgcccggtggcgatggccagcaggatgccgttttgctgtaagcggcgcagagcgtccagtgtccgctcagtaatacgctttttctccatgtcgataagggtgccgtcgatgtcgaaaaagatgatgcggggcttgtgcat

SEQ ID NO: 346 - DNA, 8355 bp, unidentified
  source 1..8355: mol_type = unassigned DNA
ttaatccgtatcgtattccacgccgccctgcgcggcatccccgccggcgggcgtcccggtatccgaaggcgcttccggttccgccggggcatcggcgggaacatcgcctgcgatatagagcacgatggtagttcccacctccaccatgctcccggcgtcctcgctggccgacacgacgcaacccgccgcctcagagccgtcgttgaccacagtaaagcaggtggcgttcagacccttggtggccagctcctgcacggcgctgtcctgcgtctggccgatgacgtcgggcatctccatcatctgggggcctcggctgaccacgaggctgacggtgtcccccttctggatgacctcgcccgcctccggcgactgccggatgatgcggcccttctccaccgtgtcgctgtattccagcgtgacgtagaagagatactcgtcgatataactgcggttgttgcgcacctcggcgtcatagtcgcggcccacgaaattcggcgtcagggtgacgttttcgttcaccggctcactcgccgcctcgctgacggactccggagcgatcacttccggcggcttctcgctctgacggctcagcaggccccagaggatcagcaggatgaggacgctgagcagaatgacgatgcccgccagaagatttcggacgctcagcagctcagccttcgcaggcgctttcggttcctgcggcgcgggggcgggcgggtccagcgcttccatgctgcgggacaattcctccgcatactcccgctccgagagggcgcggaaaagctgctgcaccgtctggatgcgctccaccggcttgagccggagtcccagatacagcgtttcggagacgtaagccggcaccgacggcgtcaccgtgcgggccttggggttggagtcggagacgaggcgctgtgccgccgggacggggctcagcccgcagaccatccggtagaacaccgccgcgaggctgtattcgtcggtgtagcggccctcgaactcggcggtggaatactgctccggggcggaatagccctcgtacagctgctcatgaaggccgctgcccgccgtgcgcagccccactgtcgcgtagccggtgagccgggcgcggccattgtccatgatgcggatattggccgggcagatgccccggtgtacgaggcccacctgatgcatggcctccaccccgttgaacaccggttccagcatggcgcaggcctgctggggcgtcacggtgccgtgctcctccagccacttctggagcggacggccgccggggttctccatgacggcgtagaccgtgttgttctcttcgaagacgtccagcacggcctccaggccgttggccggggtaatgcgctggatgaagcggtagaggtcggcaaaatccatccgggtggtcttgaacagcacttcgctgcccggcttcgggcggaggatgcagtccctcccccgctctgccgccagcgtcaggggcatatactccttgatggtcacccggaaagggccgttgttctccacgccccggtagaggatgccctcgccgtccacgctctggatgtcgcccacggtataccggcctgccagcacggtgcctgccggaagactgcccgacgggttgcgccctgcaagttcccggccgcagtggggacactgctcctcccccgcttccagctcctgcatacagtatggacaaatgcgtcgttgctccatgtcggcccctccccgtgatgttttgtactgtttattatagcatagccgacgggaaaatggtaccctaccgccatgaacttcagaagcacgggatcattcagtatatccactcttttcgttcatgcacaagacgatgtatttttcagttttcacattatttcaaatattcttctgcacttttgcagatctctgcttcgattttttcagcagtctccttattttctgcactaattgaaatataggtcttgagcttcggctcagtgccggaaggacgcaccacaatggagcagttatcttccagaaggaacttgagcacatcggacttgggcagaccgtccagacccggagcgtagtccaacagcttgacgacctttttgccgccgaactccttgataccgccccggaacgcctgcatgatgcgctgcatagaccttataaccgttgtacttgctggggttgtgagaagccgtgaccatgacacccgccgaggtgtgcagatagcgggtcgcaaacgacacagtcggcaccggcatcaggacgggccagatattgaccttgacgccattggccgcgaacactccggcggccacttttgcaaacacatcgctcttgatgcggctgtcatagccgatggccacggacggctctgcaaagttctttttcagataatcggccaggccctgagaggcctttgccacagtatagatgttcatgcggttggtgcctgcgccgatgacgccgcgcagaccgcccgtaccaaaagcaaggtcacggtaaaacgcatcttcgatttttgcatcgtccagcgttttcagttcagcggccacgtcggcgtctgcggtggccttggccagccagcgctcatattcctttttaatatccattttctcaacctcttacatccaaaaattgtgcctgtccgtgaagggtcagtatctcggaatccgccgggacaaagatgcagtcacctttatagaaagtgatgctgccgccgtcgtaggaaatagtcccgcagccattgacacagagcagcacacggaacgcaataccatctgcccggtagtgtactttctgccgccgctcggtgttgacgatcatgcggtagacctcaaaatacttgcagcgggtcagcagctcagaggcaatgccctgccggtatttcagcacccgaaggggctgcttcggctctgcgctgctcttcaggttcgctacatccagcgccttgtcgatgtgcagctcccgctttttgccgtccttgcccacacggtcataatcgtacaggcggtaggtcaggttggaattttcctgaatttcggctaccaatgcgccggctccgatggcatggatagtacctgcttcaataaaaaacaggtcgtccttcttgaccggaacccactgcaaatccttcatcagggttccttcggcgatagcgtcccgcacctgctgttcggtacgttcccgtttcaggccatacacgagctttgcgtccttgctggcgtccagcacataccacatctcggtcttgcccagctgtccgttttcgtgctcctgtgcgtaggcatcggtgggatgcacctgcaccgacaggtctttcttggcgtcgatgaatttgatgaggatgggcagagtattttcgcctttgtaccgttcgcccagatactccggatgcgctctcagcacctctgccagctcctgcctcccgaactcaccgctcaccacatagcttgggccgtccggatgggtcgaacactcccaggtctctgccagcgggtccatatcgatgttcttttcaaattcgtcattcaaacggctgccgacatggtgatgacatcgccggccttcacattctgctccatgccgtccacgacggtcttgccctcgcctgcaatgaccgtccagacctcgtcccggtgctggtggctatggtagttcatccggtggcctgcattcagggtcactttgatggtcatggattccttatcaatgtcaatgaccttgaagctgccccaggatttttccgcgaacataacccggtggtcgagcatgttgacgaagggcttgatgtagctggactgctccttatcggacaccagaatgccctccgggctggcagagaccaccacatccttcaggcccatgcagaggatgggaacgtccagttcattgaccacgtggacattctcgcacttctcattgagcattgcctcgcctacgacgtggccgtccattgcctctgtcagggtgttccaggtaccaaggtctttccaggtgcctgcaaagtgcatgacctcgatctccggctcatgctcgaccaccgcgtagtcaaagctgattttattgagggtgtcatacttattgaacaggtcatcataatccacgaagtcgatgagctcatgggcgcggttcagcacatagcccagcttgaaggcgaacacgccgccgttccagagagcgccctttgcaatgtaatcctttgccacttcctgcgtgggcttttccttgaacatggacaccttgctgacctgctccttgccgatggggatgatgtagccgtatttctcgctggggtaggtcggctcaatgcccatcaggaccagatttgcactgctgacagcggcacggtctcccagtgctttcagtgcctcaaagtagtcgttctccacataggggtctaccgggcagacgacaacggattcttcctcaccgacgccctgcacgtccttcagataggcggcagccagcgcaatagccggggaggtatcccggcggcaaggctccacactgatgcccacttcctcgcccagctgattgcggatggccgagacctgagacttggaggtcgcaatggtgaccgttgcatcggtatcgaccgtcttgatttgacgatatacgcgctggatcatagattccagctcaccgtcttctcggtggaagatcttgatgaactgtttggagcgaatatcgttggaaagcggccacagacgctggccggagccgccggacaataacaccagattcataactatactcctcttctaacaaaaaaggccgtggccctgcacggacacacgaccctttcaaatcgtttattttaacgttctgcacgcatcgggttgttcaggaagtcctcgtaggacaggcgtagaccgtcttccagctcggtcttgtaggtccagcccagattggtggccttggacacatccagcagcttgcggggcgtaccgttgggcttggtggtatcccacttgatctcgccggtgtagcccacgaccttggcgaccagctcggtcagctccttgatggtcagctccttgccggtactggcgttgaccgtctcgttgccggagtagttgttcatcaggaagacgcacaggtttgcaaggtcatccacatacaggaactcacgcagcggagaaccatcgccccagcaggtaacgctgggcaggccctgctccttggcctcgtggaaacggcggatgagcgccggcaccacatggctgtgggtgggatgatagttgtcgttggggccataaagattggtgggcatgacggagatatagtccgtgccatactggcggttcaggaactcgcagtacttcaggccgctgatcttagccagtgcataggcttcgttggtcttttccagttcgctggtcagcaggcagctctcctgcatgggctgaggagccatgcggggatagatgcaggaggagcccagaaattccagcttcttgcagccgtttttccatgcagaatggatggcgttcatctccagcgtcatgttgtcatacatgaagtcggccagagcctcctgatttgccacgatgccgccgaccttggcagctgccaggaacacatactccggcttctcctgcgcgaagaactcttccacagcatcctgacgggtcaggtccagctccttgtgagtgcgggtgatgatattggtgtagccctgacgctgcagctcacgaacgattgcagagcccaccatgccgcgatgacctgcaacataaatcttagcattcttttccatcataataagattgccttctttccaaattacagaactgccttgagtgccttttcgcgctttgcacgctcacggtcgtgcttggccataatctcgaccagctgctcgtaagtagtggactgcggattccagcccagaacggtcttggccttggtggggtcgccccacagattgtccacatcggtggggcggaaccactgaggattcacgcagaccagcatcttgccggtggcagcatcgtagcccttctcatcaatgccggtgccttcccagcggagggtgatgccattggcagcgaaagccttctcggtgaagtcacggaccgtgtgctgtacgccggtagcaatgacgaagtcgtccggtttttcctgctgcataatcagccacatgcactcgacataatccttagcgtagccccagtcacgcagggagtccatgttgcccagctccagatgatcctgcaggccctcggcaatgcggccggcagccagcgtgatcttgcgggtcacgaagttctcaccgcggcgctcagactcatggttgaacagaataccgttgacagcgaacatgccataagcatcgcggtactccttgaccatccagaagccatactgctttgcaactgcatacggagaatagggatggaacggagtggtctcacgctggggaacttcctcgaccttgccgtacagctcagaggtagaagcctgatacaccttgcaagtcttggtcaggccgcaaacacggacagcttccagcacacgcagaacgcccagtgcatccacatcgccggagtattcaggtgcgtcgaaggagacttgaacatggctctgtgcagccagattgtagatctcgtcgggcttgatctcgcctaccagacggatgagtccggaggaatcagacaggtcgccgtcatgcagatggatagcatttttctcgatcaggtggtcgatgcgagcggtattggaaatggaagcgcggcggacgatgccgtggacttcataccccttctccagcaggaactctgccagataggagccgtcctgacccgtgataccggtgatcagtgcttttttcataatttcgattctcatttaaaacgtgaagtttaaaacttatgttggttgattttgccgtacaaccatatttaaaaaggatatttgtcctttcagaagtgcataagcagtcagatattaacactatcttggcttcttcggtttgggatgaaatagaaagagccgcgcaggctcaaaacttgcgcagctcggaaagttttattgcatttttgtctttttcggagaggatatattcccgcataggccaaggctcggtctgccagataaaatcagaatcatagcgcactgctcttgccgcttcaccgcagaagtcattatccacgcaccactgcatcagagtgtcatcttccagtgtcaggtagccatgggcaaagccacgcggaattaacatctgcttctgattttcaaaggagaggatctcgccataagcatacccaaaggtgtctcccggtcgaagatcaacagccacattgaagatcgaaccatacaggcaggacaccagctttgcctgcgcgtgctctccctcttggaagtgtagtccgcgcagcgttccggctttcctgctgaagccttggtcgatctgaaccacacggaagtcgattgacttgtccaccggcacagaaagccagcctcggaagtcctcaaatcgttgtgtttcaattgtttccggcttatctaccattgctttctgtactcccttggactgctgccttccaccttgcggaacattcgactaaagtagttcgcatctgccataccgaccgcaacgcctatttcatccacagtcatgtccgtaaagcgaagcagttgcttcgctcttgtgatcctttttgatatgaggtagttgttgatcgttgttccataggtttccttgaagattttggatagatagaacttgttgataaagaacttctctgccaactcttccagcacaattttctctgtaaagtgttcgtccagatactccttcacagctgccagttccagccgtttccggctcacagtcatactctctggatgccaagactgttccatcagtaaggtgagtaaagtccctagcttctcattgattcgcatatctcgtatgtaatcggaagatgatgccaaatcgtagatatccgtcagaagtgtagtgaacggttcaatatccgccgggtggaacacaggtcggccgccacgctctttgtatttctcatacacggctggaaggaacggtgaatagaagtggcaccattgaagagaccaaagattatcggaagtcgaatgactgtatgctttccggcagtcgatgaacacacagtccccggctgatagctcataggtcattccttcataggtaaggcttccggtgcctgacagaacaacaaagcaaagaaatgaggtcaggtttgttctggtcgatgtatgctggtggatagcctgcaacgatccgacctcttgcagatgcagtaacgatgtccgggcaaacgcagacggtgtgtacaagattcgggaggagctcacggacgaagactgtgggttgaacaattcttggtccat

SEQ ID NO: 347 - DNA, 25693 bp, unidentified
  source 1..25693: mol_type = unassigned DNA
atgagcaatgctacaaaagaaactgtcattgttcttgatttcggcggtcagtacaatcagctgattgcaagaagagttcgtgagtgcaatgtgtattgcgaaattcttccttataccgttgatattcagaaaatcaaagacattaacccaaaaggcattatcttcacaggcggtcctaacagcgtttatgacgagtcatcaccgcattatactcctgaaatttttgaactcggaatcccgattctcggcatttgctacggttgtcagcttatggcatacacgctcggaggcaatgttgtttcggctacagacaattcatcaagtgagtacggcaagacagttacaagatataataacaatgatatactctttaaatccgtaaagagtgaaggaatttcatggatgagtcaccgtgactatatcaatgaagctcccaaaggattcagcattacagctacaacggatgtatgtcccgtagccgcaatgtcatgtcctgaaaaaaagttttacggtgttcagttccatcctgaagttaatcatacagataacggtaaagatatgctccgttcattcctttatgatgtttgcgaatgtaagggtgagtggaaaatggaaagttttatcgacacaactgttgcacagcttaaggagcagattggtgacaagggtgtagttctcggactttcgggcggtgtagattcatctgttgccgcagcacttctcagtaaggcagtcggtaaacaacttacctgcgttttcgtggatcagggacttatgagaaaagacgagggcgactttgtagagcagacctttacaaagctttttgatatgaactttgttcgcattaattgtcaggaagagttccttgcaaagcttaaaggtgttgaagaacccgaagaaaagcgccacatcatcggcacagaattttataaggtgttctggaacaaaatccgtgaaagctacggcgagggttactttgcacagggtacaatttatcccgaccgtatcgaaagcggtaaaggcgatgccgcaaaaatcaaaacacatcacaatcaggttggtatcccggaagatattgactttgcaggtgtaattgaaccgcttaaagaccttttcaaggatgaggtaagagtagtaggtgagaagcttggacttccgcatgacctcgtatggcgtcagccgttcccgggtccgggactcggtgtgcgagtaatcggagaagttacagccgaaaaggttcgtattcttcaggaagccgatgcaattcttcgtgatgaaatggataagtgcggttacgcagataaaatgagccagttcttcgcagtcctcccgggtgttaaaaccgtaggcgttatgggtgacgcaagaacatatgacgaactcatcgctctccgtgccgttacaaccgatgattttatgacagccgactgggcaaaaatcccctacgaaatcctaggcagagtctccaaccgcatcatcaacgaagttgaacatgtcaacagagtagtctatgatataacaagtaaaccccccggaacagtagagtgggaataatatcaagtgttattgtgcaacacccattatcctgtaatgtgtaaattttaatatccttgagcgaccttgaagagcaatcttttaggtcgttttttctatgcccaaaagtccagtgtttatcggacttttggcaataaaactatggttttattcggagtgtaaaaaaacagatatgagataacaaaaattaccccaaagagagtagagaaatttgcacaataacaagactaaaatgccgaaagcctgtatttatgcgggtttccggcatttatttaaacagttgcaggaggctttgctatacaaatatttatattttgatacctaaaccgtaggtgacttaaaaaacgccgctaatttctgcgccgtttttatcatatactgaacctccaatatgtacagcgtcttttgcaagacctgcatatccatgcataatgacagatacgctgttaaaggaaaaatctgtgaataaattttgtctgttaatgctgacagatttatgatacaatagtgctgttagtttgaattgaaaagtgggtagaagtataaagaatggggaaactgaattttacaaaagcacttaaaaacgcattaccgtattattaacgcttatacttgtcggtataatgacttttgttgcggaaatattgggtgagggggagataatctttcctgaaataacggcacttgcaattggttatatggttacacaaaagcaaggttggaaagtaaatgacagacgaatgattgcgttaattgcgatttgcgctgttgcgggtgtgctgacagtccgatacataaaagtcgggctttatcttgaaatattgattgcatttgtatttgcacaaattctctttatgctttcgggaacaacatttgcaccgatgatttcggcaattgtgttgcccgttatgatgcagaccgagagctttatatacccgattgccgcatttttgctgacaattgcggttgtattattccgtagatttcttttgaaagttaaaataagagataaagaggattttcagtcggtaaacctgcatgcaaagagcgatgtgattgacacagccgtaagaacaatctgtgttgccgttgtgggattcttcgcaatttggtcgggctttaaatttgcaattgcaccgccgttgcttgtggcgtttacggaattttcccgtccgaaaaataaggctcgcaacaagccggtaaagacggttttgctgataacagtctgtgcatttgtcggagcggtttcaagatatgtgctgaatatgactctcggattgccgttgacagttgccgtattaacagccacggcgataatgcttgtaattgtttactgcacaaaaatgtatattccgcctgccggagcattgacaattttgagtatgattattccgagtgaaagcgtacttttgtacccgttgcagatacttgtcggaactgcggtaataatgctgatttcacggcttttgtttatgaaacggcaaaattaaaataatcttaatttagttatattattctatagaggaaattaaatggatatatttattacaattttagttacattttttgcaggaatgggcgcaggtctcggaacaggttttgcaggaatgagtgcggcggctgtaataagtccgatgctcataacttttcttaatatggatccgtatatggcagtcggaatcgcactttcgtccgatgttctggcgagtgcagtttcggcttatacataccataaaaataaaaatctcgatgtcagaaacggtttgattatgatggcgagtgtgcttgcgtttacgattgttggcagttatgttgcaagcattgttccatcagctacaatgggcggattttccgtgtttatgacatttttgctcggcataaaatttatcatccgtcccgttatgacaactaaagaagctatgctcggtgtgtcggcaaaaaagagggcaatccagtctgtaatctgcggaatgttaatcggctttatctgcggatttataggtgcgggcggaggaatgatgatgcttttgattttgacgaccgtgctgaattatgaattgaaaaccgctgtcggcacaagcgtattcattatgacattcaccgccctgacaggcgcagcttcgcactttatgattggtggcacacccgattggtttgtgttcattctctgcatagcgttcacccttatatgggcgagaattgccgccgtctttgcaaacaaagctaagcccaaaaccctgaaccgtgcaacaggcattgtcctcgtggtgttaggtgttgttattatgggatttaagcttttagcaaaataaaaattgacagtttaaaattcaggtcggacaatagatttgtaaaatacaaaatttctgttgcccgatttttcaacggttatgttggggctaatcgagtagggcgaaacgagtgcacgctttgaacaatattcagggaagtatgcttttttaacaattgcattattatttcacaaaaaacaaaggagctgcgaagaacgaagtcttaaacttcatttcttcacagctccttaaattttcgtgtcagatgtgctgtactcagcttattcccataagctccataacttcaataagttgttttgcagcgttatcggaggtcacaaccttgctttctgttatgacacgaccgaccgatttgcctttatgaataaatcctgaaaccattttgtccatccgatgactgccgacaaggagtcggaaggcatatcttcaaagaacttttcaaaatccttcatcgctctgccctttccgacccataagatatctctctgctccaaatctatcacgcaggttgcgtaactcagttagggggcagactgcttttaaaactatagcttttgagtaggggtgcaaaatgaatttttagttattataattcattaacggaattatatccttccgacttaatctatcatttgtggagttataattataatttattatagcatacaatcgtttgataacgataataattataaacttttaggttttgcacatgagttgcgaacttttattggacaaggcagatagacacgcataggagaataataatcggtgcttttaggtttcatcagattcaaaataaatctaatgccgtaaatgcccattgcatatacaggtgcgttcaccgtagtgagcggagggtttgtatatcccgaaagctccgtgttatcgaatcccataacagaaatatcctcaggaattttgtaaccgttttcttgcagagctctcattgcaccgattgcaatatgatcacttgccgcaaaaatagctgtggggagattccctttgctgatcatttctgacatcattttataaccagatgatgttgaaaatttgtcctgtataataaacccatcatatttaatgtttagttcatcgcaaatgtctgtgaaagtgttgagtcgtttatcaggaaatatcgttccgtcctcaagctgttcaatgcctccgataaagccaactgttctatggcctaaatcatatagatatttaattgcatcggacactgcctgacgaaagtcgagcgatacggatgtgatttcaatattctcaacggtcatatcaagaaaaacaattttattattcaaagaatgcagtaattttatttcttgtttactaaactttccgaggcagattatgccatcaacatcagaaagtacattctgatagtcattgtctgttttaaatgttcgtacaatacttatattattttttgaacagtagtcctcgataccctgtctcatcaaaaagtaataattatcttcaatttcctgtttggaagagaaccattgtagaattccaatgcgacatgaaggtgctgatgtaaccctttttttctttacataattaagttctttagctgctgcaaatattttttgctttgtttcaagcgaggtgctgagggtagtgtcgttattaagcactcttgaaacagtagctactgatacatttgcctttttggcaacatctctgattgtagccaattgaatcacctcactaccattatagtgaaatattactaaaaaatcaagttgtgtttagtgaaaaacagagaaagcaaaaatgtttaccaaaaactattgacagtttacgaaacaaaacatataatttacttaacacaaaaacaaaagaaacattattattaaataataacgaaatcttttgtgcaggttgtcacggcgtttcatttaaaattaaaaggaggaataattatgaaacagacatcatcacaaccaagacttgatggcaaaatcccgggtagaatcaaatacacctttgctttaggtgccctcggcaaagatatgatttatggtatgattgccacattttcaatgatttatttcacagacatcatcaaggttaacccggtatttatcggcgtaatgttctttgttgcaaagttatgggatgcctttaatgatttgtttatgggtatgattgttgataacacacgcagcagatggggtaaatttattccatggcttgtaataggtactctggttaattcaattgtatttgttgttttattcacagacttccacctcgatggcgttggactttgcgtatttgcaacagcagcttacatactctggggtatgacttacacaattatggatattccttattggtcaattattcctaacctcacttcaaatcctgaggagagagaaaaagtttcggtacttccgagaatctttgcaagtatcggacagtcacttgttattgcaggctttggtgttcaaattattgaggctctcagcggcggcacaacaaatcaggcaggttatcacagatttgcaatcataattgcaattgtatttattcttacaatcggtattacagtaatcaatcttccgaaaaagagagatgattctgttccggaaaagaaagttaagtttaaagatattttttcaatcatcggcaagaatgatcaacttcgttgggcggtaactcttatcttcctttacaacatcggcattcagtgcattatgggtgttgctacatattatttcaaatatgtttgtggcaacgcaggaatgatgtcatcatttatgatcagcgcatcaatctcagaggttgtaggtcttatcgtatttcctaaggttacaaaatttctttcaagaaaaacttcgttccttcttgcgtgtcttttacctgcatttggtcttgtaatgcttttgttcgtaggtatttttgctccgcacaatgttgtgctcacatcaatctcaggtgttattgtaaaacttggtacaggtcttgaacttggttgtgcaacagtattccttgcagatgttgttgattacggtgaatttaagcttggaacaagaaatgaaggcgttgtattctcactccagacgcttatcgtaaaatttacagcagctcttacagcactcggtattggtgcggcacttggaagcacacagtatattccgggtcaggaacagtcatttgcaacagtagcatcaatcagtacacttatgtgcattgttcctgcggtttgtatgcttattgcttatgttgtttacagaaagaaatataaactcaatgacggtatgatgaagaaggttataaacacaatcagtgcaagaagagaaggcaagattgatatgacacaacagcttgatgaaatcggtaacacagagccttctatgttccttcctacagttgcggaaaaggcaggtaaataaaatgattgatactaaaacagcaattgaaaaaattacaaacggcgaatttgataatcttttcactgatatatatatagattcatcaatgattgattatcagaaaaaaagatatgttcatgcaattgagcagtatgaaacaattttttgccctgataaagtagcaatattcagtgctcctggcagaagtgaggtttgcggtaatcatacagatcaccagcacggaatggtgcttgcaacatcaattaatcttgatactattgctgtgtcggccaagaataacaatgatgttgtaagatttgtttctgacggttatgatatgattactctcgatataaatgaccttgaagttaataatgatgaggcaggcacaacggtcagcctcatcagaggtgttcttcgtggacttaaggatcatggatacaaaattggtggattcaatgcttatgcaacaagtgatgtacttgttggtgcaggactttcatcgtcagcagcttttgaggtagttgtcggaactattatttccggtttatataatgatatgaaaataaattcagttgagattgctcagatttctcagtatgctgaaaatgtatttttcaaaaagccgtgcggacttatggatcaaatggcttgttcagtcggaggaatggttaacattgactttaaagatccgacaaagccaattgttaagaaagtacctaccgaatttgaaaaatacgattacagtctttgtattgttgacacaaagggtgatcatgttgatcttacagatgattatgctatgattccatcggaaatgaaaaaggttgcaaattttctcggagaagattatctgagagattgtgattcaaacgaattttatattcgccttgacgaaattcgtgaggctgttggcgacagaccggtacttcgtgcaattcatttctttaatgaggagcataacgttaaaaatgccgtttcgtcacttgaaaacggtaagtttgttgaattccttgacgcaatcagaaaatccggtaattcatcgtttaagtatcttcagaatgtatatacaacaagagatattcaacatcagaacatctcggtagcccttgcactcagtgaaagccttcttcgcaattacggcgtgtgccgtgttcacggcggtggatttgcaggtacaattcaggcgtttgtcaaaaatgattttgtaagtaattacaaagaatttataaataaaattttcggagaaaactcatgccatgttctcaaagtgagaaaatacggcggaataaaagtaatgtaattatgtaggttttgtttttattaaggaggacaaaatgaaaattcttgttttaggcggtgccggatatatcggttcgcatacagtttacagacttattgaaagcggtaatgaggttgttgtattcgataaccttgaaacaggtcatatcgaggcggttcatcccaaagcaaaattttataaaggtgatctcagaaacagaagtgaaattgacagcgtttttgataaagaaaaaggtattgatgctgtaattcattttgcagccaattcacttgtcggtgaaagtatgaccaaccctctcaaatattatgataataacctcaacggcacaaaggttttgcttcagtcaatggttgctcacggaattgataagattgtattttcatcaacagcggcaacatacggtgagcctgagagaactcctattcttgaaaccgatccgacaaatccgacaaactgctacggagaaacaaaaaaatccatggagagaatgttctattgggttgaaaaagcacatggtttaagatatgtttctctcagatatttcaatgcatgcggagcacatatcagcggaaaaatcggtgaggcacataatcctgaaacccaccttattccgattattcttcaagcggcacagggtacccgtgaccacataagtatttttggtactgattatcccacatctgacggaacttgtattcgtgattatatccatgtcactgaccttgcacaggctcatattcttgcagttgaatatcttatgaagggcggtaaaagtgatatattcaatctcggcaacggtgtaggtttttctgttcgtgaggtaattgaaaaagcaaaagaggttacacagaaagatattaaggttgttgaagaaagcagaagaagcggcgatcctgctgtattgattgcatcaagcgataaggcgaaaactgtacttggctggaaacctgagtatgatgatctgggaacaattattaaaacagcgtggaaatggcattcaacacatcccaacggttatagtaagtgaggcggtatttatgaagaacagcgtttacggcttaatattaagacttgtttcatacggaatcaatacagggcttattgaaaaagaggatataatctacacgcaaaataggcttttatcgttgttccatatggatgaaccagatgacagttgtacttgccttacagcagataacgaggatactcttgaagaaattttgtcgggacttcttgattatgcatacgaaaaaggaatcattcccgaaaatacagtaacatatcgcgacttatttgatgtgaaacttatggcttcacttgttaagcgaccgtcagaagtaataagagaattttggcagaattatagctgttctcctaaacttgcaaccgatagctactataaattcagctgcgataccgattatataagaagatatcgtataaaaaaagacttaaagtggaaaacatcaaccgaatacggtgatattgatatcactgtaaatctttcaaagcctgaaaaagatccgaaagctattgcagcggcaaaacttcaaaaacagtcgggctatccgaaatgtttgctttgtaaggaaaatgaaggatatgccggaagagtaaatcatcctgcaagagataatcacagaattattccgctcaccattgacggagataactggtttatgcaatattctccgtatgtttattacaatgaacattgtattgtatttaacggtgagcatacaccaatggtaatcaatgattccacattcagaaaactgtttgattttatttcacagtttccgcattatataatcggttcgaatgctgatttgccgattgtaggcggttcaatacttacacatgaacattttcagggtggcagatacagctttgcacttaatagggcagaggttgaaagaaagtttattgttaacggctttaatgatgtggagtgcggaattgtaaagtggcctatgtcagttgtaagattgacaggtaaaaacaaggacagcattatttcattatcttctcatattctaaagagttggagagcgtacacggacgcagatgttggcatttttgccgaaacagacggtgaaattcacaacactatcactccgattgcttttacaaaggatggaaaatttgtaattgacctcgttctcagaaataatattacaagtgaagagcatcctctgggagtatttcatcctcatgcgaaattgcatcatattaaaaaagaaaatatcggccttattgaagttatgggacttgcagtattgccctcaaggcttaaagatgaaatggctattttaaaggatgctattcttaatcacaaggatgtaagtgaaattccgaaaatcagcaaacattccgagtgggtaaatgaatttgtttcgcagtatgatgaaatcaatgaaaataatattgattcaataattcaaaatgagataggaaaggtgtttcttaatgttcttttggatgcaggtgtattcaaaagaactcctgaaggacaaaaggcttttgataaatttataaagacgctgtagtaaaggaagtgctaaaatgtcaaaggtaagggtagtgaattttgaacctacatccaaaggtgaaaacactcatctttatataatagaaaataacagcggagcaagcgtgacattatgtgatttaggcgcaagtgtcgtttcgataaaagttcccgacaaaaacggtagtattagagatgtagttctcggttatgagcacattgacggttatgaatttgacggaacatacttcggtgctactgtcggaagatgttgcggaagaattgcttacggcaagtttactcttaacggagaagattatcagctacctgtaaacaatgggagtaaccatctacacggcggatttaacagctttagccgcaaagtgtggcttgcggtagttgatgataaagttccaaatacagttctatttatgcttgatagtcccgacggtgatgagggctatcccggaaatatgaaagtttttgtacgctacacttttgatgatgaaaatgtacttacgataaaatggtcggcagtttccgacaaagacacaatatgtaatctgaccaatcattcatatttcaatcttaacggacataaaagcggtaaagttacagaaaatcacaagctgaaaataaatgcaaattccttcataccgataaattcaaacctcaatcccacaggagagataactcccgttaagaatacatcgtttgattttaccgaacccaagttaattggaaatggtattgacagaaaaaacgagcagattggttttgcaaacggtattgatcatatgtttgtgctgaatcattctgatgaagaatttgtgcttgcggccgaagctgagggtattgatagcggaatcacattaaaatgctatacttctcagaaaggtgttcatgtatatacagcaaattatgtcgatgttttgtccaatatgggaaaggattcagcaacatacggagaaaacccagcgttttgtcttgaaacccaaggctttcccgatgctgtaaatcacaagaattttcctacgacaatattaaaagcaaacgaaaactatacacaaactacgaagtatatttttggtataaacaaataaaataagctgatttctaactcctttaaaaataaaatctctctaaaatcaaggaccgcctattttttcttgggtggtccttgatttttaaatctatgaggatgtttcatgttttacagtattacaccgtcttaaacatattctgttttagcggttatgtgcaattctgcctgaaaatcaccctgttctgtttgcaccgtaaaaccggaacattcctcttgcacggctgtttttacaaactgcatttttcaaatgcaaaaataaaattattgattctgtattgtctaaaaatcctttgttgtatactgataaggcagataagaaaaatcacggcaagggaatttctatagtaaaaagtattgcccagaagtatgggggagatgtagttatttcggagaagaataatgaatttatagtttcggtaattttagacaaccgaatttttacctaaaaacccactatttttacctgattaaaatcaaatattctaaaaaatgctattcttctttaaggcgttatgccaagaaaaaggatagcatttttgttttgtattgaattttatgttttagccgtatttgcgttaattccgttattatactttggccttgtgttgcaggaatttgaaacttttattatcaaaaaatttaaataaggtttaaagctaataaggtttgaagctgcttccgtaaataagaattatagagtacaatttttgtcgatttttttacattttttgcacaattgaagtttacagtgctgttttgagatatgatttaacaaagtaaaagggaaaagcaagccgtaatatttaatataaatcaaaaattaaggagagttgaattttgaaaaaggatagaaatttgcgtagcgttaatactgacggaggggtgaatttgcaattcaaacttttgtcggcaatcggaattataattatcgtgtccggacattgttatcatggcggaatggaacttgcttataactggtttccgccgtattcgtataatttggcactgtttgtatttatatcgggatatttttacaaaaccgattatgaagaaaatgtcggaaaatacatatggaaacgaacaaagcggcttcttattcctgcgtatctgtggaatatattttacggtggtatggttgcatttctcggtttgtttggatttactataggtgcaaagcctgatttatacaatctttttgttatgccgtttgttgacggtgaggcttttcaatataacctcggttcatggtttgtgtacccgctgtttttggtttgcataataaatgtgctgttcagaaaatttttgaaactgattcaccttgacaatgaatttatagttttgatagtgtatctcgcaatcggaatgataggaattaacactgcaatagaaaatccgactgcaattaacggtatagtgaaacttcttgtcagaacaatgttttttctgccgtgttatgaattcggtcgcttttataaagctgtgcttgaaaagaaagacactctcaataatgttgcgtactttgcaattatatttgctgtacagctgatacttttaactttttgcaaagatttggagtacactccgtcgtcatttactaaattcaacaacggttttataattccgtatatctcgtcaatcacagcaattgcattttggctgagagtttcaagattacttgtacctgccataggaaacagcaaacttgtaaggcttatagctgacaacacatacggaattatggtaaatcagcttgtaggctttatgtgcctaaaatttgtattctacggattaagccggattacttcaggctcattgtttggtgactttaatgttgaatcatttaaatcaagtatatggtactactatcttccaaacggtttgcaacagtgggcttttgtatatcttatatttggtctgtttgtaccgatattaattagcattattttaaataaaatctgtcatattgcacacagttctatttttaaaaaagtatagttattttgagaataacggggatgcagattaatgagaaaataatttcaatatttttattaaattgtaaattcataatgaaatacagatacaaaaatcttccataggtaagcccacccataagtcactgaaattgtaccaaaacaatagatattatgttgtatttgctttttgtttgtgatacaatttaaagcgaaaatagcaacagccttaatgatgttgcaagaatgatcgacctttcgggtacagaagttgcgagctatgtctatgacgcttggggaaatataaaagacacccgaggcgagccgacaattcgtgaattaaatccgattcgctatcgtagctatgtttatgataccgaaacttcactctattatctccaatcccgttattatgatccttttgtaggaagatttttgaatgcggacgcttattgtgatacaatgtcaagttctcctttaagcaccaatatgttcgcttattgtgagaatgattctattaattacgctgactatgatggatttaggataactgtaaatgtaaagcgaaccaataacagctatgatttaaaagtcaaattaccatggagtgacatttccaattattttaattatcttagtatagcttatggaatagttggacttgttgcatgtttcattcctgaacccgcagtttctaaggctttaggtattgctgcaggaataacttcattggtttcagctattgcatcaacattgatttctaattacaaaaaaataaaagtataaattttaaaatgtcatttaattatcagaaagttaaaaagactgcgtatttctatattattaatacatggtggttaaaagtaagaataagattcacagccaagtcaatacgaatatacaacttgaaatggagtgttacacattgaagcctatgtcaatatttttagaaattttgtttttatttggcttaataatatatatagtatatgtttttgtaattaaaaaagactactctgtatcaaggattattatctttgcaatcttattgttgtcttttgtaattaatgtaattaatatgttatacttgttttttcaataacatttttgcaagattttattcaaaataattttaaaaaatttaataaaaaactacctaacggtggtggtcggcaaggtcctggtggatggaagatagcaataaatgttgcgaaacatgccggtagtgatttgaaattattggataaaacgggcaaaagaatagccaccttatgggaagatggtagtgtaaggggaaaataagatgaatacatcagaaatattaaaagaaatgaatattaccttttatgatgaaaaagatagtttatttgatttctttttaaaacataagggaactaaagtattggatatatttccaaaaacaataaatgacaatgaaaaatattgaacagttgaggtgttttatcaaaaagttttagatcattgtatgaaaaagcaggagtttgaaaacatagaaaatcgtttttcatattttgttaagattttatggctttataatgaaacctatgttaatattctttctcctgaaatttttaataattattattataaacgcaacaagaagattttaaaaaagaatagtatagtgaacttaaagtctattgccggtactgatgaatttttgttgatcaaagataaagatgttttaggttcagcctgtattattgcaactcgtgatatttctccggttgttttttatttcagaaattctaaaatcctgtttttattaaatggatgcacaggactactttattatggctttccaaaagatatcttatttaccaaacgagtggcaaataattgctcattgtatttgcataaagcagaggcaaataaatagaagaatagcaatacttaattaattgaaaaactattattatttctattaataaggtaaacatttttgcaactttcaataaggttgggtagaacatttgcgttaaggaggctcgaaagagtttccttactggttgatggaattgaatggaacggaaaaacaggaagagaacatataaaatcttggtattaaaaggtagcatagatgattatgaatattgatattaaaacatatagctatagcaaaattaaaacatttgtgaatctcagatatttatcaatgcgaatttctgacttaatatttaaaatgttaagctattttgcatacaactttttaatggtattaattataacctttcagatatttatgatgcaagttaacccatttgaaggtttctcggtttttgatgatcgtgtagtaccatttcttattactgcaggaattttgtcttgcattgtgtcaattgtaaccgtatttatctatcactataaaactaaatggagtgtgatactaaacaggggagtgacattcttttatgtttcaattaccatgcttttactttcatgttttattgagtttaagattacggcatttaatgtgatatatgttatatttaagattgcaatatatgttctttgttattttatatatgtaaagtatttgtttgagaaaaagttgccaaaaattgaggagatagttcacaatggaagatcgtttcctgcaggaatgatagcagttgctcttaccatcgctataaaacctgttataagcctcttaggtcaaaatggtgttataagttttgtgatatttaatgatttgattgcactaactgaatatattggtgctgtctgcttaatcattaatataatagacgctttagttaaggcatattatgcaaaaatatataacatcaattaacttactaagacactttttacaataaggtagggtagaacatttgcggtaaggaggctcgaaagagcctccttttttttgcctaaaattcctgtaaacccattttcgtgttgcaagaatgactgatgaggacggtagaatagagagggggagagatgttgaaaatataataaaaacttaggtgcaaatacacttaagtttcaagtaagtgcttgatattttgcaaaaatggtggtatactatacttgaaagtcaggggaaaatacccgtaagttttaagtgagtggaggactacaatgcagaacattattaagcgtgacgaatatcttaacagaattattgacagaaaagaaaacggactgattaaggtaattaccggaatcagaagatgcggtaagagttttctgctgttcaatctgttttacgattatctgattgaaagcggtgtaaaagaagaacagatcattacgattgccttggatgatgatacctttgtaaagtaccgtgatcccgatgaattgtcgaaatatattcgtgggaaaatcgtgaactcagatatgtactatattctcattgatgaggtgcagtacgcaatcacaaaggatgaacttaaaaaccctgagaacattaagctttacaatgtactcaacggtcttatgcggcttcgcaatgttgacatttatgtaacaggcagtaattcaaaaatgctcacgaaagatgtactgactgcctttcgtggcagaggtgatgaggttagagtttatcctatctctttcaaagagtattattcttttgtgggcggagataaatccgacgcctatgaggaatacgctttatatggcggtatgccgcttgttttaacaaaaaagagcgatgcggagaagatgaactatttgcacactcttttcacagaggtttatttcaaagacattgtggagcgttatgatattgagttgcctgatgtgctcagcgaattaacggatgacctttgttcttctgtgggttcgcttaccaatgcaagcaaaatatcaaataccttgcagacggtgaaaaatattaaggtttcaggtacaaccgtttccaactatctgaattatctaattgaatcgtttctgttcatcaatgcgaaacgatacgatgtaaaaggcaagaagtattttgaatatccatcaaagtattattgtgccgacatcggacttcgcaacgcaagacttaatttcaggcagcaggaagaaacgcacataatggagaatattatatacaatgaacttctgtgtcgagagtattccgttgatgtcggtgttgtagaaatcgtggaaacgagtgtaggaaagaggtcaaaaaaacagtgcgagatagattttgtagtaaacaagggttctaaaaaatactatattcaatccgcactaaatgtttcggacccgtcaaaacttgaaaccgaactcagacctttgaagaatacaaaggatttctttaaaaagattattatcagcaaaacttcaatgaagtcttggacggacgaggacggaatacttcatcttggactttatgagttcttgctgaatgtaaattccctcgaattgtaaactaaataggctcaatgtcaatagttacggaaagccgaaaaataagaatgtatgaaatttataagcaacagaaattgtaaaagagcaagtgatacacaactaagaacaaggcacagcttacggaaaaatccgttcagctgtgcctttgattgtgtttgtgaagttgtaatgctgtttttattacggctttgacaagaaaagtgtgcaagctattttttaacttacacactttattttacaagctcactgcaaaacttttaaatttgcaatttctttccgattcttaattccatcaattagatctcatcttgctgatatcagtattattaggtattggaatttctcattatataatgcatttcattagtcaaggaattatatgattcgattactgcgttatctccgaatttcaaacacaatgtttgaggtgaaggtcatatcatcctcattgaatttcatatttatttcaccgtcatattttttaactactcttttaatgcttttcagtcccgttccatgtattgcgtcagatttttttgatgatgctatgcggttgttcttgacggctacaatattcttgaccgaatttgtaagctgtattgacagatacttatttttgcggacgaaagccgaaaaatctataaatccgttctttgtattttgtgccgcttcaactgcgttttcaagaagattgtcaagcagagcagttatgtcgggttcgctcataaagctaaaatcagcacttctgatgtcaatattcatcttcactccgaacttgtcacagaaggatttgtacctgttaacgattgaattgaccataggattgttgcagtaatcaacagatctatttatgctgaagtcttcaataaaatcgtctatgtactctgtaacagccttgtctttggcaatgctcttaatggcgtttaaatgccgttttatgtcgtgcataacaatttttgagttttcattttgctcattaagtaaatcataatactcagctgtagatttttccttttgcctttcatattccaatttcatattgtgtctttgagttttcaaagtaaattcatatacccaaaaaaccgctatatttgagaaaagtaatagcaccatacttattattaataaatatatgtatttttgttctaaatcaaaattgtgtagcgcatgtgatactgcatacagtagcagaatacttgaggcaggtaaaaccaagagaggtatagaaagagaataactttctgatttatgttcttttattgagaattttgatacaaagtaaattatcaaaaaatataacagtttactgatagtcgcttgaataatgagacttaaagaattatccatggaagtgaaaaaatccgtaccgaataatactgttgaaacaaacaagacaatactttctgtgattgccataaatataagtaatatgctacagtggaaaatacaggatttaatacttatgaaataacaaaaataaagtaaaaagaagttacacgcaaaaaatgcaattaaattaaccaatgttaaattcaataatcgagataaatacaataatacatacacaataacaactgaaaataacaaaaattttttgcttgattttctttcaaatttgttttcaaaataaaacagtgatatcagaatttctgcaagaaaaacaaacgcatagcaaattgtatataccatttttatacccctatgtatgcaaaatatgcctttttaaagtttgaatagttcctttgagatataggtagagtttcactttttaaatctacattaatattaagctcagtcttattaaaatccgagacatacctcagattaacaagataactgtaatgtggttgtgcaaaataatcgtaatcctttagtttttctttccaataacttaattttttatttgtataatacttcttctgacatgttataataacagcctttctttcttcaatagttatatatactatatcacttgtgaaaacagagtaacactcgtcataatattcaagagttattatttgagtattggaatgaaaataattaatagccgtatttagcgctctgaaaaaacggttattgtcaataggctttgacagatagcgaaacacatccaaatccatagcgtcatcaagataagcgtcatgcgaggttataataaaaataattatattagagtttaccttttttaattgtgcggacaaagtcagaccatttaccagaggcatttcaatatcaatgaacgccatatcataactgatattactattcagcagctctacaccattgtaaaacaaatcaatatcaaaaactattctatgtttatctgaaaatgtattcagattgttttttatttcatcgacaatacatttatcatcgtcacaaattaatactttcaaaagaaaaacctccttgaaataatgtatcaattataacatatatttcaaagaatgtcataaaatatcatttattaaatgtaaaattttaaattttgtatcaatgcatcaataatttaaaaacacatcactttggacgaattcgacatcgtttttgcagaaattatgtttaatttttaaatatgtgctaaaatttctacaaaaggaggagcattattatgaagaaaataaaaaaccttattcgcaaaatttcacctgcaattatcgcttgctttacattagcactctcaataaatgctaattcatctacttgtttttttatgtatcagcctaaggtacctgcaaagcttgacaaatttaaaaagataaagtaatggaaaaattcagctcaaaatttgtggagttttttgtatccaacaatcttataaaaaacgaagataaagagatttacgaatatgcttttaatattattttatcatcgttaatacatattgcaaccgttatgataataggtttatgctttaatttatttattgaaagtttagcattctatttttcttttatcgctatccgtaagtttgcgggcggctatcatgctaaaactgccacaagatgttatttgttttcatcgttaataaacattatagttctatttttaataaaactattttgttatgtgagtatatactttttgatgatactaatcgttattgaaatactatgtgtaattctgatttcgcatatagcaccacttgattctgataataatttactaaacggtaaggaaaagaaattctatggtaaaatatcatgttctatatctaccgctttactttgtatttctatagttacaattaatttgaattatataaaaataggtatttcaattatgtttggagtttttatgagtgctgcagtcttattagctaaatatgttcagaatgtttttcatagataataaagatgatgaacatgtatttcaatatcagaaggttaacctaagttttacagaaaagagttgagtccaatggaattaatttgtttaaaaaatcaaaattgtaatcaaaaacaaaaaggagtatatgaaatgaaatctaaaatgaaaaaaacagtagcaattatcgcaactgttgcggcagttttgtcatttgcagctataactgtaagtgcaaaaacatacacttggacgcatactgtgtctgttgcaagcatacctggttctaccgatagtataacagcttcgatgggtggaaaaggaagaatgtctgatacattttcaagttacccaactatctttgatggttacaaagtatccaataacaaagcaagagccgtcaatgatagtaccggtgttagttatggatggaaatcttttaccttaaatagtaatggtggacctgttacggtaacatatggttcgtctcttgttaagggatcttattatgtacagtatcaaaatgtgagtaaaggtggctttagatcttcatctgttttttcaaaaacctattaaagaactaatcaagtatgctgtggtagtattgccacagcataccgttattaaggcattgtggtggaatagatggaactttttaaactaagttttttatcgaaagcatatattaaaggaaataaaaactgcaagacaattaaaatcgtaacttgtatattatttgtggcgattactgtaatatcaagctttgcaacagtgactgtaaacgctatgaaggagagcaaagaagattacaaatcaagagcactttttctttctccgtggataaagccgcttacagatgatattatcaaaaaaatgtcatcaatagaacacattgaatatattgatgattgcacagctttatacggtataaattcctatgacatagctgacacggatgacaacgattttaaatcggaatttataaatcataaattcacttccgtggatattgccggactgtatgagcacgaagaaaagagcgtaattgcaggggaaagccttgactctgcgccgatatacagttgtattgttccaagcatattttatccatttgaggataatgatggcaatatgcattacaacaatcttgattacatagatggtacaaaactcataggcaagaccattacggtcaaaggttgtgaagataaaatatgtgtttcttataatatagctgatgaaaacaatcaaatttcaggcactgaggcttatctgtcatcacctgaatttaaacttaatattgttggaacatattattgttctcgtgccaattcaggctcgttcagaaatatatttgtttcaagagatacaatatttgctataacgaaggatgcttttaaaaagtcaaaaatagatattaatgacaacgacaacgatatagcaaaatggtggaacaccccctctttacacagctatatggtggttgcagatgattatgacaacatttccacagtgtttaaagaagtgtcgggaatgggatgtgatatagccaattctccggaatggttgatgagtgacagcacaatattacttgcaaatttgttcggtaagattggtatgttttttatagttgctatttttgttattgctgtaatcataatgatacagtcagctgttacagaaacaaagagaagaaaagaatttatcggtcttttaaaagctatgggatataaaaacaaacagatttttgcctgcctaagtcttgaacaattttatataatcttaacttcatttgtgattggaaatgtaatctctactgctattgtagcaactacaaattatatctttatgcatggctcatatgcacagatggtttatgtaattgattggaatatattttttgtatttatggctattgctttggtaatatcgattttgataccaattatttgtttggtagtaatgttgtgtatgcttaataaaattcagcctagagaagcaatgaactgaaagaggtgacattatgagagctattgaacttaaaaatgtatcaaagatttataaaaacggtgttaaagctcttgccggtgtatctcttacagttaaacaaggtgaatttattgcagttatgggacaatcaggcagtggcaaaagtaccttgctgcaaatagcaggactgcttgatgattgcacatcgggacaaataattataaatggaaatgatgtgtcaagacttaacaaaaatgtgcttgccgatataagaatgaaatccttgggttttgtgtttcagtcatttcatctcgatacacatctcaaggcatatgaaaacattatggtaccaatgctgataaatgctgaatacaaaaataaatctgcaatgaaggaaagagcaatacagcttgccgaaactgtgggtttgacaaaccgtatcgaacattatccgggtgagctttcaggcggtgagcagcagagggtggctatagccagagctttagctaataatcctgattttattcttgcagatgagcctacgggtaatcttgacagcaaaaatgaaattatcatatttgaggaacttaaacggctttcaatatcaggcaagggagtgcttgttgtgagtcacaacgatgctgttaaagattatgcggacagagtattaactatgaaggacggaatattggagcatacagatgaaaaataagaacctcaatatgcctttaaaaacatccatattttcaaatagtttttatttgtgatttactgtacttttgctgtgatttcaactgttcttattctcgttaccataagcattatattacctttaagttcgaacacaagcggtaagatcggcaaccatgtttcaaatagaaaagcaattattgaaaaagtaaaagaggaaaccgtaactacggtacttgtgaatgaaaactggttttcggattataagactgaaattaacggcgaaaatatttcgtccaataacatagataacagagataaggttgcaataatcggaagttctcttgctctcaaactgttttttacaacagatgcagtcggtaaaaagatttgcattgacggaaatcaatatacaatttgcggtgtgatatgcgaaaacgaaagtttaataaataagttttctgctgatgacaaacagagagtgtatgttccatatacaacatccgaaaattatggtgacagaacggttgatatgattgtttacgataactcggtatatacgggagcaattgttgagcaaatggatttgccgcagtattattcggttaatctgaatgggaaaaatcaaacgctctcgtcatttgaacatattatataccttgcaatatttatcggatttagcattattgcattgaagttgtggtataggttcagtagaaaattttttgaggagataaaagaaaatctcaaattaaactactttctgaaatcgctaaaaagtattccgctaaaatatgttgcacttgtgcttgtttttgcaggaatacctgccgtgcttttgattgtatttaatatttgtgatttcagcatttttatcccctcaaaatatataccgaatgataacattttcgacatttcaaattacctgaatgtgcttgtcgataatgcacaaacactaaactcacaaagcctaacaggaaatcaaatgcttgtaaatctgttctcaagaacatttacagcgtcactgtggctgacaataatatttttgattagtattataaccgtgcttttaaatttgacagaattaaaacttcataaacataaaaacaccgacaagcagtaa

SEQ ID NO: 348 - DNA, 79258 bp, unidentified
  source 1..79258: mol_type = unassigned DNA
  misc_difference 47627: note = a, c, g, or t
  misc_difference 47628: note = a, c, g, or t
  misc_difference 47629: note = a, c, g, or t
  misc_difference 47630: note = a, c, g, or t
  misc_difference 47631: note = a, c, g, or t
  misc_difference 47632: note = a, c, g, or t
  misc_difference 47633: note = a, c, g, or t
  misc_difference 47634: note = a, c, g, or t
  misc_difference 47635: note = a, c, g, or t
  misc_difference 47636: note = a, c, g, or t
  misc_difference 47637: note = a, c, g, or t
  misc_difference 47638: note = a, c, g, or t
  misc_difference 47639: note = a, c, g, or t
  misc_difference 47640: note = a, c, g, or t
  misc_difference 47641: note = a, c, g, or t
  misc_difference 47642: note = a, c, g, or t
  misc_difference 47643: note = a, c, g, or t
  misc_difference 47644: note = a, c, g, or t
  misc_difference 47645: note = a, c, g, or t
  misc_difference 47646: note = a, c, g, or t
  misc_difference 47647: note = a, c, g, or t
  misc_difference 47648: note = a, c, g, or t
  misc_difference 47649: note = a, c, g, or t
  misc_difference 47650: note = a, c, g, or t
  misc_difference 47651: note = a, c, g, or t
  misc_difference 47652: note = a, c, g, or t
  misc_difference 47653: note = a, c, g, or t
  misc_difference 47654: note = a, c, g, or t
  misc_difference 47655: note = a, c, g, or t
  misc_difference 47656: note = a, c, g, or t
  misc_difference 47657: note = a, c, g, or t
  misc_difference 47658: note = a, c, g, or t
  misc_difference 47659: note = a, c, g, or t
  misc_difference 47660: note = a, c, g, or t
  misc_difference 47661: note = a, c, g, or t
  misc_difference 47662: note = a, c, g, or t
  misc_difference 47663: note = a, c, g, or t
  misc_difference 47664: note = a, c, g, or t
  misc_difference 47665: note = a, c, g, or t
  misc_difference 47666: note = a, c, g, or t
  misc_difference 47667: note = a, c, g, or t
  misc_difference 47668: note = a, c, g, or t
  misc_difference 47669: note = a, c, g, or t
  misc_difference 47670: note = a, c, g, or t
  misc_difference 47671: note = a, c, g, or t
  misc_difference 47672: note = a, c, g, or t
  misc_difference 47673: note = a, c, g, or t
  misc_difference 47674: note = a, c, g, or t
  misc_difference 47675: note = a, c, g, or t
  misc_difference 47676: note = a, c, g, or t
  misc_difference 47677: note = a, c, g, or t
  misc_difference 47678: note = a, c, g, or t
  misc_difference 47679: note = a, c, g, or t
  misc_difference 47680: note = a, c, g, or t
  misc_difference 47681: note = a, c, g, or t
  misc_difference 47682: note = a, c, g, or t
  misc_difference 47683: note = a, c, g, or t
  misc_difference 47684: note = a, c, g, or t
  misc_difference 47685: note = a, c, g, or t
  misc_difference 47686: note = a, c, g, or t
  misc_difference 47687: note = a, c, g, or t
  misc_difference 47688: note = a, c, g, or t
  misc_difference 47689: note = a, c, g, or t
  misc_difference 47690: note = a, c, g, or t
  misc_difference 47691: note = a, c, g, or t
  misc_difference 47692: note = a, c, g, or t
  misc_difference 47693: note = a, c, g, or t
  misc_difference 47694: note = a, c, g, or t
  misc_difference 47695: note = a, c, g, or t
  misc_difference 47696: note = a, c, g, or t
  misc_difference 47697: note = a, c, g, or t
  misc_difference 47698: note = a, c, g, or t
  misc_difference 47699: note = a, c, g, or t
  misc_difference 47700: note = a, c, g, or t
  misc_difference 47701: note = a, c, g, or t
  misc_difference 47702: note = a, c, g, or t
  misc_difference 47703: note = a, c, g, or t
  misc_difference 47704: note = a, c, g, or t
  misc_difference 47705: note = a, c, g, or t
  misc_difference 47706: note = a, c, g, or t
  misc_difference 47707: note = a, c, g, or t
  misc_difference 47708: note = a, c, g, or t
  misc_difference 47709: note = a, c, g, or t
  misc_difference 47710: note = a, c, g, or t
  misc_difference 47711: note = a, c, g, or t
  misc_difference 47712: note = a, c, g, or t
  misc_difference 47713: note = a, c, g, or t
  misc_difference 47714: note = a, c, g, or t
  misc_difference 47715: note = a, c, g, or t
  misc_difference 47716: note = a, c, g, or t
  misc_difference 47717: note = a, c, g, or t
  misc_difference 47718: note = a, c, g, or t
  misc_difference 47719: note = a, c, g, or t
  misc_difference 47720: note = a, c, g, or t
  misc_difference 47721: note = a, c, g, or t
  misc_difference 47722: note = a, c, g, or t
  misc_difference 47723: note = a, c, g, or t
  misc_difference 47724: note = a, c, g, or t
  misc_difference 47725: note = a, c, g, or t
  misc_difference 47726: note = a, c, g, or t
ataagtaaactccatatttgtctggctctcaagcaccttaagatatgcacggcactccttctttgcctcgtcaagtgacagattctcgtaatgtccgcactctatggctgatgcaccaaacaccggtccatcatactctaatatctgttttaagacctcttttgtgatttcaaaaacctttcccggctcgacatccctcactacgaggtagaagcctgtctgacagcccatcggtccaaaatataccacatcatctgcaatctcagagtttctcacacatgttgcaaacatatgctccactgagtgcatagctgaattggacatataatcgcctgcattaggttttcttgtacgaaggtcgtatgtaacgatttctccatcttttcttgaaatataaaatccaggtttaagaatattatgattgattgtaaagcttttaattctttccataaaaatgtttctccttacttagttgctgcctcaaactgcttcagataatcctcaaatacattgagtgcatcatccacaggctttggtgtgctcatatcgacaccggcactctttagcagctcgattggattcttcgagcatccaccgcacaggaaatttcctatatacttatccacagcaggctttccctcctcaagtatcttttttgaaaaagcaactgctgccgaatagcccgtcgagtactgatatacatagtacggtgtgtaaaaatgcggtatgcgcatccactcatatgatatctcatcatccacgcgcatatccggtccgtagtactgcacattcagctcatgccacagttcatttagcacatccttggtaaccggctcgcccttttgcattttccggtgagctatatgctcaaactctgcaaactgcgcctgcctgaaaagtgtcgtcctgaagccgtccagaaaatgtgtcatgagatattttttctcattctcatcctcacaatgctcaagcatatagtgcattagaagcgactcattgcaggtggatgcaacttctgccacgaaaatcaggtatcccgcgtaggtgatgctctgatgctcatttgaatagtatgtatgcatcgcatgtcccatctcatgagccagcgtaaatacactgtccagattgtcggcatagttcaaaagcacatacggatgtgtgccataagcgccccatgaatacgcaccgcttctcttgttctcattctcatatacatctatccagccactctccatgccagccttaagtgtgctgacatactcatagcccataggctcaagcgcctttgccacaagctttttcgcctcatcataggtgtaagtggtctgtacattgtccacaatcggtgcaaacaaatcatacatatgcagatgctccacacctaaaagcttcttcctaagcgccatgtacctgtgcagagccggtagatgtgcgtgaaccgtctcaatcagattgtcatagacactctcaggaatatcgccatcggataaatacatggcccttgcgctgtcatattttcttacccttgcataaaaagtgtcatttttcagcttgctgatgtacatcatggaaacagtattgctccacttcttgtacgaatcatacactccgcggaacacctgcttgcgcaggcttctgtccttgctacttaaaaaatctatgaaattgccatgcgtgatacggattttatttccctcgacatcagtgatatacgggaatttgatatccgcgttgttgaacatgctgaatatattctccggcgctgcagccatctcaccgcactgcgccaggatattctcctctgcagccgataaggtatgcgctttctggcgcattatctcatcaatcgcacgcttatagtgcacaagctcattgctctcactgtaaaagctctcaagccttttatcatctatctgcaaaatctccggactcgcaaatgccagcgcacctgatgcctgaacagtcagtgtctcagcctttgacacatatgcctgatatttcgacactgcagtgtcctgatgcgagcgttcattcgcataaaccactatacgctccaaataataagacagctcatcctgcttcttaaaaaaatcaagcagcgttgctgcactgtctgccagatgtcccttaagtccggatagcttttctgcaagctgtgacgctttttcgcactcagcctcccacagctcatctgtctcatacatatcctcaagcttccatttgtactcgtctgagatttcatctctcttttgaagccttttctcactcattttgtgttaccttctatcttattctttttatttagaatcccacacatctgctctgcaaaatgcatatagacgtgtgggatatatgtgaattataacaattaagctctactttgtaattaaagtgcccataccacctgaaactgtcttgccctctttgttgagctttgtgataagcaccgaacggatggcagagtcaccgataaagtcgatagccgcctcaatctttggagccatggtaccctcatcaaactcgcctgctgcaaggtacttctttgcctcatcaacagtcatggtatcaagcggcttctcatcatccttgccatagttcaggcagaccttgtcaacgcttgtaagtataacaagtctgtcagcatcaagagtatctgcaagctttcctgctgcaagatccttctcgataacagcactggcgccctgaagcttattatcctgtgctaaaacaggaattccgccgccaccgcatgcgataacaacctgatccgcatcaacaagagccttaatagcatccttttccactatatcaacaggctttggagctgccacaactcttctgtagcctccctcaacctgtgtcacatgattgccctttttctcctcttcctcagcctcagcctctgtcataacacggccgatgatctttgtcggatgataaaaagcctcatcatatgggtcaacaaccacctgtgtaagtattgttgaaacggtcttgtaaattcctctgccaagaagctctgtacggatagcattctgtaaatcatatcctatatagccctggctcattgcagagcagactgctgtaggtgtagctgtatactcaggataaatcctgcaaaactcagacatagcggtgtgaatcatgcccacctgcggtccgttgctgtgtgtgataacaacctcataatcgtccctgataaaatctgcaactgcctttgctgtatgctttgtagcctcgtgctgctccggaagagttgttccaagagcatcatgtccgagtgcaataactatttttttcttcttcatgccgacctcctatgctgcatccgctcaatgtgtattatatctcataatcataaaccgatgtgtatactattataaatctacatataaaccatcaattttaaagaattcctatgcggtgcaaaaagtaaaattatttatatacattatctaatattttagggaatttgtctagtactttgaactgatttgaacaacatttccaccatagcgtaagcccctggcacctgtgacgcacacgtactcttgcaggagcgaatagcgaagtggcttagatactgtagaaattatgcccatgaaacgcagaaacacccctgcatggacgcaggggtgaggagaaaacgcgcaggaattactgctgaatatcctttgcagagcttaaggttacttcaaccttgctctcttcgtactgtctgccactctgacgggcaacagtaagagtaaccttatctccggccttgtagctctttaacgctgactgcagctctgtcatagaagaaatctttgtgctgtcaacagcagtgatgatatctccctcctgtaagccggcatttgcggcacctgaaccagctgaaacagatgaaacatacacaccctgtgggaagccataggctaccatctcagatgaaacatcgccacccttgataccaaggtatgcctgattctcattagtatattttccatcctggataaggctctcaataataggctttgcaaccgacataggaattgcatatccgataccctcaacctcagttgaagaatattttacagagtttataccgataacctcgccattttcatttaagagtgctccaccactgtttccagggtttatggctgcatctgtctggataagcttgttgttggtaacagtctcacctgtctgtgaatcctgtgtagtaacagttctgttaagtgcacttactatacctgttgtgacagactgtccgtatccaagtgcattaccgatagcaattgcaggacttccaacagctacactatcagaatctccgattgtagcaatcttgatatttgagtaagtatcttttccaaggtctgctttctttacacgtacaactgcaagatcatcatccggatctgttcctctgatttctgcctttaccacagaatcatcatcaaactgtactgtgagctcctctgaatctgccacaacatgattgtttgtagcaatataaagataatcatcatcctcactcacaataattcctgagccacagctctgagactgctgtgactgccttccgaaaaagctgttgtaggtgactgttcctgtatttgtgatagcaacgatgctaggcataacctcatcgacaacagatgatacatctgtcatatcctttgcatcccctgaggatgtctgcttagtcccaccggatgttgtagtggtaagctttgcacttgcagtagaagaatttgaaatagctctcgtgccaatatagcttactcctgtgaaaactccgcctccgacgagtccgaagataagagctgcagctactgtctttgctgcaaatggtccaaatgcaccaggctttctaggtgctctctgtttcttaggctttacagtctgctggtatgcctgaccattcatattcatccggcggctatatgaattgtctgtcgaacctgctgatgtgccgccatatgcattattatttgtgcctgaattatacgactgattagaataaggctggtttgcatatgattgatttacatttggctgtcctgctgcagaagcctgcgaatatggattgtagctctgtgaatagctttcagctgatgtattattagtctgtgcagccttctgtgactcatccggattgtaaggattacccgacattgtgaaatttacattgtttgtattgttatttgtactgttagtattatttgtattatttgtatcattcatatttctataattgttatccataataatttctcctttcgtttacatttagaagtatactgtcaatctgtgtttattttgtgacgggattatttattttttcataaatcatttaactatttatagcctatattccccattgcaggccactatgcgattataaaaataaaaataactgctcatcggcagatgcacctctaagtctgcgataaatagaaattgcagaatatcaatacatccctgccaatgaacagttaccataaatcatatattaaatttcaattccgttcttctcaagaagagctctcgctgtttcaaccgaatctgtacctgtcgcattctttacaggtgcaaactccttctctctgtctacctcaaatggcaggctattgtccatcatgtataccatatcgaggatgagtgtctcgaacttgtatgcattcggagtctcaggcttgtgctctgtaccattctcatcaatgtaaggtaccttcttctctaccacatgaagtggaaggctcttttctgcgatagccatgagcttgtccacgcggaataaatagtttaagataacaccaaaaccatactgcaatgaaccattctcgttctttgcctctgccatctcaggagtaagctcgtaatactcaacaatcgaaggcttgccattctcaagacacatagcaccaactctctcatatggatcacattttctgaccaccttagagccgctgacacagccggactcgattgtagcacctacaaatacaggatctgcaatctgctgaagcacattgtccacagcaaatacattgagccactcaacacccttgtccttcaaatccttgtcaagaccggcattgatgagtgacttgaaccatccaccgtttccgtttggtgacatggcaagtgaatcctcagatttcatgagcagatttccatcaaaatcaactgccggaaccatctcctgcacgaaaaacttcacataatccttgttgtatccaaaatagtcgtgctcttcaaagaactctcttgtcatgccatcatttatctcgcttgtcatgacatacagcggcacccatgtaccggtctgatttgtaaccttcatgaggtttgagacaagctgctcaaagatgtagagttcctttgtctttccgatattgaacatgcccttagccttgtcaaagccaagacgtgtaccctgtccaccggcaagaagaattgcaccgaccttgccattcttgacagcatcaagacctgttgcaaggtatttgtccttatttgcctctatctctgaaagctccatagcagcaagcggtgaaaatgtacctctctgctgctccttgttgtgaatcatatcaaggtatgaccagtccatgtgctcaagctggctctcaagcttagccggagcttcctctgttaagaatttctttaagtatttctggtttgttgccgtgattttttctttgatttccggtttcataataaataatctccctaatagctaactttaattatttaatcatccgaaccatctgatgatgatttttcttctgaaccgttttcagattctgactggctctttttcagggcatcctgcttgtccttattttttttctttgccccttctgttccatcagagccaacagtatcattgtactgcgtgagatcaaatgctgaagtcttagatgtaacacctgtctttttagcaatcttatcacttactgtctgaactgtctctgttggctggtaatcagtctcattaaacaggaactgatgaagcttagaaacattctgtgccaggtctataggaattacggtatcgccagtagttgacagattcattgtagtcagctcaaatgggaagcctgttgtctccttcatctgatattttgtaacagctgttgcatactggataatctctttagctgtaaaattagtacttatctgactcataatatccttacacatctctgttagagagcctaaatctgactgtttagccttgtcaagcatagcctgaagcacaattctctgacgggatgcccttaagaaatcatcacctgaggtgcttctgatacgtgcatagcatgtagcctgagttccatcaagatgctgcataccatccccctcaagataaggagtattatatcctgtagtataatcaacctcaggaatcagataattgatttccttcatctccgcattagtaatctcaagatcaaggccaccgatatcatctatagcatctacaagagccttccagtcaacacagacatacttggttatattcaaatccaaatttgaattaagcatagctactgctctctttgccccaccatttgcataagcggcatttgcctttgcaaactttccattgcctataggcagatacgtatctctgtagacagaaacaagctgaacctccttagtatcataattcagactagcaatcatgatacaatcggaatgcccctcatcgtatgaaccattacttctgttgtccagaccaaacaacgctacattgagatatccatgcatattggcaagaacatcctcatcaatctcctcattgattccggcctcactatttgtcagcgcatcctcatatttaacctgtccgagtgtcttattataagcccaaaccactaacagaacaattaacagcagcaggatttcaaatacaaagagtataatcttcttacgtccacttcttctcttttttcttcttctcttctttgccatgttatttttcctttttcctatgaatgtaaagccacgcatctgcgtagtcctgacgttccttctctgacatattggtatactttccaaactccagattcgtcagacgcatctgcggcctgccacacttgaagcattcaacctctttccttcttgaaaccatccgtatccagccacaatccgggcaaatgtatattttcatcatagtctttattcaaactgtccgagaacctcagctgacaaagcatcaagcttagcctgtgaatcttcaagagacactcctttaactccgaaatagaatttaatcttaggctctgtaccagaagggcgtacacagcaccaagcgttatcgttaagttcgtagtaaagtacattggaagaaggaagacctgtcggctcgacctttcctgttgtcatatcttttcttgtgtcattcttgtaatcacggatagcaagcacctgataatcaccaaatttctttggctcagcggcacgtgcctttgtcataatctcatttatctgtgcagcaccatcaatgccctttaaggtcattgtggaaatgccctctctgtagtagccgtacttctcgtacatgtcaatcatgccatcccagagtgtcttgccctgtgacttgtagaaggcagccacctcacacagcatgcaaactgctgcaggagcatccttgtcccttgcatatgtgccaggtaagcatccgtagctctcctccataccgaatacatagttgttgcagccggtcttttcgaatttgagcatctgctcaccgatatacttgaagcctgttaaaacctcgatatgctttacgccatatgctgccgcaattgccttacccatatctgttgaaacaattgactcaacaaatgcaggattctcaggcagagtaccattagcgctcttctggcttaaaatgtactcaccgataagcatagctgacatatttcctgtaaatgtcacatactcacctgtctttgtatccttgcagtatacaccgagtctgtcggcatcagggtcagttgctaaaacaatatcagcatccttttcctttgccagctcaagtgcaagcttccatgcatcaggattctcaggatttggataaggacatgtagggaaattgccatcaggcactgcctggcttggctcaatgtatacattctcaaagcccatatccttaagcactctctgtacagggcgaagacctgtgccgtggagtggtgtgtaaacgatcttgatatcctttgccatagccttgataatctccggatggatagaaagcttgcggagttctccgaaatatccctcctcaacctcatcagagatgacattgtaaaggcctgcctcaatagcagcagccttgtccatagtctttacctggtcaaacgatgtaacctttgccacctcagccatgatgcttgtatcatgaggtggagtaacctgtgcaccatcctcccagtataccttgtatccattgtactcacgaggattgtggcttgctgtgataacaacaccggctattgtaccgagtgtccttactgcgtatgaaagctccggaacaggtgcgagctgtgggaatacatatgtcttgattccgttagctgcaagacagagtgctgtggcatctgtgaactcatcatgcatattacgtgagtcatgtgcgattgcaacacctctctttactgcgtcctctccctgtgaaagtatgtaatttgccagtccctgtgtagcctgacggactgtgtatatattcatcctgttggtgccggctcctattacaccacgaagacctgctgtaccaaactcaagtgtgcgatagaatctgtcctctatctccttatcatcacctgcgatagccttaagctctgcctttgtagcctcatcaaaatatgggtctgtacaccatttctcgtactccgctctaaaatccatttatattaacctcctgtatcagctagtaaataagcctattaatgttaactataccgattttaccacattaacgtgcatttgaaaagttttagttccttaatatttttttaaacacaaggctcctcatccaaagtggcatcatacagacaacaagctgtgccgaaatcgtaacaaaataatcggctgcgcttatggtccctgtctttaaaatacgttttcttccggctttgtatttaaggaaataatcaaagccgccacgcctccttagcatatcatcaccggttctggcatacacaagagtctcacctatatttgccatacgacagtgatttctgatcatattcgcccaaagaagagaatcctccataagcagacagtcctgataattgcccgcagcaagcaccgcagatcttttgtacatcacagtcatgtgattgaacgcatcgcgctttctctgatactgctttatcacataatttccgagaggcactgtcctctctgatataatattatgcatatcatcggaaaactcgctgatgtagccgcctatgatatcaaaccccggattttccgaaaaagcatccagctgtctctcaaacctgtcaggcacacatatatcatccgtatccattctggccacaagctcattagagcaatgctttatgccttcagcaagtgcaagaccgagcccgttgtttttttcaagctttaccgtaacaaaatttatttccgaaggtctgcattcataatctctgattgcctcataaagctcatctgtcagccgaccatcctccaccagcactatctcgtccggtaaaacagtctgtgaatatatgctttccatacactccctgaaatactcaggcttttccttgtaataaattgacagtaatactgaaaatttgactttattcataagtatcatcctcccagacaagcagactaatgtattaccgcaagcacagtctctatgcacagtctaatatcatttatcagtgaaaatctcttaagatacttaagattgtacctcatcttgcccggcagcaccttgtggatatatgtgtaatccacatcatcagaagcctcaagaagcctgtcctcatccttatacctgatgcttgcctcacttgtgattccggcaggcatcagaagtgttgccatcatcgcaggtgtatatgccatgacatacttctccacctcaggtcttgtgccaacaaagctcatatcaccacatagcacatttatgagctgcggaatctcatcaagcctgtactttctgatgacagcgccgactcttgtgattcttgaatccccaccgacagtcacgagtgagccctttttgtcagcgtcattcaccatggttctgaacttgaatatgcgaaacttcctgccatactgtgtgatacgctcctgtctgaaaaaaacaggtcctctgctatccacctttatccagacagcaaggaccagtatgacaggcgaaagcagcacaagaagaacagcggacataatcacatcaaaaatgcgtttgaataccatgcttgtcctctttctgctcagatgcctgtaatatttaagtgtaaaatcatttttcatgaatgtaggaatctctccccatgttctccatctactcatgtaaaatctccaataaattattaattatatactccacatcctcatcgctaagctttgtgttaagaggaagtgtaatttcattctcatactgatgataagcgtttggaaaatcggctatatcaaagcccatattcttatatgctgtcatcatcggaagtggcttgaaatgcacatttgtggcgatacctcgctccgccatctgcactataagcgcattgcgcctgtccacgccgatgcccggtatgcgaagcagatacagatgtccgctcgatgtatgcctgtctgtaaaatgaggcacagtcaagagaccaagcggcttaaatgccgtatcatagcgctctataatatcacggcgcctcttaagaagcccatcatatctgtcaagctgtaccagaccaatggcagcctggatatcagtcatattgcacttatacgaaggagccacaatatcatactcccagttgccctgaccattcttgtggaaagcatccttcgtctgtccgtggagtgaaagcagcataaactgcttgtagatatactcatcatcaaagccctctataggtctccaggtgagtgctccgccctctgcagtggtcagattcttgaccgcatgaaacgaaaagcttgtaaaatcagctacattgccacacataatccgctcaccgtctctcatgtatgaggcgccaaaagcatgagctgagtcagccgccacaatcacacgtccgattgccctctgcacatcgtttgacggatgaaaaagagccttttttctttccacaatatccaaaatcctgtcatagtcgcaaggcacgcctgcaatatcaaccggcacgataacctttgtcttttctgtaatagcagcctccaaagcctcgtaatccatctcaaaggaatcaggtgctacgtctataaacttaagtgtcgcaccgacatgcacagcagggcttgcagatgcagtataagtgtatgcacttgtgatgacctcatcacctgcacctattcctaagaatctgagtatcgactcaagacacgcagtagcagagcccagagccacagccttattcgtgccgcatagcttagcaatcctcttctcaaattccttagtccttggacctgttgtaatccagtcgcttcgtagcacatcagcaacagctgacacctctgcttctgttatatcaggtggtgaaaatgaaatctgtcttttttccatagttatgttcctcgcttccggcataaaatatgccaaacatccggcttttacaatctatattatgagcttcaaaagatatttagtcctccaggtcaggatgatatgtcttgaccacagatgcaactatctgcttgatatcctttgcttctgaggtgcatgccttctcgagcatctcaagctgcttctcaaagagctcatcatccatctcaataggctcacccacatgaatcagcttgtttggagtctccttaagaccctcctcactcatcagcatctcctcgtagagcttctcgcccggacgcagtcctgtgtatacaatctggatatccacatcaggctccagtcccgaaagcctgataagattccttgccatatcatcaatcttgacaggctcgcccatatcgagtacgaaaatctctcctccatgagcatagagcccggcctgcagtacaagtgccaccgcctccggaattgtcataaagtacctaataatacgcttgtccgtcacagtaaccggaccgccatcctctatctgcttcttaaatagcgggataacacttccgttacttccgagcacatttccaaaacgtaccgctacaaaatcagtcccagtctgcctgttcatcatctgtataaccatctcgcacaggcgctttgacgcgcccatgatattagtcggattgaccgccttatctgtagagataagtacaaacttcttcacatggtactctgctgcaagccttgagagctttaatgtgccaagcacattgttttttattgcctcattcgggctctcctccatcagcggtacatgcttatgtgctgccgcatgatagataatctcaggatgatatgtctgaaatacatagtgcagcctgttggtattgcgcacagagccaatcagcgtctccacccttacataaggatacttacgcttcagctcctgctgtatatcgtatgcattattctcgtaaatatcaaaaatgataagaagcttcgggtcctctctggctatctgacggcaaagctcactacctatggagccaccgccacctgtaaccataaccaccttgccctgtaaaaatgaatgaataccatcattatccacaacaaccggatccctgccaagcaaatcctctatactgaccggacgcagattagaaaccgaaaccctgccgtccaccatctgatatattcccggaaccacagacacatcacagccggtatccttacaaatattgagtatatccttcctgtccttacccgatgtggaaggtacagcatacacaatctttgtgatatcatacttctcaaccatctccggaatgtcgtttcgattgccgacaataggcacgccgtctatgaagcggccgagcttcgccggattgtcatctatgatacagcaggcctttgtgtgcagatgtgagctcatgataagctctctgataagcatcctgcccgcatttcctgctcctataatcatgactctctcatcaccgtttgcaaagcctctctgctcaagcatcttctggcctgtcctgataaatctgtacgcaaaccggcacgctgtgcacagtgcaaagctgagcatcagtccgataatccagaaggcatacggcatcttaatctcatacacctcatgaatgataacgcacagaaccgtaagcaccagaaaggcaccaataatatgcataaactcattgatgctcgcaaagcgccatatactgtgatacagcctgaaaatataaaacaccacaagtgaaatcaccataaacaatggcacaatgtgcagatacccctccaaaaatgagagcggaatatgtgaatatgaaaactcaaacctgatcatcaaagcgaaaaagaatgagattgcaataatacacatatcaacaaatgcaagaaccaatgccctgaaaacccattgcttgtcattgcccatgtatgaatccggcttctccggaccatcgcattttgttttgtcttttagattatttgtatcttttttcatgtcaagtctattactcatatagaattttctccttttgtcctacactgcaaaaagcagcttctatatccctatgcaaatcaacttctcataaactgcatttaaatttacgctttattataccatacacacactattatagttcttattattttattaaatataccacatttagcgatttttgaaaacaaacagcttgcttatgacatagttgagcacaaccacaaccacctgtgctgcaagcttcacccacatgcttggatagtccaaaagcgtgataaaaataaagataatagcctcttcaataaccagtgtgataaatctgccactgaaaaaagcaaacatctgtactaaaaacgccgtctttgtcggcgtagcaaccttaaacacccacttcttgttggtaacatatgagaaaagtacagcaaacacccatgccagcgcattcgcaatcagctcattgattccaaacaaaacattaaaaatagcatatgcgcctatgctgatcacaaaggtcatattgccaaaaaccgcgtataaaacaagctccttaaactcctctttcctgtttcgtattataatattatccatttctccacctatgtgacaggctatataactctgtcgtaatttatacgtgtaagttgatagtaatgttaatttgcgatttttatataataactgcatagccaaaataagtcaatatgtgatatgatatctgcatgaaaaagaaaacacaaaaaaacaagagtataaaactaaactacatatataatgtgagctaccagatactcacactgatcacaccgcttatcacagcgccgtacctctcgagggtgcttaaggcagacggaataggtgcatacagctatacctactcactggtatcatactttatcatgtttgccgcactgggcactgtaaactacggaaacagggaaatatcatacctgcaggaggacagagcaaaacgcaccaaaaccttctgggagatagagcttctatccgtcatcagcgtgattgtgtgtctgtgtgcatatatggtattcacacttgcatttgggcactcaccgctcaaaaagcacctgctattgattgaagccgtgtacctgatatcagttgcttctgatatctcctggctgtttcagggacttgaggaatttggcaaaatagtcggtcgaaacgtgatttttaaaatcataaacattacttttatcttcatcgctgtacgctcagagagtgatttgctcatatatgtggcaggaatatgtctattagagctttttgccaatatatccatctggttttacctgcctcaatatgttgacagaccaaagcttaaggagcttaagccattctctcatctaagggctacactcacactctttgtacctacaatagctacaaccatatacacagcgcttgacaaaaccatgctcaacaacataacaggcagcatgacagaaaacggctactatgagcaggccaataagatatccaaaatggttctcatgctcgtaacctcactcggtactgtgatgcttccaagaataggaagagccttcagtgaaaataaaccagacgaagtaaaagccctcctttataagagctttcaattcgtctggtttataggtcttgccctgtgctttggcctgataggcatcgcacgcaatttctcgccatggttttttggtccgggatatgaaaaggtgccatatctcatcatgataatggctacactgttgccgattataggcttaagcaatgtaatcggtatacagtatctggtaacaaccaagcgtgaaagcctgctgacacgctcagtatgtatcggagccgcagccaattttgtcatgaatatgattctcatacatcagctctattcatacggtgcagccatagcctctgtcatctcggaggtaataataactgccgtacagctttacttcatacgaaatgagcttagcatcccaaaaatattttctctatcgtggaaatatctcatatcagcagtctgtatgcttatagtactgctgctcatggatgcaaggctgtcagtcagcttcatgcacacaatgattatgattgtgaccggatttatagtctatatggtgctgcttgtactgatgcgtgacgagatggtatgtgaaggcataaggctcatcaaagccagaatcaaatgccactaaataataccattctgcaacgcttaattccccggcagcttcacttatttggctgcctcatactctccaaccacctgtgcctctcctctgtcagtatattctcttgccattttcagagcttttttagtcctcttcacagactttttccatcttgaaagctctgattttgccgtatcagactttataccatattgattcacagccatatcgccaatatatgccgtaagctttttggcaccataagcattcaagtgctcaaaatcagcgaagtcatgggaatcatctatccctgcaatgctctcataatcagtactcaggtcaagaaaatcgtatccatactccttcgttatactttcaatctgctcaagacccgacttgtcagctgcctgtgtctcatgaggtggctgcagcaacagcacatgctctatgccaagcttattgcagtacgaaagcagctccttaagatatgccctgcactcatcagtcagcatataggcttctttagtaggctgtccgatatttgccagattgtcacggcctccggtgatgcctgtttttgaataaaagcctttcagatagcctccaccactgagcctcatataggcacgagtgacaaatgaggtatacaccgcctcagggtccttccagttgccatgatacttttccaatggaaaataaagggtatccgatatgttatccttcaccttttcatcatccttattgatatttttgggaatagtctttaccgtgtcaagcttgttctgtgacataggcatattgtcaatccactttctcagataaacctcatcagtcagattccaattgccctgactaaatgctgcagcactgattacaagaagcttcggcttctgtctcttcacaatctccgtgacgatggacttgtacatattgcatggcacagctcctattgaaagattgcacgacttaaggccatactcctcccacgccagagccggcgcatagcccgtgtatacctcacttggtccaatcatgaccatatcaaggctgttctctggctctgcgtaaaagccatatatattttcaatatcgctgctgtcaatggcaataaatgcctttgatactatttgcatgagcaataggaggactattgcaaatgcagagattttaataaatttcatggtgtttccttttctattgaaacgctttattttgatattttttcagtaaacactatatagtatagcggattagtataaaaaaacaacaccctgattcatatttatcattttctgatatgaagctgtttgcacgggtagaatataaaatcgataagcctgattttctttataatacattcatacaatatccagcatatagcagtgcatcctgcaaatccgcatatacactgcagcaccatattggttataccggccctattcaatataatcctgattccacctacaaatatcacattcatcgcataaaacggcatgctgtcacggccgatagtctgtaaccatttagggaaatcacaataccctgataaaaaatagcttactgcaaatataaatacagtcactatacaggcggtaagccgctcaaacagactgctgaaaatgggattgctgctcatgtcatcacgtaatactatgtctgatacctctacaagcacactcataacggaaaggctcagcacagcatatctattatccagtttatcaagccacttcttaatcaggcatcccagataaaagtacatctgaaagccggctatgtagttaaagccctcatagtgaaagctgccatagcatgtcaaagcaattattaaaaacagcacaaataaaagctccattttataattaaaatgtggcagaagcctcgcaaacacataatcagccatatacgccacacaatatatgagaaatagtgcgtataaataccataaaaactctatcggcttccacggtatgcttatcaggctgctaacggcaaccggctcccttatcaaatttgaaagggcaaatttaataatccagtaaataactgaaatcatcacgtaaggcagcaggatattaaatgctttatgacctatccggctaaaaatgccttgtgaagcattccctacatattcactgtataagaagcctgaaactgcgataaagcaaggcatgtgaaagctgtatattacatttgcaataccattcattgtatcatcaaatgaatacatgtctgtcaggcccaatgtagtgtgacctaaaatcacaaataaaataaggatgccctttatgaaatcaattgttttatctcgggtggtgttggtttgcatgttatgccctttccttaaacacaaccagcttactaatcacataattcagcacaataacaataacctgcgcaatcaccttaatcagcatactattaaacccaagccatgtgataaacacaagcaatatagcttcctcaacaaccagtgtaatcactcgtcctgaataaaacacaaacatctgctttataaatgcctgcacactatcagtcggtgactgaaatacccagacacggttcgtcagaaatgcaaacataactgttataatccatgaaagaatattggcaataagctcatttattcccataccaacattaaaacaagcatatgtagctatgctcacaataaagctcaattcaccaaaaaataaatacaatagcatctctttgtacttcttgtagaatggattaaaaatcctaagtataggtaattccattaatttatcaaatactttcattccacataaaacctaataaatcacaacctttgttccatttggaatattatcatacagccactttgcattattaatgtccaatcttacacagccatgagaaacttgtttgccaagcgttccatcttgtatctgtgtcatactaccacgattataaagcactgaatggaacaaatagtttccactataaacgcctacctgacatgcagatgtgtctgtcataataagccatcttgtagaactggctcttacctgtgcgttcttagacattacatctaatgctgccggtttcggtgtatacacgggcttatttttataataatttgcaacacttccaggtgcaggtgccccctttcttaccaaattaatccttagagcctctactctataactaataccagttgagcctgatgtctgcccatttgaagcccaacctaaccatccataattctctatatgtgaactgtagtatatattataaaatgttgctaactgacctgtaagctttatctcaatggcttctacctgcttagccctacctgaggttccagaatattgccccaaagttttccatccagtccatcctatatcctgcacatgcgttctatacatgatagtaccggttaatgaatgtacagtatcctgagataaattgatattaattccttcaattctcagttttcgtcctgtcgtacctgtaatgtttccccctgaaacccacggcatattacctatatcctgtttatagttctattttatcacatatgcattttatttaaaacaaaaaaagaaactaatacaaattatctgtatcagtttcttttttattaatttatctggcaatatatgccattgtatttttagaaattattccaccataattgttgccaggtgctgactgtcctttcttcactaatactatctgcaatgcctctaaatgaaggttttgtccggatgttcctgcattctgtccattctttgcccatccaagccatccgtaattttgtgcatgtactctgtaatagatatcgtattgatttgccatttctcccgtcagagacatatttattgcctctacattcagagctctgcctgtcgttcctgcaagtgcaccatccatcaccgtattctgccagccgatattctgtacatgtgtctggtattttattcctcctgaacacggctgcccgtcaagatctatctttattgcttcaagtccaagatttctgcctgttgttccactgagacttccgttttccactgcactctgccatccgatattacttacgtggctctgatatcttaccgatgcatttgtgttgattatcggaacagcactggtttttgatatatacgcttttgcgttattagatgtgtatcctccataaaatactgtaggagccatatctccctttgccgttacaactatctggattgcttcaagtctatatgcatatcctgaggttcctgctgcctctccgttttttgcccaggctaaccagccatagttctgtgcatgtactctgtagtatatatcatacttatcagcatctttaccggtaagttttagcatcaacgcttccacatgcttattctggccggttgttccactctgttctccattgaacgagtttccatgccatccgtcatttttcacatgtgttgtatagatcacaccaatgtctgcatctgattttacatttatttttattgcctcaagctgcagtcctctgcctacggttcccgccatagctccgtttgacacaccattctgccatccgatatttgctacatgtgtctggtatgatactgatacactgtttaatacccaatgtgcatacagaacatgatcagaagctgtttttactgcactgttaaaacttatctgttctccactgtctacagccgtccaccagcctgcaaatgtatatccgcttcttgtcggtgtaggtaattcaccatatgcatttccaaaagtaacagtttttgtattagcagtaactgttccaccatcagcattaaatgtaactgcgtagctgtttgctgtccagtgtgcatagatagtctgatcagatgtaacctctacttttgtatctttagtaatctgtgttccaccgttagctgctgtataccagccggtaaatgtataaccatctctttcaggagattccaaatcgccatatgtgccgccatatgtaatattcttgcttgtatttgtaagattacctcctgctgcatcataatttaattttactgtaaccggagtccataccgcattaactgtagtatctgaagcaatcttattatatgccttatcccacgataatacatacccggtctttgttatttccggagctttcgcccctctcatacacaaaacattctgtgactcaacaatctgaccattatcaacaaaatccactttatatctaagtggtgacgcatcacgttcttcatttataccatatgatatgtaatggtctacataaccctcataatcatcaccaaacgcactttgtaagtccctatatcttgttttgtaacttataacatcaaaattctcacttgcctgacgtccctctcgtattccattttctagataatgctgataatataaataccaattatctccaaaagcattttgcaaatctatattattatccttataaaaatgcacatcaaaaatttcattaccacgacgaccttcagccatgccatatttaataaaatgttgcagtgcagcttctgcagtatttccccaattattcttcacatcaggattattattcaaataatatgatgcgtcaaatataaggtgatagtcttcttgttttaatccaaaataattaacaattccctgtgcatctgcgatgccaagtttttttaaagctgtctccgatccaaggtaattagtcgcgtcactttgattacttatatacgcatgttcaataataattcccgggaaaccggcctttttactatttcttattacactatagtaatcacaaatagatccatctgtataggtatctccactctcagaatttctgatacgcgttccatcatttgccagtcctaatgcgactaactgtttaagaacctcgtttgctaatgctcccccctgtgcaccaatatttgcatttaagctggaattaggataataaactgttgcgccatgaacactcgagctggttgtcgaattattatgaattgaaacaaatacacttgctcctactgacttagcatagtttactctatcttcaagagctacataatgatcatcatttcttgtcatatatacgtttacacgtttgtatttactaagttcttccttgcaatactgtgcaatcttcaaattaagtgttttttctaaataggtctttccaccataacttgcctgtgctccaccatcgttgccgccatgccccggatcaagaacaacattcactgccgaactagctctaaagagattattctgctgtacatcagccgctgctgcaatagcctcgctaattgtattccccgcagcttgtgttgatgtttcatccggatttattactactgcatcatacacttcactgcccgtattttcattatctgaattgctattatctgaatcctccgcatatgcatcagcattcaaatccattacaacagtatcaattccaaactgtgaattaattccaatagcttcaaagtctactgaatacccgtcagtttcgagagacttaactgtataacagcctgaaaccagatcacttgattcaaatatcaggtttccatcctccgtcatctctccacttatttcaaatgactgatttaaatcggtattttcaactgttaatctagcatttgattgatcaatgccatccgctaatccaacaattatccttacagcatctccctttttaacagatggatctgcaacagataaatatgtaactatctgattttcactattatcttgttgttgatagctctccgtactattacctgtctctgcagaatcagcaaaaacaaaagtgtttgccgaaatcagcatagaaagcgtcaacaacagtgctactacttttttcatcttaaaacgcctttccttttgtaataaatctaaaatatagtttatcacataagaaaagacgtttaaagagttacctttttatattttcttaagattttttataattcgacggattgcaacaagttaattatcaactcataatatgtatcaggaaatgctagtatttcatattttatcacaacaagaaagacaacgtttaaagactttttacctattttatttagtttttaccataaagcaatttcttcctatataattgagaatctttcaataattcaacatttatatagtccagaccatatttttcaatcaaagtatcctctccagaataaaggttagttcctaatccaagtctatttccctctatttgaacccctaaagctgccaatgttgttggatacaagtccaaagttgtatattctctttcaacacatggtttttcattaaccgctgcgccattaacaattgtaaaatatgttcttctattaaaatctgttgcattttgtctttctatataatcagaatccattgtaagatgatctccggaaataacaactgttgtattatcataaaaatcctgttgtttaatccaatccaggaattcggaaacttgcctgcttgaacatgcaataacattactatattgttcatcatattgattctgacataattcacatacatagccatctgtaaaatgcgtatctactgttaacattgtaagattaaacggttcatctttagaagctaaattatttaattcattttttgcatattcaaataatttttcatcttcatatccccaccaaaccatataatcatcatctatgtagcctctatcaattgcagtataataatcaaaaatatcatagtttccgtgtccgtgaaaatacgatgaacgtccagcaaatttcttatctgaaccaatcaaaaattcctgattgtatccttctcctttcaggacatctcctatagcccaaacacctggaacataattattatctgattcccactttgaatttaaggtatcattacttattaagttctcattaattggtacaccggatgtctgtgcaaccaatccacccattgtaaaagtcgcgcccgaagtcgtatacgcaccattcaattttccatatattccaaaattttcattctccaatgaaatttgtgtaagctccggaatataattttcactcatagcaccaccaacgctctgatctgaatatgtcatttccatagattctaaaaaaatatatatcagatttcttttttcctttgggaatgtaattgctacatctcttccatcaacataattatcttcatatatcgttgaatcctgctttgtatattttaaatacgatatgatatcaaaatggaaacaacacaatataattgaatatccaattgctatacaccctaaaagcgacatccaaaatttatatatccacttatttttcttttttctgaatatcaataatccaaatgtaaccattaaaacgcatattataataatcaaaataatggaaataaatatcacactgaatgatgaagtatttgttccttccaaaggtgtatttaaatgatatattatctgtcctattggcacatctttaaaatttttctgcatataccaaaaaccatatagcaatgctccacctaatgcagttaatatatatgttatgaaagcagacaggaaattaaaaatcctactatgtttcttatcatcattattctgacacaataatacaaattgcaaaataccaaatagcaaataacaaaacgtgcctatataaaacaatactaattgtctattcaaaaacagtttaactaccttataatttagtttttgtgacaaaataaacatattatcctgagtaagtgcagtaatatacaagccatcatcatgtacctcatactcaacatccttacgagatgatatgtatttttctagtttcgaaccagatacttctatggaatttccccaaaaatcagaaaatgtaatactcttaatcgaatatacctctaatgtatttataggatcaactctaaataaattattgttgatttctgccagactcatttttattttgaaattcgcttttttattttcaaaatatgcattaatactatcctcttctgtcattttcttaacactgggcgcataatacatttgggcatagtttttatttgaatgctcttctccatattcaattgaaaaattatatgtatgttttccgaatattcccatacataagccaattaataataacgcaataaaagccacgtctattatagctaaaactacacttaacaaacgtctattattacataattcgttttttatctttcgcataataaaataccccttatttatatataaagaaacaaggagtattatattataatcttgtatttttttcaactttttcttaactttttcttaaccttttcttaatatttttttgttcttttttaaaattgtatagattatacaaaaataaaatattaaaaacaacaccattacagaagtgagaaaaccgtatgcgccaccttttattccatatctagccactaagtattcatttgccaatttcgcaactatagcagaaactatatatcctataattatcattcctgattttcgcatcacagttaaaacataataaccaaaataagataacgcattaattccacccgcaaacataagtaaaatcaataccatcttatattgtattaattctgaacccgttaaaatctgtaatacaggaattcctaaaatccaagccccaattatacaaattatagtaaagcctactattattactgatatttttgatattgaaacaataaatggtttcttgtaatctgaagcatattcgtctgctaatttagttaacgcgggcttcataacaaaagttgcaaatagatttacaatagaaacaggcataaataatgtctgaaaatatgctgaatagtttgatgccatttttgcatctattgctattcgactagcacttaaaatatatgaccataaaaaagaacctataaataaaggaaaacaattcttgagaatacccaaaatatatttttcattccagataacagctatatttctaaatgttttcatcggcattacatcaaaaataatcaaaccaagtattgcaataagaattgacaacgatatagctaaaatcatatttttcgtaataataagaactactaacattacagtaactgacataaccgttctaaatgcttgagattttcctgttaaatctaaacgaccatctttttgaaatgttccctcgtataaatctgcatatgcatcaacaaatctataaatacacatcaataaaataacgatgcacttatatatatttgatttagctgtcaatattgaataaacgatactaacaacaaccgacacaacaaataaaatatattttactgccttataatgtccaaattcaaaagtgcttttagtatctgtaacctgaaatgtccttgtttcataatactctataaaagcaagcatctgcgctactgttattgctatggcaaaaattcctccatcatcttcaccaactattctaattatcaataaagataatatcattgatgctgccgcaaatatcatgcttccaatcatattccaaacaaaattatttttttcagaggtctcactactaacatatttatgacacgctattgttaatagtttatttactttcattttcctcttctttcttataataatttctcactgcaatttcttcggtaagactgtttatcatattatctaaattggaaattcttaaagtcaaataaaaattatgaacaaaaagtaccattattgaaaatagaaatataaaatttaccgggctttttattccgcatatatctgcaaaaaaatatgcaatttgaggaaaaatacttaaaattaataataaaatacttgatacaatccaaaataaagcatattcaatttttagttttgctttctttattttcttcattataaagaaaaaaacacataatgacgcaacaaataaaataactctcaatgatgttgacatactctatatcctccctatctttttctaaaattctgtacaaacaatatagacattaacattctaaacatataagaaatggatcttgcaaaattcaaataacttgttcctgcaacacgctccttcatttcaacctgcacctcagcaacctttgctccattttttatcaaatatgatatcgtatccggttctggtccataattaatttcctgtgcaaattccttaatacattttctgctatataatctcataccagatgttggatcatttatttttactccagttgtcagttttattgctgtggatataagtctgcttcccaacattctagcagaaataggctttttttcatccacaaatcttgaaccaataacaatatcatagccttcatcaagcttctttaacattttgtcgatatattcaggtaaatgctgtccatctgcgtcaaactgaataaagcaatcgtaaccttttaaataagcatattttgctcccgcctgaaatcctcctgccaatccaagatttattggcaaatcaattatattatatttatttttttcacaaactgagtatgtgctatcctttgagccatcatttacaataacataatcaaattgtgaataattttctttaatattattcacaacttcttctatactttcttcctcattatacgctgggattactattaatagccgattcatatctacaccttactttctatacattgttttctttttcactaagagaatatatttttgttaagacctttgcaaccggtctattccaaaattttaaaaacatctcataatcctctttacttcttaaattatctcctattactgctgatgtttccgactcttcatgaattctgtgtgccattaatatttcattacaatataaaaactccccctctgctctagatattctttcccatgtttcccaatcaacattacttctaaaacctgttttaaataacggttcataatcacataaagcttcctttgaatatgtaacagaaggacagcaaattgcatttccaagtcttatagcacttctcttatttttaattctgtatgccttgtcatgattccttaaattctttaacattatccttttcagtttcaaattaaacccattgtcagaaaaatttccattaatgagctccgagtaatctgaaaacgcgattaaagcatgtggatatttatcaaatgtatttataatttcagttgaataattttctctataaatatcatcctgatgtgctattgttatatattgcgcatcagagcatgaatatgcaaaattccaatctcccgcaattcccttttcacctttattaacgaacatttcaatctgatatttattacataaattttcaatatagttgttcggtgttgatgttgctaacttaatatttgatttttttttctgttttttcaatgaaattatgcaatcttctaaatatttactttctttatatgcacaaatcacaaactcatgttttatcatttttcctccctataacattttgattaaaatatactgatatatgcaccacattgaaacgctttgcataattatcattacaatataattatatactctataatcaaatttcaacctgattccactaccacccaaaacggcaaataatggataaatcaatggtgttatatatcttgattgacatccagctattgtatttgaaccaacttctgtatatgcaatgtacagtgatgtagctatcaaaactactgttccaaaaaacatcaaaatatcatatatataaactattttcgaatatgccttaacgtcgtattcacgtttatctgttaatgttgtaaaaaccaaaaatgcaaatactattatagcaactgttgttgtaccaattcccagatatgcaaagtgatcaataaacccattcatatttctaattgacaaatagtctttcaaaaaatttaataacgtacgtgtatattctactgggttatgaataatatacaatatctgttcagttggattaacacctgcaccacctcttacatcaccgccttttgaagtttcaaaaatggttttcaatagcaaatcaaataacataattacaaaggccatagagcaaatgctataatattttttcttattctcaattttgttccgtttcatcaaaaatggaattatcaaaaatgctaaataaatttgctttggaattattgctattgcaaatgctataaccataatgaccgtatcttttgtcgaaaccacaccttcttcctgacagttgcccacaaaatacgccattccaatcatgacaaatccaataacccatgtatcataagaataattgcttgctataaataaagatgttggaaacatagccacaacagctaatatcatttttccactatgtaatcgtttcatggcaaaataacaacataatgaatatactaatactattggaatttgtccaaatttatatatcacaaaaaagtttgctccaaacaatcttagcaaggcaatcacaactccactaggcaatgccgtcaaagaaatattatgatctatatattttattattgcatcactattcttgtttaaagtattaatcttttcaatattttgagcataagtgtctgtattctgaataaaattccccccattagtcaagacttctaactctggttctgataaacctatatgtgcaacagacgaagaacttattgcaaatttaaaatgtgaatcaatatcccaactaatatgaccaattggagaaacaaataacatagtaatagaagaaacaaaaaccagcctgacaagtaatttctccggcttatcttttatcgttctatagctaatcaatataaataaaataatagcgactatagcagaacaaaatagccacgtactatacataaactttagtccactaacaaaatacgcaattatagctcctataaccaaagaaactataaatataagtaaatctcttaatgctattttatattttctaccgataaagcaaataattgtatcactaaaattcaattttttgtctataaataataaaatcgatataataaaaacagtaaaacaaatagagtaaattattctttcataatgcatattttctttgtcaatactaattattgacttacctgaatatatttctatatcatcaaagttaaaatcagaatcaacatctattctaatttgtttaaggcttttgttagtaagttcaaaccctacgttgtcatcccctgaaaaaatagtttttatacaactatcattttcattaaattcattgccatcatcaaaatataactgtacatctaaatcgccagatactttatcttttaatttaataacaattgttgttacattctttatattttcttttttaaaaacaatatgcggatctactccattaatacaaatttgaccactttgatttatataacaaccgctatattctattatatccgatgtatcatatcgttctaataaattatcagcatttccgcgaatctttaattctttacgaggggaccaaaccatggctactgtcacaagacttaatatactaaatattaaaatccataatgatattttgctaatatttttttttgacatttcttactcctacaacaaatgatttcatttgtttattataatatgtcgttttgtcttcgttgcttttccattacagcacacatatatttgatacttacctgcatcaattttgtcgaactcacatataaatcctgataattctgcacctggttttcgcttaaaatgaatagccaaatcgcttctaaaaatcttacgagtagttattagataggacttattatctgatttcagtaataattgtatattcccattatacggtttttcattataaaatccccatccctcaattatacatttatttcctacataaatattatcaatcgcattcacaacttttctacaaatatcaaattcctttgtacattcttcaacaacacactttccaatattctctttcatcatattatatgagaaatcaggagcatgctgtgtcagatttgagctataaaatggatctttatttttaaagtacggatgcaatttatataaatgtttttgttctgccattaatcgtttaaactttttctcacttttcaaatcgttaccacgacttaccgattcatgatgataaagtataacatcattcctaacaacattataatatccagcctctacaagcctaaaacaaagttcaacgtcattatatgcaaccggcatatcctcattaaacccatttactttattaaactttgcagcatttacgagcatacaagcagccgtaacaacaagccagttataatctattttatttcgtccgaaataatatatattatcatcattataacctataaatgcatgaactggaccattagcaatattgataacaccaatatgctgaattttcttactattcgggtataacagctttgccccaactgctccaacatgctctaattctgcatgtccaaccattctttcaagccattcctcattaattatttcaatatcatcatttagaaataagtagtaatcacccttagcttctttagctcctatattacacattcttgaaaagttaaagttcattttttcatagatatatctaaaattatacttgtctgctaatccctgatacagtttcttattttcgtcattgcttccattgtccacaagaataacttcaaaattcttatatctggtaatttcatacaaagtctctatacatctttttaaaactttatagttgtcttttgatggtattatcacgcttacaagaggattagtctgcgagatataattcaccctatactgatacattatatctaccatttccagattagcctttagaccacgtctctcaagagcatcctccttactcttctttgcagcctcgaatatatatggctttgcagatggatccaaagctgttgattcttttctttctctccaatgatataagattttatcaatatgagctattttatttgtcttttcagtaaatctaagagtaaaatcatagtcttgtgcaccttcataaccagctcttaatccacctatctcatttgcaatacttctgcgatacactccaaaatgacaagtatacatatgtgacattaatgtatccggagaccaatccggcttaaaatgtggcatatgtctattgaaaccatcatcatcaattttatcctcatcactatagataaaatccaaattgggattttcattcaatttttttacaacttcataaagtgcatttggacgcaatacatcatcacaatccataaatgcgacaaattcccctgtcgcaatttcaagcgctgaatttgtgcaacgtgaaatatgaccattctctgttctgtagacaatcttgattttttcgtttccttcatactttgcaagagtctctctcacactatcccatgaagaacagtcatcagccagacaaagctcccaatttgtatatacctgattaagtacagactcaatacaaggaataagatgtctgtccagtacattataaacaggtaccaaaattgaaatcttaggattatattcaaacttctcatcatagttctcatttgcttcaagcatagtaatccatgtttcatattccaaactgcgatttaatcttgctgccctacgtgctcttaccttctccggaactactttatgataaattggtcttgctactttttttatattttgcttgatagtattcataaataataacctgcacccttcaattgcttatcttttatcgcgcttcaatctcaatatatggattgtatactgcatatttatttaatttcttcaaagtcttacccaggattaattctaaatcattctcacatccagccatatccggcattatcatagataataatacactcttatctaacatcacacagtctgatgagactgaataacaatctcttgtacttacaagtctgttaaaatttcctgcttcggatcttccatatcccttaaacggatatataacgcttccttcctgatctacatctatgccagcctgcaaaatatatttctttttacatatttttgcacctactgctcctacctccggtcttgttatatatccaagcatttcttctatacatttaaagctcatgactttatatctgttattgataatccaaatataatcagtttgtatatcttttacaacttcttttatctgttcttttgtttctataaacaagtaattcttattaacatacttggaactgcactcaattgaatccacacatgccttatcatatattctatcaccaaccacaataatagttattggcgttgtcttactatacccgtatatgatgtgataagtcccatgatatggtccttcttcaaccttagcatcaattttctttcttttaatatggtcttcaagtgctttttttccggctttaaatgcataaagcttactatcaggattttcagatgtagaattttcatggcatcgccaatgatataatatcttaggtatatgatatatagaatcagttttttctgcacacctaagaatataatcataatcctgtgcaccatccaagtcaggatttaaaattccaacctgcttagcaatcgacattcttactacaaacaaatgacaaatataattattagctcttaaaagatctatattaaaattcggtttgaaatatggttggaagcgttttgtaccaccagcaactattttatcttcatctgaatatataatatctgcatcaggctcattctctaaaagttttgcgcactcaaaaagtgcatctggagctaacatatcatcatgatctgcaaaaacaataaaatctcctgttgccatttctatagcagcatttgtatttgctgaaatcccatgattttcctctaaaactttaaatttaatccttttatcatcagccagatacttttcaattatattgatagtctctttatcttcaccagatttatattcgctagcatcgacaatacagagctcccaatcagaatatgtctgtgcttttatagaatcaatcatagctcttagatattctgcattggttctatataccggcacgactatactaaatttatagtcctctttgaaaaggtatcttctttgcagctctagcaaattatcatcaagtcggtttttctcctgccagattttatatgcattttcttcatcaagctttctcttgatttttttggcagttgcaaacagaccattttttttaatatttaatactattccactattcatatttacattgcatcttcattgacttctcttacaacaccagttatttctacacttgaaacgccatgactaaatgacatatctatccaaggatcatcctttccaaaatagaatacatcatcaacttgtctgccattcgtagctataatattgacatttgcatcttctgctacaatcttcaagtcactaagcgatatcgttgtaccctctaccggatcatatctcacatgctggcattttgtcgggaattcatatacctgtttaaagatattaccatccatcggcataacctgagtaaatgtagctctctcattaaagcctgttccatcatcaaagtaaagcttcgacaattcatcgttttcactcttcttaaactgatatgcatcacatacctcttttgccccaccaatcatctttactttgccatgatcaagccaaacaactgtatcacacatctcccgtatctgagatatcatatgtgatacaaatagcactgtagttccgccactcatcaaatcaagcattttattcttacttttttcctgaaagtcagcatctcctacagctaatatttcatccacaatcagtatttccggattcacaatagtcgccaccgaaaaagccagtctcataagcattccggaggaatagtttctaattggctgctctataaactctccaagctcagagaattcaaggatttcatcaaacttttcatccaggaactcttttgaatatcccagtattgaaccattaagatatatattttctctgccactaagatccatatcaaagccacttccgagctctagcattggaacaatattaccatgtgttacgacagttccctctgtaggcttcataatccctgagattaccttcaatattgtactttttccggctccgttgtgacctactattcccacaacctcaccttttttcacattgaagctcacatctttaagtgcccagaattcctcatatttaagttttcccttcactttctggatcatgaactctttcaggctattcaatttgtcatttgccattcgaaagcatatagacacatcttttacttctatcatgttcataggtcatactccttaatgtttacagattgaaaataaacttgtcctcattctttttaaagaaccagaaaccaagtataaatggtacaactgatagcagaatacaatataaataatgctgtggtgacggtgataccccatctatgagaatgcttctcacaaagtatataaactgatacattggattacaatgaaaagcttttaataatataggtgaagtaataatattttctgtatagaaaataggtgtcgcatagagccacactgtgctcagtacattccatataaactgcgtatccttaaaaaacaccattgacgtactaaggaaatagctcattcccagactaaatatcatcatgcatatgataggaaatggcaataatataaatgccggtctaggccataatcctgtaacaaatgtcactatgagcaaagggataagtgaaaatccaaggtttactaatgatgacattgcccttgacagagggtatatatatttaggtacatatacctttgttataagtgaagagtttgatgttatagctgaaattcccatagcacaacattcattaaagaagttgaacataacaattccactaagcagatatacagggtaattcgccactcctgaactaaatatagtagaaaataccacatactgaacaagcatcattaggagtggattcaaaaagctccaacacacaccaagcacagaacgcttatatttagtcttaaaatctctctttaccaactggcttatcaggaacttgtaatgtgaaacagaatctaagaatgcaataaccactgtttgtttacctgatttccgtttatttaatgatacaacaaaataaacaataagaagaattcctattgctcccattattatccaataatagttaccaaaccatattgtgttcattccatctatagagaggcataactccccctcaagaccctcgttatttacatacacgcgagtgctatcatcatatgatttggatatctctccttttgccatcttgatagaatttccatagtaaaaagagatttgactgtcgccatccaatgatttgcaaatcaattctaatgtgtagctttcattattatctgtcttgattttttcaggcaattttatatcatatggctgattatcacttagctctgacatatccacatcaatatcagcaatattttttccgtttgcatctgtaatcttcgcttcaagcataccctctgcggttttgccataggttgccggtgtaactgtcaccccttcaagatactgactatcaaccgtaaatgtctgcttaattgtatctccctcagcaaactctcctacaacctgagactgtgagacagtatcactctgagtttcctggtagtgaaactgcttacttgacactaaatatactaaacatatagaagcaaaataaaccaacaatgttattccaaatactttttttataaatttttcttccataacaattaaattctttcctaatctaaaatattatttgtcactaaatgcctaagaattatactctctactgatacttttgtcaaatcatccccacacagcctgtcccagccgtctcatggtcccggtcttatacatatcattttccttataaaaccgttgtctcacgagtctggatttgccttccagtgccgcataccttactgccagactgtcagcaggcagattatatgtttttgcaaattctctcgcctgaagccgtccaagcctcatgctctcctgtatctgttttttctgccagacacggcgcacaatatatgagagcttatttatcccaagtgctcccaggctgttgtctccatgctgtctatacagtatggtgggctcatctatgaatgctgttttaccaaactgtgcagctacaagtgctgcccaccagtcatgcattattgtgttgtctatatcggtgatgtgaagcatcttatctcttaaagctctgtttatcatcattgtacaacctgtcacagaattctgcaatataaactggttgattgtacgcttgtgacagtcaagactctggtatccgctcatcgtgtccgctattgtattcagctcgctatctaccacgcgaagctccgtgtataccaggcacggaacatctgctttgttctcaatagtaagcatcttatcatatgtcagctctatctttttatccagccacacatcatcctgatcacaggtcatatagtatggcgcttccacctgaccaaacaggtagaagaaattatattttgctccaccggttgatttaccatctatcagatgtatcttgtcggggtatttttccacatagctttctactgcagctatcgtgttgtccgtagagccatcatcgtgtatatatagttcccagtccttgcaggtctgcgacaggatagagtctatctgctgacatatatatttctctccattgtatgtagccattaaaatggctatcttgtctgtgctatgcattcttcctcttccactttcttccggccctgttgcccagaaactttgccgcactgtcaaatatgcagtgcactgctgccccaatcttgaactgctttaagagctttttttctatgaaaagtaccatcctgataccctcacctgtggtaccgtcacactttatctcatccttataggtctccataaagaccgctacatcaaagttgcgcttgtactgctgcttaaatgtatagttgtgtgagtgatacacctgcgctgtggcacaatagcctatcttgcatcctgccccaagtgccctggctgccatcagcatatcctcatttgtgagcagtgggctttcaaagccgcctatgtcttcaaagaaatcacgtctgtaggctgagcatacatctgagaagaaatatgcctttattccaagtcgtggtatatcctctttacttctgacaaagctttctgccggataattaaactccctgactaatgcctcgtcaggcttagcctcccttctcgggagctgtctggccgatatcatgacaacatcttcgttttcaaagcctgccaacatattttccacatagtgttcatctgaaggcagtgcatcctgcgacaaaaacatcactatatcaccctttgacatggctacagcatagtttctcgtgccaccatgatcaaattcgcttctcttgacctttagtgtcctaaagcctgcctgctctgccatgcgcactgtggcatcctcggattctgagtctatcactattatctcatcagtcttacgtgtctgcctgcccagtatatctatcagacctggcatatactctgcagcgttgagagtaggtattatgagacttattgttatactatttaaatccaatttcttcatcatatttctcacatatgttctgattattgtgctccctcctccctgattacagagaaaacggttctgaaaagtatctttatatccatccaaagcgagcagtgctccacatagtacatctccatcctctggcgctctccgctctcataggtggcattgtttctggcatatgcctgccagtagcctgtcagccccggctttacgctcagaagctttgcgatgtccttgccgtatatctcggtttccttctccacgattggacgcggtcccactatggagagctcgcccttaagtatgttgattagctgtggcagctcatcaaggcttgtctttcgcaggaaacctcctatttttgtgattcgcggatcgttgtctatcttgaattcctttacatactgctcaagctgttcaggtgtcagtatcttttccagatcacctgcgttcgtcttcatgctcctgaacttgtatacagatattttctttcccttatagccgacacgtgtatgcccatagaacacgctgccgccatcactcattctgatcatcacagcgagtatgataaataccggtgacagcactataattccaagcagcgaggcaacaatatccaccaggcgctttataaatctgtataccggctttccgctatcttcagctgtctgatatgcctgcatgtcatagcttaaaggcattctatccttcaccagctcgctcaagcatctcatctcatcaaccagctgtgccggcatgacaagctctcgctttgacactgacctgcacagaggacatactgccctgaaaataatcctcagatcaagacctacagtccagttcagtatatattcctgatcgtactcgctttgctcctcctcggtaagcagcctgtgttccctgctgtatacctgccagaagcctatgattccaggctttacagatagactttttctgtgaaatgcagagtattctataaactccggcagtgatggagccggatttcccaccatgctcatgtctccccacagcacattccaggctgacggcagattttcaagtcttaatgccctaagcattcttccaaccggtgtaaatctcggatctttccccttctttccatccagtagccatttatcatatctatccctcgcatccatatacatggtgcggaatttataataataaaatcttcgtccgtttttgccgactctgacaagcgatatgagcaccggtccatggtcgcctgtgactattttgcccataaatgctacaaaccacacaggcactataagtatgcttcctgccacgccaaacagcagatctatcagctttttaataagcagatgccttacacggtatgtcttattcttccatgtgaccactgcgtattttccaaggaaatccatatagtgctcaccgaccttggcctcatactcgttgacattcaggtgcactgtcttacccatctcattgagtactgtaacaaactctctctgcttaaacggatagttgtccggcagatgcacaaacactgagtctatctctgctgttgatatcacctgaagcagattatcggcggttgccacgacctctatcttgtccactatctcaccgaccatatcacagtccagtatcgctatgtttgatatacgaaaatcccagtttcttgtagtctttatcttttttatcactcgctccacctggtctgatgtggtgacaagcatgattttctcattggcccccgagcggtgatattcctttgtcaccagtcttttcagcagctgtctgactatcacagtgaatatagtactcagtataaaggtcatacccatctgccctctggagaaatattcacttgtttttgtaaaatatacgcagccgacggtgattgcgcccacatatacatacatcttcaggacattgtatatttcaggaaagagctttcggtttatcagattatcatctgcaaatgccacaaaatgtaccaccacatatgccaccagctccaccagaaatagtgtaagatagtgctctgtatggtttataagtcccgttctaaagaaaccgaacttgtaccagtttgcaatcagataagatgtaaacatcacaattatatcaagaagtacctcgaggtactggattatccatttttttgagttcatatctttctcccggatttttcctcatcagcagtatctataccggcaagcagtacaagcaggaacggatcatatgccacctcgagcagatgatgctccatgaaggagtgcactccaatcatgactattgctgcaaaaagcacatattgctttgcccctattgccctatgacctataactattaataatataagcactacagcaaatactattattccatactcaaacagcattctaagatacatatcatctataaagaaatactttgcagggtctatcccggtcgggtctgcaatgcctccccagccctgttcctctataaactgtccaaatgccttgatgctatactcactccacactttgtggctcaccatcagcctttgagatagtacagtgtctattttaaccattacagcattgctcgcgctataaaaatagctcagcgccaaaaacagacccgcccacactatcggcaaatatttaaatatctcacacaccctgcgtgccagatttttcctctcaagcagataaatcaggcctgtcagaaccaggaatcctgtcaggcacactgttcccgtaaaggctcctgcttttatatatataaatacacctgccacaattacgattagccatctgagccctgccggatatctgtatttttcgttttcccaaaccctctgccatataccaaggcagcttaccgccaatatcaggtaaaatacatgtgccgcaaagtccgtcggatatataatgccgtatgaatgtctggccgccgctgcatttctcggtgaatagcctatcacatccgctatcacacctgtctgactagctatagctgccactataagcatgaccgataccaccgccgtatatacctttagtatattgtcaaacctcacattttttgccccggcaataagtagtaccggctgcagcagttcataataaccggtttgtaagcctactattccaaatataagaacaactacggcaattgcaagctgctcttttctgctgtaatatccggaaaaaaggaccttggctcctgtatacaaaaccatcgctgcaagaaaaagcttaaaggttcctaccagcacctgctgcgagaacatagtagtctcgtatacacattttgccagcacaataccatataatataaagtatcctacatcccatctgttaattttctgtgttgaaatcgatttatttttgtccataaatgatattttaccatatttgatatataattgccacatttcaaaaaattataacaaaaatttaataaaagctacagtttatgcgtctccgctcaactgtagcctttaaaatcgacctatttaattacttcaggtcatcatctgtaattgtttcaccattcataaccttctgtatcaactgtttagcatgctctacgctgctctcatccggaatagtaacataaactttctgaataggcatagaatatgttgttttcttggtaccctgaccagttactgcaaatgacttaatattccagcttcctccctctgacagctgcatattgataagagatgaaatatctgagcttttaaaatccatggaaatcattccctcaagactgtcaagaataccggagtagttggtcaataatgccgtactgtttgtcatcttatctattactgctgaaataagatccatctgatggcgtcccctgccattatctccgtccggaagattatgcctctcacgggcatatgccaatgcttcctctccgtttaattcatttggaccctttgaaaacttgtaagaatccatagatgaactaaatgcctgttcagaattcacagtaactccacctatttggtctataagagtctcaaaacctgtgaaattaatctgagcatagtagttgattgtatccagatcatatactgaagccaatgtcttcattgaacaatctataccatacaatccacaatgtgtcagtttatcctttgtcccatgagataccgacgtttcaacatagtaatctctaggtgtatttaacaataacacctgtctactctcaggattgacaaaagccagaatatttacatcgcttcggctctttgcaagcttcttgcttctggtatctgatccactgatatatacaacgaacggctcctttgtcacctgaacatccttttctgtcttctcaacctcatatgtcttagtataagcatacaatacctttgtctttgtttcaaaatcttcatacccctctgtatctgtgataacagatacatatgaggtattgagtatcatcgcctttacctcacccgaataaagggcatccaccatctctattgcagacgcatatggctttgtattgattgtactgtctgtttttttattaatatcatctattgtttcctttgtctcttcatatccatatgaatcagtatatgcaaaggtataatccttggcatcatcaatagtctcagcgggatcatccttcataacatagacaacaatcttatcctccatgacatttttatttccggtcatatcattaagtgtgcccatcaccttgctaagcacagacgtgccatataagctacatatgataaccagtatagatataaatgttcccaatcctcgcttaaaatagcccgacgcttttggtttcattatgttttgtcctaagtgaacaagtgcaaacaccaggaactccataattaataaacccccggctgcaaacataatatactttgcaggtaacatttttgtttttacagccatagcaaatatcatagcactagcaataagctgtaaaaccaataatacccttgcaaatattatccattttgtagcctttttctttttcttcatttgtttctccttctatctataaatacatagtacttatctattttaacaaatgattttgatttttcaatattttaacaatgattataacaaaattaataattttttttaaaatttaaatgtgttttccagtgtctcccacttctgatccttatcactcaagttgattggtgtgccatcctcaagtgtgtatccgcttccgtcagcgcttcccggatactctccgacaagctgtggccactcgatgccgattgcaggatcattccatgcaaggccgctctcatctccaaggtgccagaaatctgttaccttgtagcagaactctgctacatctgagagtactaaaaatccgtgtgcaaagccctccggaataaggaactgcttcttgttctcctctgtgagctctactccgaaccacttgccgtatgtctttgaatcgcttcttaagtctacagccacatcaaatactgagccttttactgcacgcacaagctttgcctgtgggtattccttctggaaatggagtccgcggagcactccctttgtggagcatgactgattatcctgtacgaacactctgtcaatgccagcttcctgcatatcctttgaattgtatgtctccataaagtatccacggttgtctccatgcactgtaggctcgatgatgcaaagtccttcgattccacctacgtttttctgtactttaatctgtcccatgatttctatgtcctttcttgtattacgtgaacatcccaacatctaactcaacctcgctacttcgtagcttctttgctcactaaaattctatctcctgcagatatctgtgcagcgcatcctgccatgtagggagtggcttaaatccattctccacgagcttgctcttgtccagtctgctgttaaacggacgtgctgcctttgacacaccgtactctgctgttgtaacaggtgctactgtaagtctgtcctcagaatactctgtatgaccaagctccactgcctgcttaaagatttcctttgtaaaatcataccagcttatatatccaccctcgtttgtagcgtgatagtaaccgtatttatcagtctctatcatatctacgagcaatcttgaaaggtcgagtgtatatgtcggtgtaccaatctggtcacttactactgtaagcttatcgtgtgtcttgccgacatttagcattgtcttgatgaagttcttgccgtttacaccaaatacccatgctatacgcactataaagtacttctcaagtgtatttgccactgcaagctctccgtcaagctttgtctgtccatatacattgagtggtgcatagtccttgcagtcaggctgccatggtgtggtgccctgtccgtcaaatacataatctgtgctgatatataccatcttggcatctatcttcttgcaggcatccgcgatattctgtgtgccgtctgcgttgattgcatgcacctttgcttttttatcatcatcctcggccagatctactgctgtccatgctgcacagtgtactaccacgtcaggcttaagctctgtgattgttttttccactgcatcacggtctgtgatgtcgagtgagacatatggcatctttgtaactgctgtgccatcatctgctccgctgtactgtggtgctatatctgttccgattccttcgtaaccgcgtgctgcaaggtcgttcattacgtcgtgtccgagctgacctgcaactcctgtaacaaatactttcattttgggtctcctttatacaaatattcgtaaacaggcccaacatatatgcgcaatcccgcatgctttggcatgctttcccgctgcttacgcagctaagattgcttatatacgttgttcctgctctattctagagcctcaaagaatcaaaatgcgcttatgtaagcgagcttacaacacgcatttcgattcttcaaggtttacgaatagcagttatctattcgcgtacatcttctcgtaatagttctggtactctccactgatgattgtctcccaccactcacggttatcaagataccatttgattgtcttcttgatgccgtcctcaaacttggtctctgggagccatccgagctcgttgtggatctttgtagggtcgattgcgtaacgcatatcatgtcccttacgatctcctacgaatgtgataaggctctcaggcttgttgagctccttgcagataatttttacgatttcaaggtttgtcttctcattgtggccacctacattgtaaacctctcctacacgtccgttgtggatgataaggtcgattgccttgcagtgatcctctacataaagccagtcacgtacgttctcgcctgttccgtataccgggagtggcttgtcattaagcgcatttgcaatcataagtgggataagcttctccgggaaatggtatggtccgtagttgtttgagcaacggctgattgttacaggaagtccatatgtgcggtggtaagcaagcacgagtaagtctgctgctgcctttgatgatgaatatgggcttgatgtatggattggtgtatcctcatggaagaaaaggtcagggcggtcaagtggcagatctccgtatacctcatctgttgatacctggtgatatcttttaataccatacttgcggcatgcgtccataagcactgatgttccgatgatatttgtatcaaggaatacctgtgggttctcgattgaacggtcaacgtgtgactctgctgcgaagtttacaaccatatcaggatgctcttcctcaaataatttgtatacagcgtcacggtctgtgatgctctcctttacgaaacggaagtttggattgtccattacaggctcaagtgttgagagatttcctgcatatgtgagacagtctaagcatacgatacggtaatccggatatttgttaagcatgtgaaatacgaagttgcttccgataaatcctgctccacctgttacgataattgtcattttgatttcctcctnnnnnnnnnnnnnnnnnnnnnnnnnnnnnnnnnnnnnnnnnnnnnnnnnnnnnnnnnnnnnnnnnnnnnnnnnnnnnnnnnnnnnnnnnnnnnnnnnnnncttccgataaatcctgctccacctgttacgataattgtcattttgatttcctccttaatataactgctcgcggtattttccatcaagtacgtcctttaagtactgtccgtactgattcttctttactagctcatatgtctttaatacttcatcctttgtaatccagccgtttaagtaagcgatttcctcaagacatgctatcttacggtgctgatgtgtctcaactgtcttgacaaagtttgtagcatctacaaggctctcatgtgttcctgtgtcaagccatgtgaagccctgtcccaaaagctctacattgagggcttttttctcaagatagattctgtttaagtctgttatctcaagctctcctctggctgatggcttaaggttctttgcatactctactacattgttatcgtagaagtaaagacctgtgacacagtaattgctctttggatgctcaggtttttcctcgattgaaatagcctttccttccttatcaaactctacaataccgaatctctcagggtcatctacatagtagccgaatactgtggcgcccttaccgctcttggcattttcaactgcggccttgagtctcttgttgagtccgtgtcctgcgaagatgttgtctccgagaaccatggctactgtgtcatccccgatgaatttctcaccgataacgaatgcctgtgcaagtccgtccgggcttggctgtacctcgtaggtgaggttgacaccaaactgatgtccgtctcctaagagctccttaaatcttggtgtatcctgtggtgttgaaatgatcaggatatctctgatgccggcattcataagcactgacataggatagtagatcattggcttgtcataaattggaagtaactgctttgatgttaccattgtgagtgggtaaagacgtgtgcctgaacctcccgctaatataatacctttcatgttgttctccttcaaactgaaactacgtgctgcatttgatgctttcggtctgtagaatccactgacctgattcatcatttacctgcattataaaaggtgccccaagggcaccttcaagtacttttttatatttttagcatttttcacaaaatatatgcttataatatcctgtttttaaatcattttcgtgcaataaatacacctgcatcctttgtgatatggaaccctccctctgtcttctttctgacaaatgccgcaaattccttatagcggtccacaatatacctgttctggttgccgtggcacgaaagcacatactctatcacaggctctgctttttctaccacaagctcatcctcgtacccatgccagcttacatcaccaaagtattttccaagtattgcctcaccattttctttaccgaattgctcatacagcctttccgctgacagctctatgcggtcatcaaactcctgtaccaggtcgtttatttccttcatatgccgtgagctgtatgtactgcacacaaacacgccaccgggctttagcaccctttggatttcactgcacacggcatccagattgtcacaatagaacagtacatggtctgctatcacgcagtcatacgatgcatccggcttatacagcctgtgggcatccatcacctcatatgtgaagcgcttgtcgtctgcacctacatttctcgtcgcatcccttaccatgccatacgatatatcagtcagggttatctgcatatctgccggtatcctgtctatgttctgtgtccagagagaggcatcaccacagcccacctcaagcaccttttccccctcaaaaaagctgcactcatcaaatacccagctaaaccagctcaccggattcatcgagaaatccctgtgcagattgattctggctgatatatttgaagcatccctgtactgctgctttagcttttgctccatctcgtttatattaaccagctccagcatatgactccagtccacacttcgcccctcgtctatcacctctgaagcctcctgcagtgctgatttcataagcttcatctgctctatcctctcctccacgagaccaagctgcatgtgaagcgactcagacatgacattgctgtccgtgtttctgagtgtcatctccttgatatcatccagggaaaatcccagatatttgaggaacagtatctgctgtagacgcgcaaagtcgtcatcattatagaatctggctccgttttcgtttacgtaggatggttttaaaatattgtgctcgtcatagtacctgatggtcttttttgtaatatgcgctttttttgcaaattctcctgaggagtagtagccgggtagtttcatcgttgcgttgcctttcctcttattttcttacttttgaacttcctatatctaagtatatcataattttctaatacaggatttattaatatttacttattttcattgtttctgcttgtttttccggaaaatgtacttataattataatatcactatgcaacaaggagaaaacaatgaaatacgattatatagtagtaggttccggtctctacggagccatcttcgcccatgaggcaaaggccaagggcaaatcagtgcttgttgtggacaagcgtcctaacatagcaggaaatgtctacaccgaaaagcaggagggcatcaatgtacacatgtacggagcccacatattccacaccaatgacaagagggtctggaactacatcacacagtttgctgagttcaaccgcttcacaaacagccctgtagcaaactacaaaggtgagctgtactcaatgcctttcaatatgtacaccttcaacaagatgtggggtgtggtgacaccggaggaggctgctgcaaaaattgaggagcagaaaaaggaaatcaccggcgagccaaaaaatctcgaggagcaggctatctcgctcgttggccgtgatatctatgagaagctcgtgaagggctacactgagaaacagtggggccgtgattgtaaggagcttccggctttcatcatcaagcgacttcctgttagacttacctttgacaacaattacttcaacgctctttatcagggtattccaatcggtggctacaccaagatggttgaaaatctgctcgacggcattgaggtcagactaaataccgactaccttgagcacaaggctgagcttgatgctcttgctgacaaggttgtatacacaggtccgattgacgcatactttggctttaagctaggtactttggagtaccgctcagtgcgctttgagaatgagaccctcgatattcctaacttccagggaaatgccgctgtcaactatacagaccgcgagactccatggacacgtatcatcgagcacaagtggttcgagttcggtaaggatgaggatggaaatgatctgccaaagactattatcagccgtgagtactcttctgagtggaaggcaggcgatgagccttactaccctgtaaacgatgagaaaaacggacagctctacgccaggtataaggagcttgccgataaggagaccggtgttatattcggtggtcgtctcggcgagtacaagtactacgatatggatactaccattgcttctgtacttgatatgtgtgagaaggagcttggctaatagtcaggcttcccacaaaatgctttgttcatgtcatattcaaaagcgccatggcaatttaccatggcgcttttatttacaatttttttccggccagatttatctcagccgcaggaatatgctccctcaggcactcatatccatattccttcgaatacgcatatatagccggaagctgtcttgacagaaagagcgccggtgcttctgtcaccgagtatgcgccacagtgcccgaactcaagaacatcaccaagctcaagtttcttgagcttcacctcgcgtaccagcacatctgccactgtacagaggcttccgcatagtgtatagtctgtgtccggcaattgtgttaattcttcctcggttctttcttcattttctgatacttcacaatcattgaatgtgtttcctatcggacctgctgttccttttatttctcccaatttttcaccaaaatatatttcgtcagctctatatatactaatcggtggcacctgcatagccatcctctgcccgaagtaattcaggtggtggattcctccatccaaaattgcataattggcatcgcctgtcgatttaaggtcctttacctgtgtgtaatatttaccgcatgaggctgctaggaagcgtcccatctcaatgccaagcggatattcctcggcaaattctctaagcacctctgctgcctcatcaagtgattgtttttccttttcctgccagtcttcctcaaaatactccacacaaagcccagggccatactctacaagctgtggctcaaagccgtatttttcttttaatccggtcagtgcagactttattttttccaagtccttatttattttgcgaagactcttctgtgtgccggaatagtagtggatgcccattaccgcaatacccttaaactcatccggatgcgaaatgatatattcaatatcctcaagcgacatgccaaactggttgccacttgtcaggcgcagtatgacctgtgccttcttttcgaccaatccggcttcctgcgcgccttcagacatacattcaagcatcacctctgatataagcgtcgcatgtcttatgctctcacaggtcagtatgccggcgccatacgaaacggctcgctctatatcgcatttttccttcatcacgcctgaatagatgatgcactccggcttcacacctagcgctatacatatctcaagctctcccgggctgcacacctccacatggtctaatccctccggcagcctgtgaagcagaaacggatttgcctttatcgaaaaacaaagtggtatcctacgtcctcctttacaatcaagagcagcccttatcatggctgctctcttcgcaaactcgtccgtatcaaatacatagtacggtgtctgtctcatatgctttattcctccacaagctctttcacaagcttctcgattgcatcaactgagttgaaattctcaggaaccaaatcctttggtctgattgtgatgtcaaactcatcagtcagctccgatacgagtgaaactatatcaaatgactcaagaattttgtcatcgattagctttgtctccttctcaaaatccacatccggtcttaattcctctaaaatctctaaaattgtgtctctcattttacatttcctccagttttttcatatcatattttccgtttggaagcttaggaagctgctccagcttcttgattttccttggcaccataaagcccgggagctcgtccctcagtgccagcgcgaggcttctcctgtcacagtcacctgtgtagaaaagtatcagcacctcttttgctttattatatataacgcagctttctgcgactccatcgaccacattggcggcatgctccacctcatcaagttccacacggtgtcccatgtgctttatctggcggtccatacgtccacagaaatgaagtatgccgtcctcatcgatccttccgtaatcccctgtgcggtacatccgctcaggataagccttgttgagtggattgagtgtaaatgccgcagctgtcctctccggatcattataataccccagcgccaggattggtccacatacgcatatctcgccctgttctccgacagccggctcatttccatgctcatctatcaggaaaaccctgtaattgtcataggcttttcctataggaagcacctcgtcctcttccaccagatgatccacactataatacgtgcacgaagcagttgcctctgtcggcccatactggtttacaaaatgcgcttccggcagattttcctgccatttcctgagcaccctgcacggcatcactgagcctgagaagcagatttttctaagactcttaagccctacttcctcaaatgccccaagcgatgtgaggatggtaaatgccgaaacactccagccgacactgctgaccttcttatcattcatgtaatcaaacagggcattcggctccataaaatactcttttggaataatcgctgtgctgcagccggtctttagcggcagataaatgtccctgattgccgcgatatagtcaagcggtgactgattgcccagcacatcgtcgccttcaacatgcatcacttcacaatatgcgttgatgtacgtcataagtgacagatgtgatgtcatgactccctttggattgccggtggagcctgacgtgtagataatgtacaacgggtctgtcattgacatctgcctgcggaccgctgtgagcttctccagtgagctgtcatctgtttttcctgcacagcctgccacaacaccaccatctgtatcgttctcactatccatcacagcgtctcctgctgattcactgattttacaattactatcagcgcacgccacctgctcgaagcgcgatatatcctcagcaataaatatctgcggtctatagaagccttctgcctttgctagctcatccactatgctctccacatgctcaagactttccctgtctgcaacaatagcccttgggcacagattttcaagaattttctcaattctcttgtcaggaagcgatgcgtcaatcggcgcatacggtctgcctgcatataccacacccaggaagtatgccggtgtcaccatttttcttccggcaaatactgcaacaggggatctgtctactccaagctgttctatcagatatgctcctgtatttcttgctatatcatacacctgcctaaatgtaatgctgcattcagtatccgaaaatgcaggcttgtcagggtattttgctactgtggcctcaagccactccagtacgtttttcatcttagtcctctttcatgcattaataaacgttgccgaaaaaattatagcacataacatccgaaaaaaatgtcatgtgctatcgaattaagaattcttaagaaagccttaatttttttctgtaggtttttctatatttgattctcctattaaatatatcggtctgtcctttgcctcgagatatagcttcgacagataaagtcccaaaatgcctatgctaagcagttgtatcccacctataaaaagtatgataacgacggtcgaagcccagccggctaccggatctccgaatacaagtctcctgataatgataaagagcattgcaattattgcgacaataaagctgaacactccggctattgaagccatgtatagcggagcgttggaaaacgccactattccgtcaaggctatacaaaaaaagttgccagaatgaccactttgtctcacctgccaccctgtttacattctcaaactcaagccacttcaccttaaagcctacccagccaaacaatccctttgaaaacctgttgtattccttaagcgaaagcagtgcatccacgtatttcctgttcatcagcctgtagtcacgtgccccatcaaccatatttgcctttgatattctgctcataagcctgtaaaattttctggcaaaaaaagatctaatcgctggttcacctttgcgtgtcactcgtcttgtaccgacagcatcataaccctctttattaaggacctgatacatcttcggaagcatttccgggggatcctgaagatctgcatccattattgccacatattcccccaccgcatgctgcaagcctgcatacatggctgcctccttgccaaaattgcgtgaaaaagatatgtattttacaccggaatcatttgcggcaagctcctttgcaacatcgagtgtcccgtccatagagccatcatccactataatcagttcataggacaatcccgctgtctcactctcttgactcatctgatcaaacacctgagttattttattataaaaaagaggcagagcctctttctcgttaaagcatggtaccacaatgcttatcttatttttttccatatcagccaccctgcatataatatcaaataaataaaaaatccgattgctgctcctgccgtatttgtcacaaaatcatcaagctgacaatatcccctgcctgtaaccagctgcgtgtactcaattgctgcgcttataaaagcaccaacaggtattgtaaaccatctcatccaatttttaaaaaccagtggaaacaaaagcccaaatggtataaacaatactatattttctataaaataagcgtgcatctgaagtgtcatgccccatgtgctccacagcaccatatcggcgacgccggttctgcttcccggctcccttgaataatacactatcattataagcgtatacatataggccacaaaggcgccgcagaacagcatatgccagattttgcccactatcttttttcttctctcatctgcctgtgatacctctctcattgtgaaaagatatctcagcagacacacaaaaatatacatcgcaatgcagattaaagccaaatataccgctgacggaagatatttgaacttttcctgtatgtctcttattatataatcctttaaactcaatgtccttttttatgctccttgtaggcacgaatgaactccagctgtcgttcatcgtcctttttctgttcgtcatcagacatatgactcactttaataattatacacaatattatgccaattacaataataccggcacataatataaaaataattaagatttcaggcatagactatttcctccggcagaatttaattactattctctctacagattaaattatatccacttaatttatcttaattcactcatttatgaaccctgataacagcaaaagctgcatgatattctcacacagcttttgtatattacgtgtattatctttggcattaacctttattttaattttgcaacaaccatatccacatatttctgacagatttcctcgctctctgcctcaaccatgacacggataacaggctctgtacccgactcacgcacaagtatacgtcctgtatcgccaagctctgcagtaacctggtcgacagccgcctgaacctcaggatttgcaagtgcctcggccttgtcagccacacgcacattctgaagtacctgtgggtagatactaagcccctcacagagctggctcatcttctgttttctcgccatcatgacctccatcatcttaaggctggtaaggataccatcacctgttgatgcatacttagagaagatgatatgtcctgactgctctccgccgatgcggcagccgttctgctgcatgtactcgtatacatatttatcacctactgcagtctttgcgtagccgattccaagctcatcaagggccttatagagtccaaagtttgacataacagttgtgacaacagtattgttatcaagctttcctctctctttcatgtactttccatatatgtagaggatatggtctcctgtgattacattgcccagttcgtctacacagagacatctgtctgcatctccatcgtatgcgaagcctacatcaagaccattgtccaccacgtacttctgtaagccctcgatatgtgtagagcctgcattattgttgatgtttagaccgtttggctcattgttgatgacatagcactttgctccaagtgcctcaaaaatagactttgccatgttccatgagcttccgttggcacagtcaagacctaccttcatgcccttgaatgagtagacaccaagcgatatgaggtatcccatgtaacggttacggcctgctacatagtcaactgtacatccgatagcatccttatgtgcataaggcaattccttccactcctgaccaaacaggcgcagcttgccgtctatatagtcctcgacaaggagaattgtctcctcatccatcttctctccattgctgttgataagcttgattccattgtcatagtatggattatggcttgccgaaatcatgataccacagtcaaaatcatcggttcttgctacatatgccactgatggagttgtggtaacgtgtaatagatatgcatctgctcccgatgctgtaagtcctgatacaagggagtactcaaacatgtagcttgaacgtcttgtatcctttcctattactatcttcgccggctcgtcgagctgcttctgcttcttaagctctccataataccagcccaaaaatctaccaatctgatatgcgtgctctgctgttaaattgacattggcctctccacggaagccgtctgttccaaagtattttcccattgttgtccccttgtgaataaatttttcttatattatacacttaataaatgtgtttgtgtagtaaaataagcttatttgttaaattattcgacttcataaaatcaattgtttataaatatgataaaattaacatatgtatataaatcaaagctacaaagatatcttatgacactccatataatatctcttctcattcgcttctccgattgagaatgtctttctaggaagcaccccgcccgcatttattgcagggaacaatgtgctcttgtcaatcgactgaagaaagattccacatcccttagtctccctaaccagtccgtgaagtgcctcatcaccatggatatagtctatttccacattgtcatgtgtctcaagatacttgtctaaaataccctggagtatctcaaccgggaggcggtcacctctatttgtgatattaattccggaattctttatttcggtagcgcctgattcaacatactcaaatactatctcatcgccctcagtgctcgcaagtccttgttttgtgatttcagcttcgaaaaacgacagcatgtcctttacatcaacatttgtaagcagtctgtgaataggcttaaactcaagcgcctcactgtgcagattacagatttccacaagagcatgccttgcaggatgagttttcaactgctcctctgtgaattttcctgattttttgatattttcccagcatgtcttcgctgttgcaagggaatggtttccatcacctactgcaaataaaaagcctccacagctattctgttttgctgcaaatgcctctgtcacctgccttgctgcctcaccctcgacagcatagccgcggatatgtccgcctccctgcatgagctctgtatcgtaaagcttacgaagagtatccctgatagcatacacatactcgattattccatgctttacagctgctatatttgcagcatcttcctgtgtagcaccctggcatccatcaattttttgtctgtctatatgatcatcaacaagcagcataacatgtggcagctcaatagctgcattctctcttattttcactctcggaggtatacgtgagattactgttccctctgttgctctgatgagagtcttctttttcgggtcgaaatcatagtcatccagatcaataagtcctactattccaagacgcacccctgactccgtagtacgctcaacaagcacatagccatctgccaccgcttgctttagggttccatctgtgagatatgtatccatagtggtattaatatatttgattctctcatcatcagtcattgaagcatattttgtttttctgccggtttctttgtcatttttgacaccttcccctgacgaattgcaatcattctcctgtttcgcaattgttcccagatatatttcagggaataccacattaagtgttgacggagcatcgcccacatacttttccacagcatcccaataatcagcctgacttgtgaactggtcacaggcgataactgaccatttttccatatctataccatcgtttggcaaaagaatatttgccggattgaaacaatttgacatatcaacaattctcctttaaatatacaaaatatataacaaaaatccgctatactctatagtataacggatttacttttatttgcatatattaaattccttttgttgttagaattcttccaactgcatcatctaatttttctgccggtatctcaccactgttaactgcagacagcactgcattatagctgctctcaaagcctgttgaaacataaagcatgctcattcctgccttaacagctgccacagccgcctcatcctgtgtacataccttattaagagatgcatctgataaatcatctgtaatcaaaaggccattaaagcccatggtagttctcatatagtttacggcacctgctgatgtagagcatggcgtggtttcctctcctgtcacactctggcaaatcacatttcccatcatgactgccggaacacctgcttcaattgccttctgatatggcacaaaatcagatgcctcaagatcttccagcttatctgtcatccagagcattcctgtcgctgaatctgtagtagcctttccttttccgggaaagctctttgctacagaattgattcctgcactattatagctgcttacctgtgctgcaacacagtcacctacagtcgctgactcgctgccaaatgcatatgtatcgttatctgcattatcaccatatgctatatccgctgtcggcccaaaattcatattaagaccattggtagccatatatgagcctatctttcctgcactgctgcccgctgcgtcagcatctccaagctgtgatggtgcctgctgtgcctcatatccattagctgaagcaagaggaagtctttctccaccttcttcatcaattgcaagaaacagattcacgcccagtcgctcctgcgaaaatgactgcagactgctcatcatctttgtaactgcagcctctcctgaaaaattttcctgtctgaaaacaaaaccaccaagaggatatgtaccaatagctgcctttgtcttgttaccggcctgagtgaactctgatacacctgtaatctcctcaggtctcgtaatgaatagctgagctaccttttcctctgttgtcatagaagacagcttcgtcttgacagaatctgacggagtaaatgccggtgctgtctgctgtccatcaacttgtacctgcttagttccatccgtctcctgagtaggattctgtgtctcctgctggctttctgttattttcttattcgccttattccccggcatcacaaaatgcactgctccaaataccagcacaactatcagtgcaattacttctattgtgatgaggtacttatctccattttgtctaaagttcatatttaatccccaaaatttgtatttgttaaatcgttattaggttcgcttacttttcctgataatgcattgctgtattcgtttacagttgcactaggagtatagcctgtatcaccttcaaggaactgatgcactcctgtagccatgtctgcaagtgtagtaggcacctcaacccatgcaccatcaacctttccaccatagaacacctgtggatatgctgtagaatcctctactgtatagtctgcaagatttttaaatactgaaagaatctcatcagtattatagttagtattgacatgtccaatcaggtctgataccatcttaatctttgccgctgtattcatctgcttagctgattcaaaaaccttgaacagcactgttctctgtctttcagcacgcttatagtctcctccggctgtataacgtattctggaatacgcaactgcctgagttccatcaagtgtatatgtgccggctgaatcaatatgggatgagcttgttccacgaaccttattgacctcatcaatatatccgtttatcacctttgcctcagatgcatcaatatcctgtacaatgcctcctacctcatctataatttcaccgactgtattgaaattgactgtaacataattctttatgtctaagtccagatttttgttaagtgtatctactgcaagctccggtccgccaaacgcatgtgcatgtgtcaccttctggtatccatgaccatcaatattcatcatacagtctctgaaaatagataccatgcggattttcttagcatcatgatcaaccctgataatcataatggaatcggaacgtgttcctttatcaagctgatctgagcggctgtcaacaccaaatagtgcaaattcctctatgcctgatttgtctgtaatgttgttatcctcagcctgagtatcagcttttgtcttaactgcctctgtacccggctttatgcctttggcttctttattcttaacattactgctgttaatctttacaagtattatcgctataatagcaataagtacaatcattactgccgtaataattatatttttcttttttttcatctgcactattctccgtcattcatatgtgtctgtgcctgctaattttggtcatcgtccctgccataataattgccataataattaccataatagtttccatagtaatgaccatacttagactcctcaaacctgcacttattgagcacagctccaagaatcttgacgcctgagtcctcaagtgtacgctttgtattgatgattgcacggctgcttgtagcattctgggcagcaactattactgctccgtctacattctttccaactacggccgcatcaatcgcagctcctgtaggaggagtatcgacaagcacatagtcaaagttcttctctccaaactcgataagctctttaaactcctctgtctcaagaagctccgtaggatttggtacctcatgtcctgcaaaaagaatgaacacacccttgatgtttgtcgcatatatcactttgtccaaagatacctgacctgagagataatgtgagagtccgtatatctttccaccgctctccagcttcgctctgattcgtcctacaaggactgacttacgcatatcggtatctactacaaggactgacttcttagagtccgccatcgaacgagccagatccataactacggttgtctttccctcattaggcaagctgctggtaaagaggatggacttcacaccctttccactgaaactgatgcttgttttaagagctcgaagagactccttcattgtatagctctggtcttttatctgattaataactactgtttccattaaattgccctcttcttactcttgctatcgtctgatttagatgactgtttttttttgttttttcttctctttgactttgctccatcatactctgcctcatcaacaggaagtgatgcaagcaccttgaggcctgttctggcctccatatcatctgcattggaaattgtatcgtcaagcatgtatccaagtacaactatgccggcagcaagaaacagtccgagtacagcaccgataactgtattcttaaggatattattattcaccggtgtctttgaagcatatgctgtctggataatctttggctgtgactgatccatattgtcagcgatatactgtgatgaaacttttgcaatctcatctgccactgtttttgaagcttctaaatcagtgtctgtaaccacaatcttgagcacacgtgtatctgtcggattctctattgaaaccctcttactgagctgctcgtatgtctcgtccatatccagattgtcaattacctgtgataaaactgtcctgcctgtgataacgtactcatagtcgtttgtcagactcgagcctacctgaatatcagcaagactggtgatagatgttgacttgctcagtacatacatctctgcagatgcctcatactccggtacaaaagtaatcttggagtataatccaaatactgctgcaagaagcaccattgatgccacaagtgccttccagtgcttcactaattcgtgaaacagcgctactaaatcgatttcaatttcctgatctcttattggttcgttgttttccattttcctaccctttacatatcgtaacattatttttcggtttaatcctatgctatattactacacttcatttcttttgtctatttttagaagtcacaaaaaaagtattaagaatatgtcatattttgtaaataattatgccatataatagaaaagtgccgtttccggcacttttctttattgtattttcatttgctatattttatttgttcctgttctattgttgctgttctagttctgctgtggctgttctgatggttcagtcggtgccaccggctgtggctgtggttttggatttactgttacggttattgaactgcttgcgctattccagcctgccatttcacctgctatagctgtaatctgtacgctaccagccctgtggatagtcacatttccggcagcatccaccgatgcaatcgatggatcacttgacttgtaagaaagccctgctccgtttgaagcacttgctcccagagaaaatggtgcatctccctctgttacagttttattaccgcaacctattgtcacagatggtgtctgatttggctgtggctttgcatttacagtgattgtaattgtcttgctgccggccttatagcttgtagtagcctcagacttgacagtgattgttgcagttccgacacctactatcgtcacattaccgttctcatccactctcactacaccctcattatcacttgagtatgtgagctttgcattatcctctgctgtcacaccgagattgaatgctccgtcaccctctgtcacattataagagccagctccgccaaaactctgcgctttgccggccaccttgtcaacaccaccatatacaattactttttcatctaatgtcacattctcatatagcttcttcgcagctgaataaggcatatttatgcagccatggctgccgctgtacatgtagatatttccaccgaaggtacttctccacgaagcatcatggaatccaattccaccattgaatggtataaagaaattaacccatgacttatatccgtctccccttaagtatctgtccttatctcttgagaagatagaatacactccggtaggtgttccatgaccttttgaaatacatcctgtaacacactgacttgatacaacaagctctccattcttgtatacatataccatctgattggtaagatccacttcacagtaattgccaccatatgtgacatattcacctgtttcttcttcctttgcctcactgtaaactgcttccactgttgcagactttttattgtttattgcctcagcaatcgcctcatacagcttgtttccatctacagtctgtcctgatgatgtaacaggcacatttattatacttccgcctgtagtcttaaactgacctgttttcttctttgacacatcatgcttttttgcaagctctgtacagtatgtagccatattctcaccatcaagtgaaactgacaatccgtcattgcccactataagccactgggctatctgatcctttcctacagcctctgtagctgcttcacctgttgccggtgtgaaattacatgtcaccgtcacatcaagatatgcattggcttcttttaatgccttctttaccagctcgctgtccgcagccttttctccatcaacatatcctgttgcagatgtaagctctaccttatccttcagctcctttacagcgcttgtcagatttgtagctgcattgtcatatacaggtgcatctcccgatacaccgtcaacaccctcaaactgtcctgcctctgcattgtatgctattgtagcacgatatggcacaattgatcttatatcaaaggtctgtgtgtctgcctcagccttcttttgttcgtcatcatttgcctctgcatccgtatcactctgtgccgtagcatcagactgtgactgtgtttttgcagtgatataagagtctacaagagcagtctccagctcatcagacttatccattttaaaaagcttcacctgcttttccggtttcttatccttattggccgcatttatcagttcctgaagatctgctttgtcattgtacttgagtcccaaatccttagctgtcatatcaaatgatgcatcgtcaagcttcactgatatcttatacttgcctactgcagtctttatggctttctttgcctcgtcagcagtcattccacctacatcaactgatgcaagcttgtacttttcagggaatgtcttatatgctttctttccacagcctgacattcccaacgccataagcacacaggccaaaactaccaggagttttatatttttcttcttcatctttgtcctctttgtcctctttatcttaatttttatattattctcacagcaccatattttatcactttcttatatatgcctcaagtgagatttgtcacatattttccggttatttagacacattattcatcattatgataacaaaaaagcttcctaatgacgcacaatatgtaacaggcgtataaaatagttctgataaaccttatcgctcatatgcattttattcaacgcacaaaatactttataattcttatttacacatttatacatatctgtattctttttttcgatttgactgacaaacagcttcatcctttttctaagctgttttttatcagtgttcctaatcaggcaaagctgcaaatagtcgttgataaatttgcttgttttatcaaaccacagctgctttccgcctatactaaagtgctccgcatcccggcctgcctcaatcagcctcatgataaccttctcataatggtcaagcctcttcagtgagctttctatcgaaacgctctgatttacgtcaccgactctatactcataaagtgccttatcatatgcatagatactttcggcatatgccattgggattattgagaactcctgatcctcgtagaataccccctcagagagtgtcagtcctgtatttctataaaactgcgtattatagatcaccccatgcaggctcagcccccaccagaaatcatacagatgctcatccacatatcctgcattatatggtccaccattttttgttatatatttatcgtcgtatggatactcatcagtattttctctctgcagcacatatgatctatagctcatcagcactgcatctgcgaaattctcatgtttattttcattatctctaagataacagatagtttctttcaacacatcagtgtttacccagtcatcagcgtctactaccttaaaatagcttccttttattatttttacgccttcattaattgccgagccatgaccaccgttttctttattcagtatccggtacacgtcaggatatttatttacatatttttgtgcaatctccacactattatcggtagagccgtcatttacaacaacaatgtccagcatatttaaaagagagttatcatcaataataaatgatgataaccctttatccaaaaactttgccgcattgtatgtcggtattattattgatagtatctttttattttctgtttccatatcctatctaattcctgtttctatatgttaatttccacttatatcgctgtctgtcaccatatttgacaatggtagtcagtattattttctgtatagtctgtctgctctgccaacccttttggcaagctcaagcagctttgcaaattgattctcgtaaaagctgttgctcacatgcagcttattaaacagccgaaatactttatatttacgctgtactgcctcatacataagtgcacttttttgagcgagtttcatgttaaactgctctactatcgctctgccggattgtctgtcggtattttttatcaaagctatttgataatagcttgtgattatgcccgacgtctttctgataaagtgttcctttccaccttgtggcatttttgcaaagctcttctctgcctcaagtacattaaatataacctgctccagatccggaagacgcttcacctgactcgctgctgaaacactttgatttacatctccaactctgtatacatacaactcttcctgaataaatctgacagtttttgcatacgaaaacggaacggttgcatactcctggtcttcataaaatacatgctctgtaagcttatatccaagtgctttatagaaccctgtgttatatatcactccgtgaaatgatagaccatcaaatacatcatcccacatatttactatatcctttaaattgtactctcttgtaaaatcaggcacactcacatctgccggtctgtactcatcctttgatatgtcataatacctgaagctttgtatcaccgcatccgaatctacatgctcgagatattcaaccaggtgctttagcgcaagcgtatctacccagtcatccgcatcgaccacctttaaatactttcctctcacatgctccactcctgtgttgattgcagaaccgtgtccaccatttgttttatttactatgacaaaggtatccggataccagtccacaaatttctgcgccacttcaacacttctgtcaggtgtgccgtcatttacgactatcacctcaagcttatcgagtatagccttgtcaatatctatttcctcaaagcggccctccgttgccattttacagttgtgctgtgctgtctgtgcatctgtatccctgcataccagaaatgacgacagccccttattcagaaacttttctgcattatatgttggtattatgattgataatattttactcattaactgttctatccgtcctgattactattattaaaaagagtattgtatactcattaacgcctattcatgaaattaattaccacgcagtctgctataaacccatgctgccatcggaaatatcttaaaacctgtttttctaagcatccagacgctcttcctgctgcacgcctggtacactcccgggtgctcctcacgcagcatctcgttaaacttcttcatctgctcaacgttccttgcatcattgccctttgccagaaatatctggtactcatcatcgactgcctcggctatgccgcgctcaaggtactgcttcttgtaggtctgcagattgccgtgcacgttgttgtactcaaacaatgcatcaagcaccttaaggtgctggtcatgacgcttgatcatcatctttatgtccacgctctgaccactccttccaagtctgtactgatacagcggcagaggtgaaaacgtgatgcttgtgcaatatggtatagggtagagtatatactcctggtcctcgtagaagcagtgctcatccacacgaatatcattcttctgcaatacatcagtacggatggtcatggaatgtatagtgatcagcgggtccatgactgcctcagcaaagccccactccctgttgtagtgataagagttggacactgcctttctgcgctttgtgaccttctttgtcctatcatccaccaggttgaagtcattggatatgacatccgagtgcgtgtgcttcaaaagctgtacaaattgtggcaaaaggctcttgtccagccagtcatcaccatccaccaccttgaaatactttcctgttgcgcgcggtatcgcatagttgatggtagatccatggcctccgttctccttggagagcaccttgaagctgtatggatatttctgctcgtaggtatgtgccaggctggctgtggaatctgtggaaccatcatccactatgagtatctccagacttctgagcacagacaaatctataaacgagtcaagacagttctttatatacttttcaacattgtaagccggaacgactatggttaaaagcttctccatatatgtttctccatgtatacctgtttccttgtgtactactctccgagtccatccttgatgtactgtataagatgttcaagcgcctcactctcatcctcgccattgcagataagctctatctcatcgcctgactttatgcatgctccaagcactgaaagtacactctttgcattagctacatttttctcgtcatatataaatgttacctttgatttaaatttcattgcctctttgcagagattgccggccggacgtaaatgtaatccggtaggattcttgattattattttttgtgctaccacttttattacctcttttcggttatatatctatcaatgtgatgaactgtcagagccgttatttccggtgtttcctgacgatgtgctgcccgatgacgtaccagctgacgatgaaccacctgtgccggtgtcgcctgatgttgtaccgcctgttgttgagcccgaggctgttcctgtaccatcagttcccgttgtgccgcctccgtcacctttccttccgataactatctgaacctttatctcgccccatgtgtacttggtctcatccagatttggctttaccgtcactgtatgtgtacctgcatcaaggcctgtcacatcaattttacccttcagtgtagttcccgaaagcgtatctatatcagactgggtgccgcttactacgacactgctcttatctgttacaaatgtaagcgtatatccatcttccagtccgtcatatgtgatattggagctgttcagcgtcatggttgaagtcgcatttgtttcaacctttatatctatactgagctttgccttgtatgagttcactataaaaactccatccggcagatatcctgtcaggtcaacagatgtacttatatcgtctgttgcgcccgatatatcgattgggcccacatctatagatgtgatattgttcaatgcttctgcattacccttgagcattacagactcctctgatagttctactccgagcacgctctttcctcctgccggtgagcctgtcgtagtacacttgataggtacctccttggtacttaagacatcaactgtcactgctatagactgatactggctgtccacatcaagctttgatatatctatctcatcgccattatcatcaatcagagtgagatcaccgcgatcagttatctgattatctgatattatggtattgtcatcgacctttatatttacattagccgatgctatagttgaaacaactgactcaggacctccgatctttactacctttggatttgcctgtggcttgtttcccagtgctttcgcacctgagagacttccaatcactgatacctttacctcaaactgcttctgcatatatttttcaactgaaagcgggagcatatggtctccaccgttgaaggtaatcgaatgtctgtacttagtgcatccaatatcgacctttacgcttgccttattcgtatcatccttatctactatgatatttgcaaggtcaacatttgcgtaaaaatcggaatcatcaagctcgttcagatagcttctcttacctgataccgaaaagctgatggtcttttccgaatccttgatggtaggccatagccccttgtcaacaaccgaatcgcgccctgtgacggtgactgttgtggtaaatgtctttgtcttgaccgggtcattgagattgtagaccacaagccagagtataaatgcaaatgctatcgcgagtattttaaagcctatattatttgtgaaggtttttagaagcttctttcccattcttaaacctccttttaattaattcaaacttacccggctccctatgtctgttctgcagaagcttaagctgtgtgcgtagatgatcggcatctatatcgtgctcaatctgccccttgtatgctgtagaaactgctcctgtctcctctgagactatgatggtaagcgaatcacttacctcactgactccgaccgctgcacggtgtctggttcccaaatccttcgagagtgccaggctgtctgatagcggaaggtaacatgtagctgacaccacacggttgccacgcacgataaccgctccgtcatgaagcggtgtatttttctcaaaaatattgatgaggagctgacttgtaagtatggcatccacatctattcctgttctgatatactctcccagatttatctcatcctccatgactattagtgctcctgtctttactctgcccatcgcaaagcatgcacgcaccagctcatcgattgtcttgtcggagaatttctcaatctcgcctctgccggtattgaaaaaatcacccaaaaaggtctttccaccaatattctccaaggcatttcgaagctcaggctgaaaaataacaacaagtgccacgagacctatattaaagagtttctcagcaagccacagtattgtatccatctggaacaatgctgcaacaagcacaaacaacagtatgataataaggcccttgaacagattccatgccctcgtggtctttatccacaaaagtatatgatagaagagcactgaaataataagtatctctataatgtctatcacaccgattttgatgcccggcacatttgtgaatgtaaggaactgatccttgaagcgtatcaatacaccactcacattatccatagcgccctcctttctcttatactatgtaactatttgtcatcctcaaatatattttcgtctatttcgagatcttttgcaatagcctctttgctgatattttcctgattatgtctcggaatcttctttccaaggcttcctgtattgccaaagtgctttacaaccttttcctccttggcaatcatcttctttggaactgccttgacgtaataataatattcatcatcctcaaattgtacgttttctgtacgtgcatagtcaagattcataaatataaactgtatgacaacacctgcaaaaatagcagctacagtgctgagcacaagccagattatcttctccggcagtccgagcaccagataagcaacaacaagtgcaaccaactgtatgagtcctcctgctatggtagcaacagtccatgaattattgattttcaatcgtctgacctgatacaccaccagtgtggtgataacaaagattgccataactataaacatctctttgttgtcaagaagctgtcccattgtcacattgagctttgtagtgctctgcccctttttatctaccacctctgcaagcgctgatgcattctgtctgattccatcaaagaaatagtacagcagtgtgccacatattattgcaacaaccgaataagctcttcttaaaagacctgctgcaaccggcataacagatggtatgtgaagctgaaagcatataggtgtgagtatcacaagcatgccatccttcggtgcaaaacgaaaatagacaaaatacagtactaaaaaaagtacaaatgtgatagcacaaacctctatggacagcgcatacatatctaaaagtatcataatcgaagcaatccagagtattgcattcaccggaagcagtgcacacacaagcgctaaaagcagtgccacaagcatcgagctgattttcgccatatagccgatattcaaatctattgttataaatgcgataaatgcaacggcaaatctcacaaccggaagtataaagtgctcatactcaccgcaaaatttgactgccttatccttaatttccagtaacttgttcataaagcctccctaacgcttaatcttttcctcacgggaatatattctgcccactgccttcaggtgatttgcgtatttgcgcacttctcttctgccggccttatatcttgcagtatacaccataattgtgacaaaaatgtaaaccgccataaacgcaatatacagtatgcctattgtgacacctattgccttaaaatcaagcttattgattctgtccaaaagctctgctgcattgacagcaacccacatcacaacaagccctgcaaatgcgaatgtacctgtgaagaagctttttaagccctctttccatatatagtcccatccgtagtagcttgcggactgtttctgcacacggctgtcatcgcttttgctgtcacaaagagcaatattaaacagttcccttactttttcttcgtttatcataaatcatcctcttacctgttatatctcatacggtttttgtcatcctgctgccacagcccttgcaattagatattctcatctgataaaaccctcctaacttccctgtcctatgcaaatacacagcacatatacacgaccgagacatttctttgctatctcgtgcccaatcgactctgccgtactgcctgtagtatatatatcatctactattagtatatggtcatattgtacaatactatccgccacttgaaaagccccctcgagacaatttctgcgttcaacataccccattgtcttgagtggactggtatttttcactctacgcacaagcccttttgccatccttatgcctgttttttcagacaatgcctttgcaaaacactctgcctgattgtagcctctctggcgcatctttttacggtgcatcggcaccggaataataacatctatcccacagctctgtatccagtccgaatatctttccattgctgtctgtgcaaaataagccgcatactcacgtctgtttgaatacttgaacctgtacatggtctgctttatgctgcccttgtatgcaaaaagcgccttgccctgcctgtagctgtcatcttcccgcatctgcctatgatgctcgagtgcccgtgcgcagtcgtcacaatactctcttcgctcagacaaaaccggcttcccgcagcgcatacactgtggctgctcaaccggaaagagcttttcacagcatctgctgtgtatatatctctcaaccggaccaattataccatcacataccggacagcgaggtggaaataccagattgattacgcctctcccaatatcctttattttgttcactaatccccctgactgtaatatccccatttgtaacaatattaacaaaaaagcgacaatacattcctgcaatgcagggacatatcatcgccctcacggctgcctgttataaaacgtatattctagaattcttcatctctcttgcctgcaaggaactctacatactttcctgtaccaatagcaacacatgtcataggctgctctgcagtcattgtattgatgccggtcttttcctcgataagctcctcaagacctctgagcagtgaaccgcctcctgtaagcacgattcctctgtctgcgacatcggctgcaagctccggtggagtcttttcaagcactgagtgcactgcctcaactatctgaagagttgcctcacgaagtgcttcctctgtctcctctgagctgactgtaatagtccttggaagtcctgttacaaggtttcttcctcttacctcaattgtctccggctgtgcgagagggtagcatgtaccaatcttaattttgatatcctcagctgttctctctccgatgagaaggttatgcttcttcctcatgtatctgacaattgcctcatcaaaatcatctccggctatcttgatagatgtgctgactaccgaaccaccgagtgagataactgctatatctgatgtaccgcctccgatatctactatcatatttccgcatggctttgaaatatcaatacctgcaccgattgcagctgcgattggctcctcgataatcttaacatctctggctcctgctgcaaatgtagcatcctcaacggccttcttctcaacctctgtaacaccacttggcacacatacgctcacgagcggctttctgaagctcttcttaccaagcgccttctggatgaagtgcttgatcatcttctctgtaactgtataatctgagataacaccctgacgcagcggcctgactgcaacgatattacccggtgtccttccgagcatgaggcgtgcttcctctccgattgccttaatcttgttggtgtccctgtcaaaggctactactgaaggctcctttaacacaacaccctttccttttatataaacaagtatacttgctgttcctaaatcgattccgatatctgatccgaccattttaatagcccctttcctgccatatctttaaatttacacatacactctcttattatatacaataaatcccatttttcaaactttttttttgaaaaaggtcatatttaataaaattttaaaatttatccttgtctttttccagatatggtttcaaaaaccggcctgtatatgactgttttacctcgcatatctcctcaggtgtgccctgcgctatgacggttccgccgccgtctccgccctcaggtcccatatctatgatatagtcagctgtctttatcacgtcgaggttgtgctcgataacaaccaccgtattgcctccgtctgagagcctgcgcagtatctccacaagcttgtgtacatctgcaaagtgcagtcctgtggtaggctcatcaagtatatatatggtctttccggtgctctttctgctaagctctgtggcaagcttgattcgctgtgcctcaccaccagaaagctctgtggacggctgtcccagcttcacgtaggatagtccgacatcatagagcgactggattttgttctggatctttggcacatttttgaaaaactcaagtgcctcctccactgtcatatcaagaacatcgtatatgctcttgcccttgtactttacatcgagtgtctccctgttatatcgtttgcctccacagacctcacacggcacatatacatcaggcaggaaatgcatctctatcttaaggattccatcaccgccacaggcctcacaccgaccgccctttacattgaaactgaaacggccctttttatagccctttgccttggcatcaggtgttgatgcaaacaggtctcttatcatatcaaacacgcctgtatatgtggcaggattagagcggggtgtacggcctatcggtgactggtcgatgtctatgaccttatcaagctgttcaagaccatctataccatcgtggtcacctgcgatacacctggctctgtttaaggatttggccagatgcttgtagagtatctcattggtcaatgagctctttcccgagcccgacacgcctgtaacacaggtcatgataccaagaggtatctgcacatcaatatttttcaggttattctccctggctcctcttatcgtgatatatccgcttggcttacgcctctcctgtggaaccggtatctttattttgccgctcagatatgctcctgtgagtgattttttgcactttataatgtcctttaacgatcctgctgccactatctccccgccgtgcgagccggctcccggccctacatccacgatataatccgctgcacgcatggtatcctcatcatgctccacaactatgagcgtatttcccagattcttaagattcataagtgcaccaagcagcttgtcgttatccctctgatgcagtccgatacttggctcatcaagtatatatgccacacctacaagccctgagccaatctgcgtggcaagcctgattcgctgggcttccccgcctgaaaggcttgccgtgccacgggtaagggtgaggtaatcaaggccaacctgctgcaaaaagccaactctcgcacggatttcctttagtatctggtctcctatatagtgctgctgctctgtaagttctatatcagcaagaaacttcacaagctccttcacagacatggaggtcatctcatatatgttcttgtccgcaaccgtaacggcaagtgacgacggcttaagcctctgccccttacagctcgtacacggagtaatgcgcataaactgctcatactctgcctttgccgtatcagaaaaggtctctttgtatcggcgctcaacattgtccacaaggccgttccatacaaggtcatagacgccttcgcctctctgacctttgtatctgaccttgagcactctgccatctccaccgtaaaaaagcagttttttcatatctgcagataaatcatcaatcggtgtgtcgagaggaagcccatagccctcatgcagtgcacgaagtgtcgcataggtatagctctttgggtctgtacatgactgccagcccatcacttgtatggcaccctcagatatggaaagcgatgagtcaggcaccataagctgcgggtcaaactccatcttgtagccgagtccgtagcaggtcggacatgctccgaacggattgttgaaggagaagcttctcggctcaacctcatctatgcttatgccacagtcagggcacgcaaaattctgggaaaaagtcatctgttcgccatccacaatatcaactatggcattgccctctgtcagttcaaatacattttcaagtgaatccgtaaggcgcttctctatacccggctttacaaccagacggtctacaacaatgtcaatattgtgctttatatttttctccatcgggatatcctcggagagctcatacatgctgccatctacaatcacacgcacgtatccgctctttttggctctatcgaacagcttctggtgctcacccttgcggcctctgaccaccggtgcaagaagctggatacgggtgcgctcaggcaacgccataacagtatccaccatctggtctatcgtctgctttgtaatggcgcgcccgcacttcggacagtgtggtattccaattcttgcataaagcagtctgaagtaatcatatatctctgtgaccgttccgacagttgaacgtgggttcttgttggtggatttctggtcaatggaaatggcaggcggaagtccctctatagactccacattcggcttctccatctgtcctaaaaactgacgtgcatacgatgaaagtgactccatgtacctgcgctgcccctcagcatatatggtatcaaatgccagtgatgacttgccggagcctgaaagccctgtaaaaacaacaaactcatctctcgggatgtcaagactgacgcactttagattgtgttcgctggcacctcgtattttgatgtattttctttctttttttgccataatttgtgttcctccaaattgcttccaaatatcataagcttttatcgtatatccctcagtgtgtttttcagcataataagcttatccctgtactcagcagccgcctcgaaattgagctctgccgctgcttttttcatctttttctctatatctgcaatatgcttctcaagctcttttttgctcattgactccggatctttgtcaagagcattctcatcggccgctaccttctttgagatagctatgagatcacgcacggatttctgtatagtctgtggcgtgatgccgtgagcctcattgtactcttcctgtacctttctacgacgctttgtctcgtcaattgcgacacgcatggagtctgtaatcttgtcagcgtacatgataacatggccctcactgttacgtgcggcacgtcctatcgtctgtataagtgaggtctctgaacgaaggaagccttccttatccgcatcgagtatggcaacaagtgtaatctccgggatatcaagaccctccctgagcagattgatgccgacgagcacgtcaaatacgtcaagacgcaggtcacgtattatctccgctctctcaagtgtatctatatctgaatgcaggtactttaccctgatgccaagctctgccatatagtttgtgagatcctcagccatacgctttgtgagtgtggtgataagcaccttgtgatggtttgcagtctccttattgacctctgacacaaggtcatcaatctgtccctcaacagggcgcactgatatctcaggatccaaaagtcctgtcggtctgataatctgctccgcacgaagcagctcatgctcattctcatacttattcggagtggctgagacaaagagcatctggtctattttaccctcgaactcctcgaaatttagaggtctgttgtcaagggccgagggcagtct

SEQ ID NO: 349 - DNA, 29934 bp, unidentified
  source 1..29934: mol_type = unassigned DNA
gaatgtggaaatacttactatatacaaacacctgtagacttggattctgaaatgttccaatgcagtagttatgtaggtattacagcaggggcttccaccccaaacaaaattattgaggaggttcaagaacatgtcagaattaagttttgaacaaatgctggaagattccgtaaagactatcagaaatggagagattgtacagggtactgtcatcgatgtaaaagaagatgagattattctgaatatcggttataaagcagacggtattatcacaaagaacgaatactctaacgatgcaagccttgtactcacagatgctgtccacgttggagacacaatggaagcaaaagttctcaaagtcaatgacggagaaggtcaggtaactcttacttacaagagactggcagcagagaaaggcaacaaacgtcttgaagaagcatttgagaatcaggaagtattaaaagctcctgtaactcaggtacttgacggtggactttgtgtaaacgtagacgaagcaagagtattcattcctgcaagcctcgtttccgacacatatgagaaagacctttccaaatatgcagatcaggagattgaattcgttatcacagaattcaacccgagaagacgccgcatcatcggtaaccgtaagcagcttcttcttgctgagaaagcagagaaacagaaagaattaatggagaagatccatgttggcgacacagttgaaggaacagttaagaacgttacagatttcggtgcattcatcgatcttggcggagcagacggacttcttcacatctccgaaatgtcctggggcagagtagagaacccgaagaaagtattcactgttggcgataaagttaaagttcttatcaaagagatcaacggagagaagatcgcactttcccttaaattcccggaagcaaatccatggctcacagcagctgaggacttcgctgtaggaaacgtagttaaaggtaaagttgcacgtatgacagacttcggtgcattcgtagagcttgcacctggtgtagatgcacttcttcatgtatcccagatttccagagagcacgttgccaaaccagcagacgtactgtcaatcggacaggagatcgaagctaaggttgttgacttcaacggcgaagataagaagatcagcctgagcatgaaagctcttgaggcaccggctgaggaagctacagaagaataattaagagaatactcataaatattcagcaaccggctttgtatgaggatgatcatacagagccggttgattatttttttagattacgaatgtggtcagcagttacaggagcatcagaaatgctgcagacagtcaggaaggaatgataggatgtccataaaaggaatttatgatatacactgtcatattgtacccggtgtagacgatggagccacagatataggagaaaccgtaaaattactccggatggaatatgaacagggtgtgcggacggttattgcaactccccatttccgctttcggatgtttgaaacacctgcggagaaagtcagagagcagttcagactggtggagaaagcggcatcagagatcagcccggatctccatgtgtatctgggatgtgagtttcacgccaatatggagatgcttcccatgctcagagaacagaaagtaatgacaatggccggttcgcggtatgttcttacagaattttcccataactcggaagaaagctatatacgggaacgtctcggtgcattgctctccggaggatataagccgatcatggcacatatagaacgttacgaagccacacgtaacagtctggattttgtggaagaactggcagatatgggcgtctatatgcagatcaatgcagacagcatcacaggaaaagatggattttttactaaacggtactgtaataaaatcatgaaagacggactccttcatttcgtcggatcagactgtcacaacagtacaaagaggagcagcaggattggagaggcatatcgtatggtttcagcgaaattcgggcaggactatgcagatgaactgtttattcataatcctgcagaaattctgaaacagaaacaaaaacatgaggctacagattgactttttttattggctgatatacaataaaatcggtttatgtcaattttgctgtttactttcagaaatacataagacagaatattacctgtgaacagtaatgtacaaaactataaagaaaaaagggaaaaggaaattatcagatgttagacaatttgaacagtaactttgagagcagcaaagcacagagacccgatgcaaatgatgatgaagtcgaaatcgacttactggaaatattttatgcgctcaagaaaaaaatccttctggtactgatggttgctcttgccggaggctgtattgcagcagcatatacgcagtttttaatgacaccgatctacagctccacatccagtatccttgtactttcgaaagaaaccacactgacatcactggcggatctgcagttaggtgccagcctgaccagtgattatacagttctgatcacaagtacccctgtgatggaacaggtgatttcagatttggatctggatatgactgcagaacagctgaaaggaagcgtaagtatcaataatcctacagatacccgtatccttgagattactgtcaataatacagattctaaaatggcaaagaagatcgtagatgagattgcgaatgtttcttcatcctatattggcgataaaatggaagttattccgccaaagattattgaagttggtaagattgctactgtaagaacttctccaagcgtaaagaagaatgcagcactcggcttcttactcggtttccttgcatgtgcggcaatcgtggttgtatacgctgtaatggatgatactattaagacagaggaagatattgagaaatacctgggagtttctgttcttgccaaggttcctgacagaaaagattttataaattcgaagaacaggaaatcaaagaacaagaataagaagcaccattaaactgatggaggaatctgagcaatgaagaaactcaatttaacagataaaagaaatccggattatttttacagtgaggcgatcaaaactctgcgtaccaatattcagctgtcgggtcagagcataaagacaattctggttacaagctgttatccaaacgaaggtaagagtgatatagtactcagtcttgcccaggagcttgggagtattggcaagaaggttctccttctggatgcggatatcaggaagactgcatatgccggacgactgggtgtggaagaggaagtgaaaggtctctcacagcttctgagcggtcaggtgggattacaggaggttatttattctacaaactttccgaatatggatatcatattcggaggcccaagtgcaccgaacccgtcaggacttctcagtgagaatatctttaaggtattcttaaaggaaatcagagaatattataattatatcctgatcgatacaccgcctatcggaacagtaattgatgcggcagtgatcggaagatgctgcgatggtgcagtctttctgattgaaccgggaaatgtcaggtaccgggacgcacagaaagcatttaaacagctggaaagaagcggatgccgtattcttggagctgttatgaacaagatagataccagtgatgacaaatattattcttcctattataagcattatggagagtattatcgcagaagcgacgaagaagcccagattaaataatacgggcagttatctggcagtaagacagaaaccatgatcaatgataaaggagaatttggaaaagtgagcaaaataaggaataaaaaaataaaaaagacgaatatcttactgggctttatctgcattctgctggcagttctcctgggctttattcttgtgaccagttataaatcggaacagaaggaatccagacacctgtcagaaattgcggacgaccagcagagtgggattgaagattacgaagcagtaaaagaacgtgcaaaagagctggaggaggtatcttccgaagaagcagaagatacagaagacattaaatcaaagaacacagaagacacaaaagacacagaaaaaacggatacagctgacacagaagatgcagataagacagaagatacaaaagataagacgacagctgcttcaggtattgtgtgctggggagatgatctgatcaatggggaagaatccaatacatattcctatatgacagtacttcagaagcttctgaccgataatggctataatatgacagtagtcaataaaacgcttcagggaggcggcactctctccatgatgaagatggctggtgtaagtgatgaaactattcagagctatattaccagacatcagcaggctgcaaacggtgcccagttgaatgtaacagagaccggaatacgtgatctgacagaagaacagactacaagaaatgatatggattgtattccagttattttcatgggatattatggcggctggaatcatgatcctgcagaactggcagaccagcaggaacagattttaaatacatttcagaataaagatcagtttattgtagtaggaacacgccctatggacggaagcgtaacctctgaagcacttgatcaggtgctcagccagaaatggggagaacactatatcagtcttgcagatgtgactgcacagccgtcttctacctatgaggctcagcaggcaatggcagaggcaatattacagaaactgcaggagcttaattatatcagcaaaaactgatgagataactgaaatacagagattgaaggaatgaaaatgaaaaaaaccacaagaaaagccatcagacagcgtaagatttgtatgcttttgattattatcctgattatagttctttccattcttggcggcggttattatctgttaagccagaaaaatgctgcatcgtcaaaagccggtggtcagaacagtgacagccggaatcagacggatttgaaccaaaacagtgataccgtggaatataaaggtgagatatacaaatataacaatcatctcagcaattatttattcctgggaattgacacaagggaagctgtagatacttatcagtcacaggcagatgccgggcaggcagatgcgattttcctggtgtccatggatcgtgcaacagagaagataaaggttctgtttattccacgagattccatgaccaggatagaagtatttaatccatatggtcagagccttggagagacaacagatcatctgaatatacagtatgctttcggggacggaaaagagaaaagctgtgaactgatgaaaacagcagtttccgatatgctggacggacttccgatccaggggtattgttccatgaacatggatggcatttcagtgattacagatttcgtaggtggaatacagctcacaatccctgatgacagtctcgcagatgtgaattcggaatataaaaaaggtgctgttgtggatatcacaggggaaactgcagaacagtttgtaagatatcgtgacattgacaaaacccagagtgctctggtccgtcaggagagacagaaaacctttcttcaggcactggtgcagaaggctcaggaaaaagcaggagaggacgccggatttgtgacaggtctttatgacagtgttaagagctatacagttacaaatatgggaaatgatatatttgccaaattgctggctgcatcacagaatggaatcactgatacagagacagtaccgggtgagggaacacatggggagaactttgatgagtatcatatcgatgaagatgcattgtcggatttgattatttccatgttttatgagaaaatttgattgtattagtcatagtatgatgaatacagaatacactgtactgtgataaataattatcactgttattattcagagatagtccgtgcagacattctgtacggttatctatataaaaattaatccaaaaggagaggtgcattatgaaaatcgcgaagaaatttatgacacttgctttagtagctgcccttggagtaggatgtgctactgtaggtgtcggtgcagcgccaagcaacacgagtgatttggccgcggtagcgccaagtaagacaagcgaaattactgtggattctaaacagtcttcaatttatgaagttgttaaggaacttgagaaaacacagggctttgctgatctgcaggcaaaatataaagatctggcagatgcttttaaaaaaatcaatgatggtacaatgaagatggaagatttcataaaagtattgaaatccctttctgtagatgaagcagacaaggcagaccttgaagatgccattgctaaactcgaaggaaaaatgattgttacatttgtctatgaattcaacgtactgaagccggaagaagcaaagcctaatgatgacggaacatatgaagtaaagcttaatgttccgagtcttacagacactatggaaggtattcagctttgggtctacagcaaagacggcacaaagaagtttgtagtcattgatccggttaatattgacaaagagggcaaaactcttactgttaccttaaacgatggagatttcttcatggtaatcgcagacgcaaaataatcaataattcggaatcagaacgcagtcgccagagatggcggctgtttttttgtagaaatatgttgcatttttttattgatgtagttataataaaatacggcgtaaatcttttgtctttaaatcgtcgctttgccgcgtttgaagatatggataatacatatcttgaagtatgagtctgccttgaaacacaggcagaatggcgaagcatacccagaatacggaggtaagatatccagtgtggtatgtgatgcaagtgcgcacaggcaccgaagaaaacatccgctgtcagtgtcagcggttaataagcagcaatgtcttagaacgctgctttatcccatattaccaacagaagaaacgatttcagggcgaatggcatatccaggaaagaatcctctttcccgggtatgtctttttaattacccaaaatccggaaaaactggtaaatggactcaagaaagtcatcggactgacgaagctgatcggaaccggcgatgagatcgtcccactggttcaggaagaaatagatttgcttatgaaaataggcacggacaaacagcttgtagagatgtcttccggcattatcgagaatgacagagtgcagatcctggcaggtcctctgatgggaatggaaggaaatatccgcaggatagaccgacataaaagaacagcatatctggaaatagaaatgttcggaagaacagtagaaatgaaggtgggattggaaattataagaaaagaataataaaaaatgatggcatatttacaggaaaacgattctgtaaatatgcctttttgaataaaaaagaaggagaggttaggaaaacgtatgtacaggaaaaaatcaagaggatggtataaacacaaagatttcatattaattgatcttgcgtgtttatttatggctttaatactggcgtatctgattcgaaacggttctgtcaggaacctgtttacactgggaatttatcgcaatgtgatgatatttgtcatattggtggatctgttcctgatcattttgtttgaatcttataaaggagttctgagaagaggacgttatcaggagctgcgttctgttatccggcagatgatcctgatcgaactggcaagtggtctgtacctgtttactgtcagtggcggacgtacattttcaagaataatcctttatcttatgggaattttctatgtgcttttatcctattgtacaagaataatatggaaaaaacgtctgctgcataaaatggcagaaggtggagagcattctctctacattgtaaccaattatgaccttgcatcaaaagtaatccaaaatgtaaaagaacacaattataaccgctacaacatcaatggtctgatactcattgataaagatatgacagggaaagaaattgtaggagtcccggtagtagcagacttaaataacgcaccatcctttatctgtcagcagtgggtagatgaggtctttgtaaatgtagatgaaacatatccataccctcaggaactgatagaagagttgctggaaatgggaatgccggtccatgtaaacctggcaaaagtcagaagtactcccggacagaaacaatttgtggaggcaattggcggatatacagttctgacaaccaccatgaactatgccacagacagacaggcacttgccaaaagagtattggatattcttgggggactggtgggctgcttcctgacaggaatcatttttattttcatagcaccggctatctacatcagttctccgggtccgattttcttctcacagacaaggattggaaaaaacggaaagccatttaagatgtacaaattccggagtatgtatatggatgcagaagaacggaaagcagaattgatggctcagaacaaaatgagtgatggacgtatgttcaaactcgatttcgatccccgagtaatcggaaataagattttgccggacggaaccagaaaaaccggaatcggcgaatttatcaggaaaacatcccttgatgaatttccacagttctggaatgtgctaaatgggagcatgagccttgtaggaactcgtccgatccttcaggacgaactgcgtcaatatgaattacatcacagggctcgaatcgctattaaaccgggaatcactggtatgtggcaggtaagcggacgaagtgacattacagacttcgaagaagttgtaagactggatacagaatatatcagtaactggaattttggcctggatattaaaatactgtttaaaacagtaattatggttctgaagagggaaggatcggtatgaagaaaattaggcagagtccgcacatggaatgcaaaggagcatgaagtggagcggattttgttgttattgtggatgggtttatctgtaaaatatggattgaaagatgtgtacagttttaacaaaattcatatgccaacaagttaggtgagtagcccatgacaggtctacatcaaagactcagtgacggtcggaaaaatagatgtcactgtgagaaaaatgataaccacagtgcgatagattatccggcatggatgataaccacactgttttatataaattgctcggctcaatatgagccttccgtataagtagaaaaagagggaaaggtgcgagaaatggagtataagagaaaggttgataaaaaatgcattccaacttgcaatattatgggagttaatattgcggcaatcaatatggagtggttggtagactatctcgaaaaaaatatttcggaaataaaaggagactacgtatgtgtctcaaatgtacatacaacggtaacaagttttgaagatgcggattactgcgcaattcaaaatggcgggttaatggcaattccagatggcggtcctctttctactgttggtcagaaacgcggtcataagaatatggagcgcacaacaggtccaagtttaatgggagagatttttgagatctctgcaaagaaagggtatcgccattatttttatggcagcaaagaagaaactcttgaattgctacaaaagaagttgatggaaaaatatccagaaattcaaattgctgggatgtacagtcctccgtttagacctctgacggaagaggaagataaggtaattatagagagaattaatgaaactaaaccggactttgtctgggttgggcttggagcgccaaaacaggaaaagtggatggccgcccatcagggaaaaattgatggactgatgcttggtgttggagctggatttgattattatgcagaaaatattaagcgcgctccgatgtggatgcagaaacataatctggagtgggtgtatcgtttagtacaagatccgaagagactgtttaagagatattggagcactaatacgaagtttatttggaacgcgatgataaggggaaagtgaatatgaaaagagtatgtatgattgttccaaatagaatggtaaaaggtggaatagctgcggtcgtaaatggatataggggatcacaactagagaaggactatgaaataacttatgtagagtcatataaagatggaagcaaatttgataagcttttaaaaggtatttgcggatattttcattttgcatatgtattaatgtttcataagccggatgtggttcacattcattcttcttttggaccttcattttatagaaagatgccatttatttatatggcatcctggcgtaaaattccgattgttaatcacatacatggtgctgattttgacgaattctatgtaaatgcaccggaagaaaaaaaggctaagattaaaaaagtatatagtaaatgtaacgtgttgattgctctttctgaggaatggaaagaacgattgagccagattgttccggaagatagaattgaaataattgaaaactatagtgtccttcatgaagatgctttagaggaaaggatgcagagggaatgtaataatacagttctgttccttggagaattaggaaaaagaaaaggctgttatgatattccggcggttatagcacaggtgaaaaaaagtataccggatgtgatttttgttttagctggagcaggaagcgaagctgatgagaaagcaatcaaggagttgattgctgaaaaaggtatatccgataatgtgaaattccctggatgggttcgtggtgatacgaaggataaactgcttagggaagcagatgtattctttttaccatcttataacgagggaatgccaatgtcggtgttggacgcaatggggtatggtcttccagttgtaagtacaaatgtgggtggaattcccaagattgtgcatgatggagagaatggttactgttgtgatccgggtaatgttaatcaatttgcgaaagggattacggaaatacttttagatagaaaagaaagaaaatcattcggggaagcttcttggaaaatcgtaaaagagggatattcgctagaagcacacttaaatcgaattgaacaagcttataagcaagtcttgttaatggatgtataagaggaaaagtatatgaaaattggtatttgtacatgttatgacaatcataattatggcagcatgttgcaagcttatgcaacatatgtgaaatttgtggaattgggatatgactgtgagtttttgtgctatagaaaaaaacttaatacgattcaaaaaatcaagtggttacccagattgttgaataagtatcttatgaaggaaaaatttcgcctgattgaaaaaaagattcaattaaagaaacatcctgatatcaagatgaaagatgcgattcgtcaaagagcatttgatagatttctggagaattttttgaaagataaagtatcagctccatatattggttttgaagcacttagggcaggaagtaaaaactatgatgttgtagttgccggtggcgatcagctgtggattccagctggattgccaacaaattttttcaatttgatgtttgctgatgaaaaagtaaaacgtgtttcatattcaactagctttggtgttacagaggtgcctttttatcagaaaagaagaacaatcgaatatttaaatagaatagagatgcttggagttcgcgagaaaagcggtgcggaactcattgagcgattaacaggaagaaaagccgtagtcgttctagatccaactttattactgaataaagaagaatgggcacaagcaattcctgtaaaacctgtattagaaaatgattatatcttttgttattttttaggagcaaattccgaacatcgaaaggttgcggaagaactatctaggaaaacaggtattcctctttatgatatgccgcatatagatgaatttgttccgtacgatctgcaatttaatgcggaacacttgtatgatatagattcagagcaatttgtgaatttaattcgctatgcaaaatatatatgtaccgactcgttccattgtactgttttttcaatattgcatcataagcaatttttagcatttgaccgttatagtgatcctttaatgatgtcacgtaattcaagaatagctaatctttgtgacataactggactgtcatctagaagatatactggtgatgtgttggagcaaatgaaaaagcctatagattatgacagagtcgatgaaagattggaaaaagaaaaagccatatcggttgcttatattagagaggcgcttgggaagaatgattgaaatcaatgataaggtgaattgtagcggatgtacagcctgctatgctgtttgcccgcagagtgcaattgaaatgaagcttgatgaagaagggtttaaatatccccgggtagataaaaataggtgtgtagaatgtgggttatgtaatagtgtatgtcctatattaaataaaagaaaaataggagaagaaaccacatctggttatattgtacagaataagaatgactccattagattgaagagtacatcaggggcggctataaatgcaattgcagaatatgttatttcatgcggtggagtcgtatttggctgcgagttttcggatgatagagtttgcagacatacaatggcgacagatataagtgatctggggaaatttcaaggttcaaagtatgttcagagcgaactgggagattgctttaaaagtataaaagaacagttagatgcagataaaaaagtactttttataggtatgccctgtcaggtagctggccttgaatcttatattaaaagaaataaagaaaatttatatttaatagacttagcttgccatggagttccttcaccaggagtgttcaaagattttattcagtttttagagcataagtataaaggtaaaatttccaattttgtctttagagataaaacatatgggtattcagcaaccaatattaaagtctattttgccaatggaaagacaattgattgtagaaatgatataaaaacttttacaaggcttatgttcaagggaattacattgcgaccatcgtgttatgaatgtgcttttaaaacaaaacatcgtgtaagcgatataaccatatttgattgcgcattagtaggttcttataataaagatatggatgatgatataggaacaactagtatcttatgtcatagtgataaaggtaaaaaactattagagcaacctgatgtaatagataagatgagaataaaatcagttgatagcgaagagttgattttaacagagggttctatgcttattgcgtcggcaaagaaaagtgaaaatcgggaagcattttttcatgatagagagttaatgacatacgaacaattaacaaataaatatgcacctattacattaaaaatgattattggagatattgttaaaagatctcttcgttatactggcccaataggaaaagcagtaattttatataataaaaagaaaagtatagagaagtatcaaagagaatttatgggaaggagtggtgagaatgaaacagcagattaatggcaataatccaattcgagtattgcatatggctcctattcgcatgggcggtataacagaactcgttctcacattgtccgaaaaaattgattttgaaaaggttcagtttgattatttaacatttgaagatacttttgatcaggcctctaaaagggcaaaagaagcacatagtaccatttatcgagtggatttacaaactgttaaaaatccgattgttagaggcttgaagaaatttttcggtattattaaattagttcattctgagcagattaaaataatacatataaattcgtccacaccatatgaagtattggttgcatttgctgcaaaaatcggaggtgcaaaaaaaataatttatcactctcataatagtagctactatcctggccagaaactcgtaaaattatcagaagtattcaagtggtttatgccttttgtgattacagattatttagcatgctcagatgcagcagcaaggttcatgtttccgaagaaaatcgttgacgcggaaaattataccgttatcaagaatggcgtagattatgataaacacagttttaagcccgaagttcgcactgaattacgaaaaaaatatggattagagaataattttgttttgggccatgtgggaaggtttaatgtacagaaaaatcatgaatttctgattgatatcttttatgaagtctataagcatgataatagtgcaagattgtttttggttggcattggagaaacagaaaatcaaataaaagaaaaagtaaagcgattaggaatagaggaagttgttatttttcatggtctatcagatgaagtgaatcggctttggaatatgttagacgtttttgtaatgccttctctatatgagggattaccagttgcaggagttgaagcacaggcaaatggattgcctttgatcgtgtctaatactataacgcaagagttaaaaataacagatgctgtagaatatataggtttagatgagaaaacatccaagtggtgcgaagtaattgaaaggtataacggatacaaacgaaagaatacacgtatggaaattacgaatgcggggttcaatattgatgatacagcaatacggctagagaggatatatctatcttaaaagaagaaagcacaggtaagctttttcaatgatataattttgcaaaaaaatatttgagttaagcgaaagtagtttggagaaagtaagaacttttgaaatagaactacttctgaaagacgtaggaggaactatgaaaattattgcattttatttgcctcaatttcatgacattccagagaatgatgaatggtggggaaaaggatttactgaatgggtcaacgtcaaaaaggcacaacctttatataaaggacatgaacaaccacgaattccaatgaatgaaaattattataacttattggatgataatgttaaaatctggcaagccaacattgctaaagaatatggcatttatggattttgttattatcattattggtttggaggaaaattgcttttggaaaaaccgatggagcaaatgcttgcaaatccaaaagttgatataccgttttgtattagttgggctaacgaaccgtggacaaaagcttgggtaaatgaaagtaaggtactgatacctcagttttatggtggaaagaaggaatggaaagaacattttgattatttacttccttttttcaaagataatcgatatattaaggaggataataaaccattatttattatatatagggcagaggtcattgattgtctgaatgacatgcttgattattggacagagttagcacgacaaaatggtttttctgggatgaaatatgcttatcagaatttaacttttgatcttatgccgaatagggatgatagtagatttgattataacattgaatttcaacctagttatgcgtggaatgatttgaacaacaaatcagcagtacaaaaatctaaattgtggaattttttgagaaatattaaaagacggatttatgctgaaactgaaaagaggttaggttttgatctgcagagatatttcaaccataaagggaaagaaaaaaatgcgtctgttcttaaaaccgattatgatgaagcctggaaggcaattttagaacatattccagaaaatgaaaagaatataccgggtgcttttgttggatgggataatacgcctagaaaaggacatagagggcaggtatatattggcgacacacctgaaaagttaaataaatatatgagcaagcagattcaacgtgcaaaatcgatatacaaaaaagatatgatttttatgtatgcttggaatgaatgggctgaaggtggatatttagaacctgatgaaagaactggatacaagaatttagaggctattcgggatgctttgaaggcgaataatgaatttccatggtaagttcaggatatcattattagaaaaggctagaaaggttagtagataagatgaaacttaacatccgaaatactataatatttttggtgtttggtatttatcccattattccacaatattttggaataatgggaataagtgcttttaaacttatgtgtttaggaatcgtgctatttgcatgtgtggctttgggaatttcaaaatcagttgctacttcatgcaggaatatccagattgcttttggaatctggctaattattatgtttataaacgcaatactttttaaaggcgttgttgaatatttttatgagatattatgttattacttggtgggttttgtgataattaaatgtttgaataccagaaaacgatttctccgtgcagttgatttattaattattggagcagtagttgcttcaataattggtattgtggaaagtataacggggtttaacgttttccatttgcttaataatatgggggcacagattacattacagccattaagatttggttttagacgaattatttcttttacatatcaaacaatatcattttgtaactattgtatgtttgcattgggactgatagtttatcgtattagtgtttgtagtaaaggaaatgaaagaaaacaaaaatatggtatagcatatggttttgtttttattgctgcattattaacactttcaagatcaatattaatatgtatcataataagtcagcttattcttttgtatttatgtggctataaagttttattaaagaaattattaattattacatcagtgggtatgttagcggtaattatttgttcaattgttcttccagaaattttaaatatattacagaatgttgcatatatgttactcgcagtgtttgatgataattatgcagcaatgctaggaaatgttgatggaacaggaagtggggataggaaagaattattgaaatgggtttgggagtcgatagataataaatggattggaatgggaggcagtgcggagttcgcttattcacttacagaacgttctggaatttattcatatattagaaccaaaacaagtattgaaaatcagtatttgaatttattatatcattatggaattattggattaatttctatgatatgggtttatatacaggtgtttataaaatcgataattcaagctgtaaagaatccttcagagtgggaaggacgtatatcctttccaaagatgttagtagtaatcttgggcacgtattatatatccttttttggtgttcatcaaattgatgaaaaaagaatttttttctgtttgatatttttattgatagcatattgtaataataaagcatatttaacagcatatgaataatagtaaaggggtagaacttaatgattattggattatttggatttgattttattagttcaaataaaggatgtgaagctttaacttatacgtttctttctatgatggaaagaatatgtgatgagaaaaaactttatgtatataattttacatataataaaactttaggaaggattcctgaacaatttccagaaatagaatttaagcagtgtaatattaatttaaaaaatcctagatattggaaaaatgcatttaaacttttaaaaacatgtgatgtattttttgatgcaacatttggagatggattttctgatatatatggaaaaaaatggaatataaaaacagatttaataaaacaaatggtcatttggagtgggactcctctagtattggtgcctcagacatacggtccttataacaatctggtactaaaaaaatgggcaatgagactgattagaaaggcagatttagtatattctcgtgataatttatcagcaaaagttatcaaagaacaaagtggtgtggaaataaaggttggttcagatatggcttttaaacttccatacgatagaaccaaatataaaatcgataatgaaagaataaatattggaataaacgtatcatccttgctatgggatagccagtgggctaaagaaaatcattttggtcttacagttgattataaacaatatcatataaaaattttggaatggttaatagaacagtcaaaatataaaattcatatcattccacatgtgatagatcttgaacagccaaatgctagagaaaatgattatcgtgtatgtttgcaactgaagaaaaaatatggtgataaaattgagattgcaccaccgtttaatacgccgattgaggcaaagagttatattgctaacatggatgtttttattggttcaagaatgcatgcaacgataggttcaatttcgtcaggggttgcaacaattcctttttcatatagtagaaagtttgaaggtctatttggaaatcttgagtatccatatgttatttcagctcggaatttttctttggaagaagcattagaaaaaagtaaatcatggattcaaaactatgaaatattaaaggggtgtggacaaaagtcagtggtggaatcgtatgcaaagttagaattgcttgaaaatgatattaggtgtcttttggagaaaagaaaatgataggtgttataagaaaatttaaaacggcatctccggcagttaaagcatctatggcattattatttgcaaatttgattttaaaagggatttccttaataagtggacctatatttacgagaattatgtcagctgatcaatatgggatagtttcaacatttcaatcttggcagagtctgctgacagtaatcgtaacattaaatttatcgcaaggtgtgtttaataatggaatgttagagtttaaggaaaatagaaatcaatttcaatttgcattagttgttataacagctgtttgtacaggtttgttttttttgatttttgagatatttaaaacgccattattaaatatgtttgaaatacctccggttatggtgtatgtaatggttttatattttttgtttgttccagcatatcaattttggagtgggagacaacggtatgaatataaatataaagcattatcaattattactgtatgtatcggattattttcattacttcttggagtcctgtttgttcttaatgcatcttcagaaaatgaagcaatcgcacgagtatgtgccatggaaggggtaaatatcgtagtcggaattttcttttttatgataattgcgatgaaagctcaatttaaattaagaatagattattgtatctatgctttaaagtttaatataccacttataccacattatatgtcaatgtacatattagcaagttctgacagaatcatgataacaaaaatgatagatacaacatctacagctatttattcagtagcatatacggttgcttctgtcattcaaattctttggacgtcaattgaggcatcattgtcaccttggatttatgaacgcttagatgttcaagatgaggagagtgtaagaaaaactagtggtcagataatgcttacttttgctgtattttgcctgggatgtacattatttgctccggaaataatgacaatactggctcctgattcttataaagcgggcatttacgcgataccagcgattgcaggaggagtttattttacagcagtatattcattatatatgcgaatagagttattttataaaaagacaacatttgctacggtagcatcaacgattgcagcagtatcaaatattattctgaactatatatttattaaattgtttggatttgtggcagccggatatacgacaatggtatgttatgcattgttagcattacttcattatataaatgtcaaaaataaaaaatatgatgatgcaattgataataaaaaaatattggcgatttcaatagttgtcatagttgtttctatattgatttctatactctattcacatagattattaaggtacagttttattcttattatttctttggcagcatttattaagagaaaagcaataatagttatgttgagaaaaagttgaatgtatgttaattctgcgttgtctgacaataagtgtatatgtcgaaaagacttatttaaagtatatataaatgataaaaaatgacatttagaaagtgaaagttagatatgaaagagtcgagtaaatacataaatacatattgtaccgggtgtggtctgtgtcattcagtacaaggaacagaattaaaaatgatagatggtggttttcctaatgttgatgtaaaaaaaggagaatcgttagaattttatcattctgtttgtcctgttttttattataaaggcaagcagaagcatgatatatggggaaatatagaaaaagctttgataggttattcatctaataaaaaaattagatttaaagcggcttcaggaggagcattaactgaaatatgttgttatttattagaaaataaaaaagtcgatgcaataattcatacaacgtatgacccggatgatcagactaaaacgattagttgcgttagtactacagttgaagaggtgataagcagatgtggttcaagatatggaatatctgtaccactcaaagatattttacagatagtacaaagtgacaaaaagtatgcattcgttggaaaaccgtgtgatgtaatggcacttagaagatatttaaataaaaatgagaaattgacaaaaaatattatttatttgttatcttttttttgtgcaggggagcctagtgttaatgcacaggatgaacttttgaaaaaaatgggaacttctaggcagggatgtgatacgctagtatatcgaggaaacggatggcctggttttacaacggttaataccaaagatggtcgcgaactcaagatggaatataaagtagcgtggggtcaatatttaggacgagatataagatatatttgtagattttgcatggatggaacaggagaactggctgatattgtatgtgctgatttttggcagttggataataataatcacccagatttttcagaacatgagggtcgaaatattataattgcaagaaatgagcttggaaaacaattattggatgcgactgttaaaagtggaagaattaacgttgaagaggattttactactaaaattgactcagaattttatttatatcaaccagcgcaattaaaacggaaaggtacaatgaaaactaccataactgcaatgaaattatgtggacgtgatacaccgaaatatagtaagagctttcttaataaatacgcttcacatgttgatttaaaagtaaaattcgatttttttattgggattattaaaagagtaataaaaggaaggttatgagtatatgaagggcattattttagcaggaggatcaggcactcgtctgtacccattaacgaaagttacgagcaagcagcttttaccaatttatgataaaccgatgatttattatccgatgtctgttctgatgaacgctggcatccgcgatattttgattatttccacaccgcaggatactcctcgtttcgagaatctgctgggggatggacaccagtttggtgtgaatctgacctatgcggttcagccgtctccggatggactggcacaggcctttatcattggtgccgactttatcggtgacgattctgtggctatggtgctgggcgacaacatctttgcgggtcatggtctgaagaagcgcctgcaggcagcagtccagaatgcagaaaacggcaagggtgcaacggtgtttggctactatgtggacgatccagagcgttttggtatcgttgagttcgataagaacggtaaggccatttctatcgaggagaagccagaacatccgaagagtaactactgtgtgactggcttgtacttctatgataatcgtgtggtcgagtttgccaagaacctgaaaccgtctgcccgtggtgaattggaaattaccgatctgaaccgtatttatctggaagacggcaccctgaatgtagaactgctgggtcagggcttcacttggctggatacaggtacacatgagagcctggtggatgccaccaatttcgtaaagactgtcgagcaacatcagcatcgtaagattgcttgcctggaagaaatcgcatatctgaacggatggatctgcagagatgagttgatggaagtctatgaggtcatgaaaaagaatcagtacggacagtatctgaaggacgtcatggacggcaagtatcaggaacatctgtattaattagaaaacgagaacaagatacatacaccagtttacaattttataattaatagacttgctgacgaatcagctgttttaaagcctttatgataacatttgattttatatgtgtttcgatgtttctaacgaaattggtcaaaaatatctggctgcgaataccctgacttaattcaaaaagaaactcctgtacactttttgtacgatattcggaaaactgctcatcctgatagggtaagatcttcattgcacaataacagatattgatcagatttaccagcatttcaatacccttgcagcttcgtaccatataactgcaaagtgaccagatggttttctgctcatagtagcttgtttcaatattccactggaacgagtacaaaaacagcggaatatatttcatcctgtcacttcctgtctggtttaatggttctttttcctgataggcacagaaaatctgcaagtcttccgggaaaatggtgctgaaaaacaggcgttttgtaccgtgttctttttcagtagcggtcacataagcctgaatttcccgacatccaaaaaggttggtgatcacacggtgtgctccgatatagtaatcgccgatcttttcattggaaaaagcaaaatctgtttcaacagaaagtctcttcccatgtttggcgggacgtcctctgcggccggtatgtgcaggagcaggatcatacatgacagaatcaatcctggcattgccgataagatccagattctggtattcatcaacgattgaacccagattttgctttgtgtaccagctgtcacagaggataatagcctgctttttctcctgaaattcaggcatgacctgacggatcatggatgcagcaagttccagctttgattcttttttctgccacatgcgatatccaagaggaagtgaaagataagataccctgtcattcttccatacaggtatgcaaagcataatatttacaaagcagtgtccattcagataattggaaccattatgtgcggcatggtcaaagagttttgaaacattctcaaaccgagttccggtctttgctaccatggtatcatccacacaaagaaatatcggctgtgttgccagtgaatccggtatcattctcaaagcaactttagctgtgatattcataaagtgggaataatcaacttttgcataggaatatgcgtggtaaaaggtattgagggattttgtggtaatcccagacaaaaagtgctgatataaaaatcgaatggaatgtacagattccaatgttagtattgataaaacgagtaaaaacaaagtatctgctgttggagcagaaaaagtttcaaaataaatcaaaaaatatttgtgaagtctaccagtcagagtcttttcgttgtataatgtctttgtcgtacaggatcactttcctttgtaatgttttggagcaaactcattatacatcagaaagccctgtacgatatttttttatgaaaaagttgtaaagtgatgatacatagataagtgtagaggagaataaatcatgaatattattgttaccggcggcgctgggtttattggtagtaactttgtattccatatgctgaagaagtatccggattaccggatcatctgtctggacaagctgacctatgcaggcaatctgtccacactggcacctgttatggataacccgaatttccgctttgtgaaggcagatatctgcgaccgcgaagcagtggataaactgtttgaagaagaacatccggacatcgtggtcaactttgcggcagaatctcatgttgaccgttccatcgaagatccgggtatcttcctccagaccaatattatcggtaccagtgtgctgatggatgcttgccgcaagtacggtatccagcgttatcatcaggtttctaccgatgaagtttacggtgacctgccgctggatcgtcctgatctgttcttcaccgaggaaactccgattcacaccagctctccgtacagtagctccaaggctgccgctgacctgctggttctggcttaccaccgtacctacggcctgcctgtgaccatttcccgttgctccaacaactatggtccgtatcacttcccggagaagctgatgattgctaatgctctggctgacaagccgctgcctgtttacggcgagggtctgaacgtccgtgactggctgtatgtggaagatcactgcaaggccattgatctgatcatccacaagggtcgtgttggtgaagtctacaacgtcggtggtcataacgagaagcagaatattgagatcgtgaagattatctgcaaggagcttggcaagccggaaagcttgatcactcatgttggtgatcgcaagggtcacgatatgcgttatgctattgatccgaccaagatccacaatgagctgggctggttgccggagaccaagtttgaggacggcattaaaaagaccatccagtggtatctcgataatcgtgagtggtgggagaccatcatcagcggtgaatatcagaactattatgagaaaatgtacagcaaccgctaacaggaggaaagaacatgaagttttttgtaacaggcgttggcggtcagctgggacatgatgtgatgaatgagctgctgaagcgcggtcatgaaggtgttggttctgatattcaggaaaactacagtggtgttgctgatgattctgcggtgacgaaggctccgtatatagcactggatattactgataaggacgctgctgaaaaagtaattacagaagtaaatccggatgccgtgatccattgtgcagcatggactgctgtggacatggcagaggatgatgataaagtagcgaaggttcgtgctatcaatgcaggcggcacgcagaacattgcagatgtttgcaagaaactgaactgcaagatgacctatatcagcacggactatgtgtttgatggtcagggtacagagccttggcagccggactgcaaggattataagcctttgaatgtatacggtcagacaaagctggaaggtgagttggcagtcagccagacactggagaagtatttcattgtccgcattgcttgggtgtttgggctgaatggtaagaactttatcaagactatgctgaatgtcggcaagacacatgacactgtccgtgtggtcaatgaccagatcggcacaccgacctatacatacgatttggctcgactgctcgttgatatgaatgaaaccgaaaaatatggttattatcatgcaaccaacgagggcggctatatcagctggtatgatttcacgaaagaaatttatcatcaggctggctataagacagcagtgcttccggtaagtacggaagagtacggtctgagtaaagcagctcgcccatttaacagccgcctggataagagcaagctggtggaagctggttttactccgcttccgacttggcaggatgcactgagccgttacctgaaagaaattgagcagtaatagaggagatagaagaaatgggacagattaaagttgagaaaaatgtaggtggcattgaggggctttgcgtgattgagcctgctgttcatggtgatgcccgtggctattttatggaaacctacaacgaaaaagacatgaaggaagctggcatcgacattcattttgtacaggataatcagtccatgtccacgaagggcgtgctgcgcggtttgcatttccagaagcagtatccgcagtgcaagctggtacgcgctgtgcgcggaactgtgtttgatgtcgctgttgatcttagaagcaattccgaaacttatggtaagtggtatggtgtgactttgtctgctgagaataagaagcagttcctcattccggagggatttgcacacggtttccttgttctgagcgatgaagcagagttctgctataaggttaatgacttctggcatccgaacgatgaaggtggtatggcttggaacgacccggagattggtattgaatggccggaactgaagggtgagtacaagggaagcgcaagtgcagaaggctacacgctgaaagatggtactgcgctgaatctgagtgataaggatcagaagtggcttggattgaaagatacttttaaattctgattagaaggctgtgtgagaaatcgtacggtagctgctcagaaatgcacactgcgactggtgagcagtaggtgatgtttatcaaaggataagcggctaagatgtagaagcagatatcataataaaaggaatattatataaatgagtgaggcaataggaacacgggaatttgcagagaaatttggcgttactccggccacggtatcaaagtggtgcagggaaggtaaaattccaaactgcaatcaagatggaaaagaatcaccgtggcatattccaaaggatgccgttccaccagttggatataagcgaaggaaaaagtgatattggaaaggagcagcttatagatcaagaactatttaatccacaatcttcttacgtaagctcctcccgaatcatttacaccccatcaacctttgcccggacatccttgctccatctgcaggaggtcggctctttgcaggctgttcatccacatatatcccagagatcggatctggtgtctttcctgtgtttcgttgtcttgtctggcgaggggcagacctatcagctgagcgagggagactgagggcatgcggtgtcagatactatgaaatactgataaaatgagtgaacatatcctaaaagcttcctaaagaaagtataatatgaatttttagtgggtgcttgagtcggaacctatgaatatagctggtcggaacaaataatcataagataaatatacgaatctgtatgtgttaagggatacccagttaaagcaatgtaagcacagtaaggagagattatgaaaacaacattacttatcatggcggccggaatcggcagccgatttggaacaggaataaagcagttggaaccggtcgatgatactgaccatatcatcatggactactcaatccatgatgcgattgaggttggattcaaccatgtagtatttatcatccgtaaggatattgagaaggagtttaaagatgttattggtgatcgtattgcttctgtctgctccgctcatgatgtaactgtagactatgttttccaggatattaaggatattccgggaactttaccggaaggtcgtacaaagccgtggggaaccggacaggctgtacttgctgcaaagaaggttatcaagactccctttattgtgatcaatgcggacgattactatggcagggaaggcttcaaggctgttcatgagtatctgatgaatggtggcaagtcctgcatggcaggctttgtgctgagtaacactctgtctgataacggcggtgtgactcgtggtatctgcaagatggatgagaatggaaacttgactgagattgtagaaactaagaatatcgtgaagactgcagatggcgcagaagcaggcggagtgtctgttgatgtgaattctctggtttctatgaacatgtgggggctgacaccgggattcctggatgtgctggagaacggatttaaggagttcttcgataaagaagtaccgagcaatccgctaaaggctgagtatctgattcctgtcttcatcggtgagctgttggagcagggaaagatgtcagtgaaggttctgaaaaccaacgatacctggtacggtatgacctatcacgaagatgtcgcatctgtgaaagacagcttcaggaagatgcaggagaatggtgtgtacaaagctgatctgttcagtgatctgtaaaaaatgatgaaagaaacaattgatttactcggaaagatcctcactaacatcctgactgctctctacgagccgtttggtttttcactcctgctttcattccttgctatgtttttctatctatatgcttataaaccaatcgaagcaggaaaaggctggaagaatgctatggtgacatggtacagggagttcaaagagagtatattcttcagaaaattgtttttcttagcctttgtaacttcccttattctgttccggacattattgaatcgaaacctgtggatgaacccgttgtctaatattatgggtggctggggcatctgggagatcgtaaatggagagcagcaacttaccacggagtgcattgagaatgtgattatgatggttccgttttctgcagtagtgatgtggacatttcatggcaaagcaggcaatggttggaataatatattgtggctaagtgggaagatagcgtttggcttttcgttgatgatagagatgttgcaactgctattacggctcggcacattccaattatcagacatcttctataacacagttggtggagtgcttggaggtatgtgctactggggaataataaaaattaagaaaggtctgtaaaagaaaaaacttcatggtgtactgggagaggttaaacggtatgtttggttatacatggggcagacactatgaaatatcttgatttacgctctcttttgatccacttttacactgaatattgcctcattatcatttccataagcagctggcaagacatcatttcgtttgatagaaaacagccttgacttgtgaaaaatctatacccaaggaggactcccaaatgacaaacttaaattcccttttcctgtcccaggcctacaatgactgctgggacgattacaacagatctttaaaactccgcagcttcccacgttgggactatgtgatcctgactgcttccaatgaacagcaggcagaaggcttccgtaaacagattgcggacaggcagaacttcctgccgagaggcacgaagtttattgccatcccggaccgtgatggcaggcgtgtcggatccggcggggctacgctggaggttctgagatatcttcatgaacaggaagaatcttttgacagccttcgtgtgctggtgattcattccggcggggacagtaagcgtgttcctcagtattctgcgctgggtaagcttttttcgccggtgcctcatgaattacccaatggacgcagttccactttatttgatgaattcatgatatgcatgagttctgttccttcacggattcgtgaagggatggtgttgctgtcgggagatgtactgcttttatttaatcctcttcagattgactacaacaatgtgggtgcagctgccatatcctttaaggaaaacgtagagaccggcaagaaccatggtgtttatctgaatggaccggacggaaatgtgaagtgctgtctgcagaagaaatctgtggaggtcctgcgggaagcaggagcagtcaatgaatccggttgtgtggatattgataccggggcactgatctttagtactgacattatgaaatctttatattcactgattgaaacagacgcggactatgacagaaatgtcaatgagagaacgcgtctttctctttacgctgattttctttatcctctggcttcggattctacgctggaggatttttacagggagaagccggagggtgaattctgtccggagctgacggctgccagaacccgtgtgtgggaggtgctgcgtccctacaggatgaagcttctgcgtctggcacctgcgaagtttattcattttggaacgaccagggagatactggagctgatgaacggaggtgtggatgagtaccattatctgggatggagccggaaagtgggcagcagtatccgcagtgatgtgtctggctataacagtgtactgagcagcagggcatctgttgggaaggactgttatctggaggtttcttatgtgcatggaaattccaggattggcagccacagtgtgctctcttacatagatgtgcaggatcaggttattcctgataatgttgttctccatgggctgaagcagaga

SEQ ID NO: 350 - DNA, 27813 bp, unidentified
  source 1..27813: mol_type = unassigned DNA
gaaacccatgcaggtcggatgaatcctatcctttgtcggagatgtccttggagatgtcggcgaagaaatcgtggttcagtatcctgcatatccgttgcagcatggcggtatccagactctctttgttgaatatgcggtagacgttagacctgtcgcatgacagatgccgtgcaaaccaactgacgctgcgttcctgccgtttcagttcgtttcttatggataatccgatatgtctcttcattcgccgtttatttgtttgatacagtgtggtgtaaataaaaacgcggactcgctcccgtatcggaatccgaggtcttcgactacctttctccccgaatacaggaatgaagcccgcgccataaacggacgcggacgtcaaactttgttcctcggggagagttgaaagtgtcgaagtttcagattcccgaaaaaaagtaacgcctttttactatgtatgttcagcagacttctcgaagcctgccgactgcaaaggtatgaaatattttcgattctgggaatacggattcggtctgcccggtatatgctccgtcgctttccttttgcacccttttgctttccgattgcgtagcgtcggggagggatattgcgccgatattttgcaaaacgaaaaaatattgctaattttacatctaataagcggacgttgccgcaaaacacgaaaattccgttaagccgagagcataaccggttcgtcattctgagtgaaacgaagaatctgaaacagatgtttcgctgcgctcaacatgacggacgaggctgccgaggattgggaataatgttgttgaataaaatttactaacacaataacgttttatgtcagaatttcacaaatatcgttcgatttatccgcacgatgaacttatgtcccgtctgcgcaaaatcaagcatgtcgcactcgatatggacggaacaatctacatgggaatgtcgctgttcccgttcacgaaaccgttcctcgcaggcttgaagggacagggcgtcaactattcgttcctcaccaacaatccgtcgaaatgtatcgccgactacctccacaaactcgaaaacatgggtatcgccgcgacggaggaggagatgtatacgacggctctcgccactatcgactacatcaagaccaactatccgcaggcaaagcgtctgttcctgctcggtacgccgtcgatgatttcggagttcgagaaagcgggtttcgaatcgacagccgacgacccgaacgatgttcccgacgtgattgtcgccgcgttcgacatgtcgctcgtttacagccgcctgtgccgtgccgcatggtggatttcgcagggcgtgccttatatcgcgaccaaccccgaccgtgtctgcccgaccgaccagaaggtcgtgctggtcgattgcggttcgatttgcgcgtgccttgcacacgcgacgggtcgcaaaccggacatcacgctcggcaagcccgacccgaacatgctttcgggcatcgtgaaccgctacggtctgcaatcggacgaaatcgcgatggtcggcgaccgcatctataccgacatcgaaatggcgcacaatgccaacgctttcggcgtgctcgtcctttcgggcgaaacgacgctcgaagtcgccgatgccgcaccgaagcagccgcacctgatttgcgacagcatcgaggttctcggcgaactgattgccgaggcgcataaataaccgacctaaactaccgaccatgactgctgaacaaacttcaaaattcaaatattggcaatggcgcaccatcatcgttacgatgattggctacgcgctgttctatttcgtgcgcaagaacttctcgttcgcgatgcccggtcttgccgccgaatacggaatctcgaacacgagtttcggtatcatcctttcgattgtcggactggtctacggattctcgcgttttgcgaacggacttatcgccgaccgcatgaacgcccgctaccacatgtcgctgggcttgctgctctgcgcattggcgagcctcgcatttggattcgtgccgaagattctcggcatcgaaatcggtatcgcgccgcactcgctcgtcgtggcgttcggcgtgctgctggtgctgaacaacgtgtttcaaggcagcggcttcccgccgtgcgcccgtctgctctcgcactggattccgccgcacgaactcgccaccaagatgtccgtctggaacacttcgcactcgataggcgcgggtttgctcgcgattctgtgcggtttcgtcatgggcaacatgggaagcgatttgagcagcgacggtgccgccgtcgagaagatgacgcgcaactatctgtctgccaacttcaaggaggatgtcaagaaatcggacatacgtatcgccaaggttaccggcgtggagatagccgacgaggagggcaagacaatcgcatacgtcgattacgtctataagccgaattacgaggagggtcgctccgtgcagcaggtcttcacgttcgaccacgccaactacatggctgtgaagaacctcgtcgatgccgacaggaacatctcgacggaacagatagccgccgatacgggtatgccgcaggtgcaggcgaaggcgatgcagagcatcgtttcgctgacgaccaatgcgggcgcatggcagtggtgcttctggctgccggctcttatcgcgcttgccggcgcgataggtctgttcgcattcctgcgcgatacgccgaagtcggtcggactgcccgaactcgaaaacaccagaacgtccatcggcgacgataccgaccctgccgagtacaaacgcttcgtgcgcgagaaggtctatcgcaaccgcctgatatggattctcgcgttcgcgaacttcttcgtatacgtagtccgcttctcggttctcgactggggaccgaaattcctcaccgaggctcgcgacatgtcgtactcgtatgcgggctggacggtggcgatattcgaaatcttcggtatcgtcggcatgctgtttgccggctgggcgacggacaagttcttcgccggtcgcgcgcaccgcacctgcgtgttctgtatgctcggcacggctgtgttcatgacggcgttctacatgctgcctaacgacattcatccgctggtgcttatctgcgtactcgccatggcgggattctgcatctacggtccgcaggctcttatcggcatcgccgcagccaatcaggctaccaagaaggctgccgcgacggcaaacggacttacgggcatattcggatatttgagcgtgttcgtatcggcgttgggcgtcggcgttctggtagaccatttcggctggaactacgtgttcctcggcatgattgccattgcggtcgtcggcatgctcgtgttcatgctgatgtggagcgcgaaggcggacggctacgaggaggcgtaactcgtccgacaggctataaatgctgtccgcgccgtatcatcgatacggcgcggatgctttttaaggactttaaggaccttaaagactttaaagtccttaattgatttctgctaaaactcgctcgtaaagtggaactttatggcagggaatttctcctgcgcgagagccagcgaataactcgtgtcggcgaggaaaacgtcgcgtccgtgcttgtccacagccatgttggtgtgcttacggtgtttgaagtcggcgagttgcgccgcgtcgtcgctctcaatccaacacgccttgtgaatcgatataggctcccagcggcatttcgcgccgtattcgtgttcgagacggtactcgatgacctcgaactgcaacgccccgaccgtgccgatgattttgcgaccgttgagcgacgaggtgaagagttgcgctacaccctcgtccataagttggtcgatgcccttggcgagttgcttgaatttcagcgggtcggcattctcgatatagcggaacaattccggcgagaacgacggaatgcccgtgaatttcagtttctctccctcggtgaacgtgtcgccgattttgaagttgcccgaatcgtgcagaccgacgatgtcgcccgggtaggcgaagtctatcaccgatttcttctccgccatgaacgccgtcggcgacgagaatttcagcgacttgccgctgctgacgtgcagatagttcttgttgcgctcgaagacgcccgagcatatcttcatgaaggcgatgcggtcgcggtggttcgggtccatgttcgcgtgaatcttgaacacgaagcccgtcagtttcggttcgtccggctcgaccttgcgcgtctgcgtcgtggacggacgcggcgacggcgcgatgcggatgaagcattcgagcagttcgcggacgccgaaattgttgattgccgaaccgaagaatatcggcgcgagacgacctttcagatactccccgcggtcgaactcctcgtagacgccctccaccagttcgacgtcgttgcgcagttgggcggcatatctgtcgccgacgagcgcgtcgagttgcggcgatgcgatgtcgtcgatttcgaccgtcgaggcgtccgccgtctggcgttcgtcggaggtgaagaggtttatgttgtgttcgtagagattgtatacgcccttgaacgtcggtccgctcgaaatcgggaacgccagcggacgcaccttgatttgcaactccttctcgacctcgtcgagcaggtcgaacgggtccttgcacgggcggtcgagtttgttgatgaagaccatcacgggagtgttgcgcatgcggcagacgttcatcagtttacgcgtctgcgtctcgacgcccttcgcaccgtcgatgacgatgattaccgaatcgacggctgtcaacgtgcggtaggtgtcctcggcgaaatcctcgtgtccgggggtgtcgagaatgttgattttcaccccttcgtattcgaaacccatgaccgatgtcgccaccgagattccgcgctgacgctcgatttccatgaaatcggaggtcgctccgcgcttgattttgttgctcttgaccgcgccggcgacatgaatcgcgccgccgaacaggagcagtttctcggtaagtgtggtctttccggcatccggatgcgaaattatcgcgaacgttcgtcttctgtcgatttcctctcgtaatgtcatttcttgtgtattgctgtttttctgttagttcttctgcggcggatagtcgatgttgtagtgcagtccgaccgactccttgcattcgcgcgcctgctttaccgtcagataagcgacggcagtcatgttgcgcagttcgcacaactcgcggcacggcttggtgtggttgtacaactcctccgtctcctgccagattatcgccagacgcttcaaggcgcgttccagacgcaggttggagcggacgatgccgacgtagttggacatgatgttctgcaactccttgcggttttggagtacgagtaccatctcctccgccgacgccgtaccctcgaagtcccagtcgggaataccctcctgaaaacctaccttgtctatcgactgcgccgcgtggcggactgcctggtcggagtagacgaatgcctcggtaagcgagttggacgccagacggttcgcgccgtgcagccccgtgcaggaactctcgccgaggacgtacagacgcttgatggaactctcgccgttgctgtccaccgctactccgccgcagcagtagtgcgcagcagggcatacgggaatcatgtctttcgttatgtcgatgcctatcgacttgcacttctcgtagatgttcgggaagtggtggcgcgtctgctcggcaggcatgtgcgtaacgtcgaggtaaacgaactcctcgccgcggattttcaattcgtggtctatcgaacgcgccactacgtcgcgcggagcgagcgagcgcatcgggtgatacttgtccataaactcctgcccgttctgcaagcgcaggatgccgccgtagccgcgcatcgcctcggtgatgaggaacgacggacgttcgcccggatgatagagcgacgtcgggtggaactggatgtactgcatgttgcgggtgatggctttggcgcggtggcacatggcgatgccgtcgcccgtcgcgacgaccggattggtcgtggtgttgtagatgttgccgcagccgcctgccgcaacgacagtgaatttggcgagtatcgtcttgatgtcgttggtctcggtgtcgagtacgtaggctccgaagcaggcgagtccgcgcgtgtggcgcgtaacgatttcgcccagatgatgctgcgtcagcaggtcgatggcgaagtggtgttcgagaaccgtgattcgcgggttgctgcgtacctgctcgatgagcgcgcgttcgatttcggcacccgtaaggtcgctgtggtgcaggatgcggtgttcggagtgtccgccctcgcggtgaaggtcgaaccgtccgtcctccgtgcggtcgaaatcgacgccccatccgatgaggtctttcgccatctcgggagcgcgtctcacgacgagttccaccgcgtcgcggtcgcatttgcccgctccgcagacgagcgtgtcctcaatatgtttctcgaacgtgtcgggcagataggttaccgaacagatgccgccctgggcatagttggtgttgcattcgatgagttcgcctttcgttacgagcgtaacgtttccgatgcgcgaggctttgagcgcgaaactcagtcccgccgaacccgaaccgattaccagaaaatcgcttttcattgcaattgtgttttgtacgagcgcaaaggtacaaaaaaatggtgtacgaaaatcgaaaaacgctcgaaagtgggggcggcggactacgaccttaacgactttaaagtctttaaggtccttaaagtcgttaaagaaacaaggcaggaccgtaaagtcctgccttgtcgtgtatgcggtctgagattatttcaactcaggacctgctgcaacgagtgccttgccggcttcgttggtggtgtacttgccgaagttcttgatgaagcgtcctgcaaggtcttccgccttcttcgtccactccgcagcatctgcataagtgtcgcgagggtcgagaatcttagggtctacgcccggcaactcggtcggaacctcgaagttgaagataggaatgttcttcgtaggagcggtcttgatggaaccgtcgaggatagcgtcgatgataccgcgggtgtcgcgaatcgagatacgcttgcctgtaccgttccagccggtgtttacgaggtatgccttcgcgccgctcttctccatgcgcttgacgagttcctctgcgtacttggtagggtggagttcgaggaacgcctgaccgaagcaagccgagaaagtcggggtaggctcggtgatgccgcgctcggtacctgccaacttcgcggtgaatccgctgaggaagtagtacttggtctgctccggagtgagaatcgaaaccggaggaagcacgccgaatgcgtctgccgacaggaagattacgttctttgcggcaggagcagccgaaatcggcttcacgatgttgttgatgtggtagataggatacgaaacgcgggtattctcggttacgctcttgtcgtcgaaatcgattttgccgtttgcatccaccgtaacgttctccaacagagcgtcgcgcttgattgcgttgtagatgtccggctccgactccttgtcgagtttgatgaccttcgcatagcagccgccctcgaagttgaagatgccgttgtcgtcccagccgtgctcgtcgtcgccaatcaactgacgcttagggtcggtcgaaagtgtggtcttgccggtacccgacagaccgaagaagatagcggtttcgcccttctcgttggtgttagccgagcagtgcatcgaagcgatgcctttgagcggcagatagtagttcatcatcgagaacatacccttcttcatctcgccgccgtaccaggtgttgatgattacctgctcgcgcgaggtgatgttgaatacgactgcggtttcggagttgagaccgagttccttgtagttctcgaccttagccttcgatgcgttgtagaccacgaagtcaggctcgaacactttgagttcctcctcggtagggcggatgaacatgttcttcacgaagtgagcctgccaagcgacctccatgatgaagcggacagccatgcgggtatccttgttggctccgcagaaaccgtctacaacatagagtttcttgcccgacaactccttctgagcgatagccttgacggcagcccaagcctcctccgaagccggtttgttgtcgttcttgtactcctccgaagtccaccatacggtgtttttcgaattctcgtccattacgatgaacttgtccttaggcgaacgtccggtgtagacgccggtcattacgttcactgcgcccaactcggttactacgcccttgtcgtagccggtgagtcccggcttggtctcctcctcgaacaactgctcgtaggaaggattgtagattacttcggtcgttccggtgatgccgtacttcgccaaatcttctttcttgaaagccataatcttttctattttaatgattaacctcttctgtttccgttgcgccccaccgcttccgatttatgtcgtacagcggtctgacgccttcttttccgactgcaaatatatcgctttattttgaattgtgaaataaataacactaaatattcaaaaaaattacaaacaaatcttttcgtgcgatttttcggattccgccgttaccgctcatgctgaataatcgacggttcgtcgtgttattcgtgcaaaaatcgaaactttatttctccgttcgcttaattttttttacatttgtagagatatggctggaatatatttccatattccgttttgcaaacgcttgtgcggatattgcgattttcgtcgcagcgtccttctgcgccatattccgcaagtcgtcgagcgtatgcacgaagaactcgattcgcagtgcgggtttctcggcgaccgcaaaatcaggaccatatatttcggcggaggcactccgtcgctgctcgacccgtcggtgttcggcgggtttgtcgaccatgccgcgaggcttttagattgcagcggcgtcggggagataaccgtcgaactcaatcccgacgacgttacgcccgaatatgtcgggcgtctgcgctccacgcccgtcaatcgcgcttcgctcggcatacagtcgttcgacgacggggaactgcggttcatgggtcgccgccactcggcggagcaggcggaacgggcggtgagactgttgcaggacggcggattcgacaacatatcggtggatttgatattcggcgtggacggcttcggcgacgaaacgctgcgacgcacgctcgaccgtactctttcgctcggcgtgcagcatgtgtcggcataccatttgactatcgaacccgatacccgtttcggtcggatgctcgctgccggaacgatgcgtcaggtcgacgaggagcgcagcgaacgcgaatttctcgccgttcacgacgcattgactgccgcgggattcgaacactacgaggtgtcgaactacgcgctcgaaggcttccgctcgcgccacaactcctcttactggaccggcgacgaatatttgggcatcggcgcaggcgcgcattcgtatgcgggcgacgtgcggcgttggtgcgaacagcccgcggacgaatatgcggcgggaatcgtctacggagaggagcggttgtcgagccgcgaccggctgaacgaatatgtcatgacatcgttgaggcgcatcgaggggctgtcgctgcgccgtatcgccgccgagttcggcgaggacgaggcgcagcgcatcgaagcggcggcgcgcgggttcgtcgattcgggactgctcgtccgtaaggcgacggcggatgacgaccggctgatgatgccgcccgagaaattcctgctctcggatgccgtcataagcacgttttttgagatatgattatatataaggtaaaataatattaaaaatttttaataaattcttccgtttgtcggcataaagtattatctttgcccccgatattcgaaagaagatacaaacaatcagataattatgaacgaaactaaattctcgcccgacaccttgttcgaggtaagttgggaggtatgcaacaaggtcggcggcatccacaccgtgattgccacgaaagcattgaccgtaaccggacttttgggcgacaagtacatcaccgtcggtcccgatttctcgcaggacagcggcgtttccgaattcgaggaggacgcttcgctgatgaaggcgtggcggcagagcctttacgacaagggaatccgcgtgcgcatcggtcgctggaaggtaagcggttcgccggttgcgattctgatagacttcacgacgctcttctcgcagaaggacgatatattgaagatgatgtgggagagttacaacgtcgattccatatcgggtcagtgggactacgtggagccggtgcttttcggctatatcgcggggcaggtgatagaatcgtacgtggaaaacttctgctcggcgactgacaaggtcgtggcgcatttccacgagtggatgactgccgcgggcggtctgtatctgcgcaagcactcgccttacgtggcgaccgtgatgactacccacgccaccgtcatgggtcgctgcatcgccggcaaccgcctgccgctctacggaggtctggctggattcaacgccgacgacctcgcgcgccagttcaatgtcgtcgcgaaacactcgatagagaagatgggcgcgaagtatcacgatgcgttcgtgacggtgagcgacatcactgcccgcgagtgcaaatacctgctcggcaaggaacccgacgtggttacgccgaacggattcgagaacgacttcgtctggacgggcgaggagtacgacgcgaagcgcagcgaagcccgcaaggcgatgatagaggttgcggaggcgtgcctgaactgcaagttcgggaaagagccgctgattgtcggcacgagcggtcgctacgaattccataacaagggtctcgatgtattcttcgacgcgctcaaacgccttgcgtcgggcaatctcgaccgcgagattctcgcctacgttaccgtgcctgccgccaaccacggcgcgcgcgtcgatttgcaggcgcatctgcgcgacaagtcgcagcctatcgacccggcgcagtaccgctattcgacccactatctcgaaaacgtcgcctgggaccagattgcgcaggctatcaacggaagcgtactcgaccgtcccgagtcgaaggtgaaggtgattttcgtgccgacgtatctcaacagaaacgacggcgtgttcaacaagaattactacgaactgctcgtcggcatggacctgacgctgttcccgtcgtactacgagccgtggggctacactccgctcgaatccatcgcgttctcggttccgaccgtaacgtcgtcgctcgccggtttcggcgcgtggatttcgtcgctcgacgaacacgagggcatcgaggtcgtggagcgcaacgatgacaacatcgggcaggctgccgatgccgtcgccgatgccgtccgccgcttcatcgccctgccggacgacaaggtcggcgcagtgcgtgcgtcggcatacgaaatatcgaagcgcgcgttgtggagcaacatgttcaagcactatcaggcggcttacgagtgcgcaatcgagagttgcgtggctcgtaccaaccgtgccgtactcggcgacggcggcgcatataacgagcagataaacttcgtccgccagcaactcgtcgccgaacgtccgacgtggcagcgcatgatggtcgagaagtcgctgccggagcgtctgcatccgttggaggagttgtcgcgcaacctgtggtggagttggactctcggcgcgcgcgatttgttcgagtacatcgacaaggatttgtgggtcgaggtggaccgcaaccctatcgcgctgctcgacaaactgcctatggagcgtctgctcgaactggaagacgacgcgatattcctcggaatgctcgatgccgtctatgcgcagttcaaggagtacatgaacgagaagccgaacgccaacgctccgaaaatcgcatatttctcgatggagtacggcttgcaccatacgctcaaaatatattcgggaggtctgggaatcctcgcgggcgactacctgaaagaggcttcggacaagaacgtgccgatggtcgccgtcggactgctctaccgctacggatatttcacccagcgtctctcggcacagggcgcgcaggaggctacctacgaggcgcagaacttcttcaaactcccgatttcgccggtgcgcgacgatgacggaagttgggttaccgtgcatgtggcgttcccgggacgaacgctcagcgcgcgcgtatggcgttgccaggtcggacgcaccgcgctctatctgctcgatgccgactacgaggcgaatatcgaggaggaccgtcaggttacccactatctctacggcggcgactgggagaaccgcttgaagcaggagattctgctcggtgtcggcggtatccgcgctctcgtgaagatgggcatcaagcaggatgtctaccactgcaacgagggtcatgcggcgttcataggcatcgaacgcatccgcaacctcatcgcacgcaacaaactttcgttctcggaggctttggaggtcatccgctcgtcgtcgctcttcacgacgcatacgcctgtgcctgcgggacacgacgcattccccgagtcgatgattcgccagtacatgtcgcactatccggaggtgctgggcatcacgtgggaccagtatatcaacctcggcaaggtgaatccgaacgacccgaacgagcggttctcgatgtcggtgctggcatgcaacctctcgcaggaggtgaacggcgtgtcgtggctgcacggtgaggtgtcgaaagacattctgggcaatatgtggcccggatatttcaagaacgaactccatataggatacgttaccaacggcgtacacttcccgacatgggctgcgtcgaacatgcggcgtctctacgcccgctacttccctaagggattcgagggacaccagtacgaaatcaaggagtggcaaaaggtctacgaaatctcggacgaggaattgtggcgcgagcgcatgttcctcaaaaaccgtctgataaagaccatcaagcgtcgttacagcgacccgagccaggtgcgcttcgactcgccgcgccaaatcgtgcagatttccgaccgcctgaaaccggaggtgctgacaatcggtttcgcgcgccgcttcgctacgtacaagcgtgcgtacctgctcttcacgaacctcgaccgtctgtcggctatcgtgaacaacaaggagcatccggtacagttcatcttcgccggcaaggctcacccgaacgacaagccgggtcaggacctcatcaaacgtatcgtcgaggtgtcgtcgatgccggagttcgtcggaaaaatcatcttcctgcaaaactacgacatggaactcgcccgccgcatggtacagggcgtggacgtatggctcaacacgccgacccgtccgctcgaagcgtcgggtacgtcgggcgaaaagtgcgtgatgaacggcgtgatgcagttctcggtgctcgacggctggtgggtcgagggttacaaggagggcgcaggctggatgctgcctatggagcagacgttcgccgacaagagccatcaggacgaactcgacgccgagatgatatattcgaccatcgaggagcagattgtacctaaatattattcgcgcaacgaaatgggcgtgccgaccgactggattgcgtcggtgaagaagtgtatcgccgacatcgcgtcgaacttcacgaccaaccgtatgctcaccgactacgaggagcgtttctacaacaaactcgccgcccgcaagcacgagatggtcgccgacaactatatcctcgcccgcgaggtggcggcatggaagcgcaaggtttcggctgcatgggacaatgtgaaggtactcgacgtccagcgcgcgcgcatcgacaacgaggcgatgctcgtcggtgcagcataccatttcgaggtaacgctcgacatcgccggactctcgccggaggatatcggcgtggaactcgtcgtggcgaaacctatcgtcgctgccgagcctgccaacgtcgattattcgatgccgttgtcgcagaccaacgtcgacggcggcaaggttacctattcgctcgactatattccgaaccgcaccggaatcttcgatgtcgcgctgcgcgtctatccgaagaatccgcgtctgccgcaccgtatggatttcgcccttgtgaagtgggcgtagccgacgggagtgtcggagagcggctgttttccgtttgtgcgcgccgccaaactgcggcgcgcacatccttaaagtctttaaggactttaaagaccttaatgaccttaattctgcaaaacgatgcggcgaaaagtcgcgtaaaatgctccataaggtctgatgtttgataaaatttatgctattcgtgatgtttttcgcaaaattttagtatctttacaatagcagaagcaaaaaatcattatcgataatatgccgggacttacttttgataaacgggagttgggtaatttggaatattcgctccaacgcgaaatgctggcgacagaccgtcggggcggctacatgagtaccacgatagtcggctgcaatacgcgcaaatatcacggattgatagtcgctccaatcgacagcaccgacaatacctatgtattgttgtcgtcgctcgacgaaaccatcgtgcagcacgaccagtcgttcaatctggcgttgcaccgctatcgcggaacctacgagccgcgcggtcataaatacatcaccgatttcggatatacgccgacaccgacgataacctaccgcgtgggaggagtgatactccgcaaggaactgctgtggattcacaagcgcacgcatctgatgattcgctatacgctggtggacgcgcactcagaaaccacgctgcgtctgcgcccgttcctcgcgttccgcaacaaacacgaactctcgaaggcgaacatgtatgccaacgtgcgttcgtatccggtgaagaacggcgtgaaaaaccgtctgtacgacggcttcccgtggctctacatgcagttgagcaaggatgactcctcgttcgttcccgctccggactggtattacgacttcgagtatcagaaggagatagagcgcggctacgagggacacgaagacctgctcacgaccggctatttcgagatgaaaatccgcaagggcgaaagcatcatcttttcggcttcggtagacgagatggcgtcgggcgaggagattcgttcggcatacgaaacgtcgattgcgcgacggacgcacaagatagatttcctcagttgcctgcaccactcggcgcgacagttcatcatccgccgcccgggcgaccggacggaggttgtcgcggggtatccgtggtacggtacgggaggtcgctcgacattcatttcgctgccgggtctgacgcttgaacagggctacaaggaggattgcatggcggtactcgacacgatggtcggcgacatgcgcaacggcgatttcgcgggacaggcatccgccgaggtcgcagccgacgctccgctgtggttcttctggaccttgcagcaactcgaacgccatatcggcgcgaaggcgttgtgggagaagtacggcgaggcgatgaaaagcatcctgacggcttaccgcaggggatttttcggcggttgcgtcgccctgcacgacaacggtctgatatgggcttcgcgggagggctacgcgcttacgtggatgaacaatgtcgagaacggagtgccggtgattcgccgcgagggctatgccgtcgaggtgaacgcattgtggtacaacgccgtttcgtatacgctcgcccttgcatcgaagatgggcgacaaggagttcgtgtcggtctggaaagggctgcctgcgctgacgaaaaagtcgttcgtcgaacttttcgcaatcggtggcgagggctggctcgccgactataccgacggacggacgcagaaccgctcggtgcgctgcaaccagattgtcgcatgcgggctcgactatacgatgctcgacgacgagcagcgcgtgaacgtgctgatgacggtacgccagcatctgcttacgcccaaaggattgcgttcgctttctccgcaggacgagatgttcgagtcgcaatacaaggagaatcctatcgagcgcgaggctgcgagccgcaacggtgccgtgtgggtatggcctttgatgttctacgtgcagtgcggcatatcgctcgaaggcgcgcggttcctgccgacggcgaaagagatactggcgaatttcgacgaaaatatccagtactactgcatcggctcgatagccgaatatttcgacccgaatccgccgttcgcaccgcgcggcgcgatttcgcaggcgtcgagcgtcggaggactgctctacataaaggatatcatagagcgttgcgaaccgaagccgaaacgcaggtcggcgaagtcggatgcaggaaaaacgagtgtgaaaaacaataaaaaacagtaataagatgagggttttgatgttcggatgggagtttcctccccatatcgcaggcggtctgggaacggcatgctacggtatgacccgcggattggcgcgtaacggcgtcgaagtaacgttcgttatgccgcgagcctatggcgacgaggataaacggttcgtcaaggtcgtgaatgcgagcgatgtagaggcggtgttcggcaaggtcgatgcggatgcggcggacataatcgagaagatgtcgttcatccatatcgactccaacctcgttccttacctttcgccggaggactacgcatcctaccacgacgagttcgtcaagacgggcgagaagcattgggaaaccaccgatgcttggagccagcggtatacgttctccggaaagtacggtgccaacctgatggaggaggtcgcccgctatgcgattgtcgcggcgcaggtcgccaaggacttggaggggcagttcgatgtcatccacgcccacgactggctgacatatttcgcgggcatcgcggcgaagcgggtgtcgggcaagccgctggtagtccacatgcacgccacggagtacgaccgttcgggcgaaaatatcaatacgcagacatacgctatcgagcgtgcgggaatgcacgcggcagaccgcgtcatcgcggtatcgaacctcacgcgcaacatcgttatcgaaaagtatggcgtgcctgccgagaaggtagttacggtgcataacgccgtgcgttttgccgagaacgggtcagccgctcccgaacgcggagtgagcgacaaaatcatcacgttcctcggtcgaataacataccagaagggtcccgactacttcgtcgaggctgccgcgaaggtgctgaaacgcgttccgaacgtgcgcttcgttatggcgggttcgggcgacatgatgaaccatatcatccgccgcgtggcacgattgggcatcgccgaccgcttccacttcactggattcctgcgcggagaggatgtccaccgcatgttccagttgtcggacgtctacgtgatgccgtcggtatcggagccgttcggaatatcgccgctcgaagcgatgcggtcgaacgtgccggtcataatctcgaagcagagcggtgtcgccgaggtgctggactacgccgtgaaggtcgattactgggatgtcgatgcgatggcggatgcgatgtacgcgctgattacctatcccgcgctctcgtcgatgttcgccaagaagggtctcgaagaggtaacgtcgctcaaatggaacgatgcggcggcgaagataaagcgcgtttacgaggatgccgtggcatccgcgaaatagcgcacgaacgattgaaaaatagataaaatacaaggatatgaaaacagtttgcttatattttcaggtgcatcagccgtggcggttgaagacctaccggttcttcaatatcggcaaggaccacaactatctcgacgatttgaccaatcgtgcgataatgcagaaaatcgcccgcgagtgctatctgccgatgaacgccctgttcctgaaagtcatcaaggagagcaaaggcgcgttccgctgctcgttctcgctgacgggaacggtcgtggagcagttccgtctgtacgcacccgaggttctcgattcgttccgtgcgctggtcgataccggctgcgtcgaactgctcggcgaaacctattcgcactcgcttgccgcactgtcgtcgaaagaggacttcgcggagcaggtgaaggcgcattcggcgatgcttaaacgcgaattcggcgtcaagccgaaggcgttccgcaatacggagttgatttattccgacgacatcggagcaatggtaggcgaaatgggattcaagaccatgctcgccgagggtgccaagcatgttctcggctggaagtcgcccgatttcgtgtatgccggtgcgggcgaccagagcctgcgtctgctgctgcgcaactacaaactctcggacgacatcgcgttccgcttctccaatcagggttggagcgaatatccgcttaccgccgacaagttcgccggctggttatcgcaggagaacggcgaggtggtgaatctgttcatggactacgagacgttcggcgaacatcagaaggcatcgacgggcatattcgagttcatgaagaacctgccgaaagcgattctcaaacgcggcgacctcgaattcgcgaccgtgtcggaggctgccgccaaacatcagccggtagcggtgttgcactgccctcacgtgatgtcgtgggccgacgaggagcgcgacgttacggcatggctcggcaacgacctccaaaacgaggcgttcggcaaactctattcgctgaaagagaaggtgcgcgcgctgcgcaatgccgatttcgactacgtgtggaacttcttgcagacatccgaccacttctactatatggcgacgaagtggctctcggacggcgacgtacactcctatttcaacccttacggctcgtcctacgaagcgttcatcaactatatgaacgtgttctctgattttgaaatcgaggtggacaaggctcttgccgcgaagaagaagcgcaagcctgtcgcagcgaaggcataggttttgattcgcaaaaactataacggctgacttgaaaaagtcagccgttatagttaatgaccttaaagtcattaaagtctttaaggtcattaatgtttgcgcggttgcggcagcgcgcggtctatcgtacctgccgtttcggcatcgcggacggatgttggtgcggcggatttcgcgcgggacatgttcttcgccgccgagagcgaaagcggtacggatgcggcggcgttatccttggttacgtcgattttgtagcgcgacggaacgcctgcaacgccggctttgtcgaatgcgacggtcgcggcttggagtttcgtcccccaatccatgtaatacgacacctgctgcttgttcacgttggacgatgtcatcagccattgcgtaatgtcgctgtccgacatgtcgtcgagcgaacttcgcgtggctgcgaaataccatttggctgccgatgcgttaggcgacatgaggaacgtgatgacggcttggttgtcgtagccgtaatcttttccgtcctcgattacgtactgcatcgccacggctgcatcgctgcccgagtcgagtttgtcggtcgtgaactcctgtttgaaaacgcgcgtcgtcgcaccgttgtcgaaaccgaaacagtatgccacgtatttcgtgtcggcgagcagcatgttggtgcagtccaccgtgtgtctgccattggtcaggtatgcggacatcgagtctccggcggtatcgaccatgcggcttatcagttcgtcgtcgctgccgaacgtcgcgtaggtctcgtagtcgatgacgtcggtaaagtaggttgcatcggcatcggacggctcgaacagcactttcgcgccgttgaaggttatcgaatgcgcggttatttcgaccgtcatgtccgattgctgcgggtcggcggtgcgctgcacgatatgcgcaacgcccgtcgtgcgtgcgcctttcgcatccacgccgaatacgaccgcgacatactcgctgctgccgacgagaggcttgtattgcaggtcgctcaccacgtcgagactgcgtttgccgctgaacagatacggcgatgtcgcccagtcgatgccttggctgttttcgtcggctataagtctggcggcgagttcgtcgagcgagtattgtccgagtaccgatgagcggcagacgcctatgtagtatcgcgttgcgtccgaggtcggcacgacgtcgattttcatcgatgtcgcggttacgtcggataccgagagttcgaagcggcagtcgtcggttgcggcgaaaggctcggtcctgaactcctttttcgccagcggcgcggtcggattgccctgattgtcgagcccgaatgcgaacaggacgtattcggtgtcggacgccagacccgttttgacctccgcgatgtcgccgtgggagatgaaatcatcgtaggtgtagtcgtaaccctgcatcgcgaagatataaattgcctgctcgatgtactcgatgttctgcgcaacggtgttttcgtcgccgccccacttgtcgtaggcggctttggttacgatgtcgtagaagaatgtcgcgctcttgtcggtcggcgtaacgagaagcgtcgcgcccgactggctgatgtcggctgcatcgacggcaagttcgaattcgacctttaccgtcgcatcggtggcgatgagcatcttttcgactttgcccgttgcgacgccgtcggttcccaatccgtagacgtagagatagtacagcgtttcgggcgcgagttgcgagtacgacaacacgcaatctccctttcgctggtacgacgcgatgatttcggcaatcgtcttgccttgggagaccgcctcttcgtcgaaaaatatcatgtcgtcggcaagcaggtcggcatccgtcccgagttcggtgtcgtaatacgatttggttatgacgaacgcgacgtaaggctgctccttgtccgacggaacgcacttgactgagaaccctttgtcgtttacgtcatcgagggaaagtatgaatgtcagcccctcctcgggctcggggtctggatacggttcatgcggcggacatgtcgtttcgcagcccgacagcattgccgccgccgtcagcgacagcagtgcatgcagcaagttttttaacttcatcttcggtctgccggattagaatttatgcacggcgcgcacgaaattgtccgcttccggatatttcttgaagtcgccgtaggaatgaccgctgctcgttccgccgtagaaacatatcgcctccgcttccggcgagtgttcgccctcggtggacgaccagtaccagtcgtaggcactgtcctttatcgccttgccgccgttagccgtgattgtcggattgaggatacctgctttggtaacccatgcgataccctcgttgattgccggcatgtaccatccgcttccgaggtcggtgcaccatttggcggcagggtggaactgcaatcctacctccttgattctttcggtattctcctctccgtcatcttcgctgccggcgttgcagttgagttcggtagtcgcccagagtatcgctcccgattcgtcgagcgaaacagccttgcccgcagtgtcgccgtcggtgagccagaatacgatgcccttcacgccgtcgaaatcgataatctgtccgatttcgtagccctgctttacagtcagttcgcatttgccctcgaacgtcttgtcgcccgccgagagtttggcggtgatggtcgcggtgccttccgcaacgccggtaacagtgccgtcggcaaccgtggctaccgacgtgtcggacgactcccacacgagtgcgcgtccggtggctggtgctacggtcgtttcgatggtcatcgtcttgccgatggcgagcgatgccgtcgttttgtcgaacgtgattacgggattctgaaccgttacggcgcaattctcgccgaacgtgcgaccctctatcgtaaccgatgccgtaacggtcgcgttacctgctgcgactgcggtgattacgccgttgctaaccttggctattgtttcgtcggacgatttccagtcgagcgaaatcccctccccgagagcgggaacgacggtcgccgtaacggttttggtgtcgcccgtgccgattacgaccgacatgatgtcgagcgtaacggtcggaatgtcgattaccgagacctcgcatgtgctttcaaagtatccgtccgcacagttaagcgcagccgtaacggttgcgttgcctgcggcgattgccacgattactccgtcggcaaccttggctatcgcttcgtcggacgatgtccagataagagacatattggttgcgggggtgatttccgctttcagggtatgggtgtcgcccgcgaacagcgttaccgcagccggttcgagagttatgtcgtagacgattgggtcgtcggtcttttcgtcgcaaccgaccagtgcggcgattgcggctaacgaaaacagtaattttttcatggtaaatggtgatatgagtttaatgtaatgtactaaccaactttcccgcaaagatagtaaaattttcgttaagcccgcgttcgcgggcttttcctccttaacttcgctatgcgtttttccctcctccttgctcggcataacctgcaagcagtttctgctcgcgctgcgagcgtcggttcgcgcctcggtaagtcccccgcacaggcgggggatttagggggtgggtaacacggagaaaagcaaaagcaggcttttgctcggcttggcgtcggttaagtcctttaaggtcgttaaagtccttaaagtcgttaaggtccttagggaggcattgcctaaatttggcattgctctcgacttttcttatctttgccataataaattaccgacccatgaaaagattcgttgttctgttcgtttcgcttgcattctcgctgtcggctgttgccgatgagggaatgtggcttccgtcgcttatctcggcgcgcatcaaggatatgcgcagcaagggtttccgcctcaccgccgatgatatttattccgtcaacaaggcttcgctcaaagacgccgtggtgctgttcggcaggggctgtacgggcgaaatcgtgtcgcagcagggattgctgctcaccaatcaccattgcggctacggcagcatccagaaactttcgtcggtcgagcgcgacctgctgacctacggcttctgggcgaaatcgagagccgaggagttgccttgcgaaggacttacggtaagtatcctcgtcagcatggacgacgttacggagcgtgtcgccggcggcgaaacccccgaatcgattgccggacaggcgaccgacaagtcgaaaggcatcagagccggtgtggagcgcatgtactacggcaaccaatactttctgttcgtctacaaggagttccgcgacgtgcgtctggtcggcactccgccatcggcgataggcaagttcggcggcgacaccgacaactggatatggccccgccacacgggcgatttctcgattttccgcatctatgccggtgccgacaacgagcctgcggactactcgcccgacaatgtgccttacgttccgaagcgcagtttcctgatttcgaccaagggcgtgcgcgagggcgacttcacgatgatatacggtttccccggcaacacgcagcaatatgtgctgtcggatgccgtcgaatatacgctgcgcgacagcgacccgatgaagattgcgctgcgcaccgcgcggctcgacataatctcggctgcgcaggctgccgaccctgccgtgcgcatcaaatatgcggcgaaacacgcctcgatagccaatgcgtggaaaaagtggcagggcgaggtgctgggtctcgcgcggctgggtacggtggacaggaagcgcgactacgaacgccgtttcgcggcgtgggcagccgacagacccgaatatgcctcgctgctcgactcgatgcacgcatcctattcgcgtgtccgcgacctctatttcatgggcgaactcttcgccgagagcatcaattccatcgaactcgtttcgttcgtccgtcaggtgcgcattgcggcgcggaaatacaagggcgatgacgcgctgttcgcccgcgcgagccgcaatttctataaggactacgaaccgtcggtcgattgcgccgtcgccaaaaggatgctcgccgagttcctcgaccgtatgccgcagtcggaaattcctgccggtctgactgcgaaaatcgatgaatacggctcgccggacgcctatatcgactacattttcgacaactcgcgatacgtccgtgccgacgaattctcgcccgacacgacgggcgaccctgcaatcgagttctacgacctgttcgccggcatcgtaaaacgcgtgggcaaatatcgggtgcgcaatttgagcgacgtcggcgagataagccgctggtacaaaccctatttgcaggctttgcgcgagttcgacccgaaacgcgcgttcttccccgacgccaacctgacactgcgtgtcgcatacggcagcgtcgcgggctacgagtatgccgacggcgaacgccacctgccgttcacgacgctcgacggcgtgattgccaaggacaatccggagatttacgactacaacgtgccgcaggctctgcgcgacctctacgatgcgaaggattacggtcgctggggtatcgatactccgtcgggacggagcgttccggtatgtttcctcgcgaccaaccagactacgggcggcaattcgggttcgccgattatcaacggtcgcggcgaactggtcggcatcaacttcgaccgcacgtggcgttcgactatgagcgacatggcgttcgacccgacgatttgccgcaatatttcggtcgatatacgctatgtgctgttccttgtcgagcggctcggcggcgcgggctacctgctcgacgagatggatttgcgatagccgcgggcggaaaaaatcaaaaaagtggcgataaattttgtcggaaccaaaattttgcctacctttgccctgctgtttcggaaaacagtgtgcaagcccaggtggtggaattggtagacacgctactttgagggggtagtgactaattagggtcgtgtgagttcgagtctcgtcctgggcaccaaaaaagagattgtcagtcgtggcaatctcttttttcgtttcgccggggcgggtgttgcgccgtggctttgtcttgctctgttgcggcggggctccataaagtccttaatgtccttaaagaccttaatgtcgttaatcctgcgccgtgtccgtctctctcaccgagcctgacgtctgaaaaacaccggtttcagcaggtgttttatgcggttgttgaggtttatcccctgtttcagcagcgtgcttcccgtcagtatctgccagttccagccgcgctcctccgcgtaatgttgcagaaaacggaactgcaattctggctcgggatagaacctgcgcagtacgtcggtggattcctttatcgtgagggcatggtgcctgaacagtattcggtttacgtcaatcaactcgaaccgccactgtccgtttccgtcgcgcgaatagatgatgttgccgatgttgtagtcgtaaaaatagattccgtcgcggtgcatccttgccgtgaatttcgccagtccgctcataatctcgtcctgctccgcagcgtttcccccccccgacatttcggcaatggtcggattggggctccatcggcagatgtaatatcccgtcccgaacaacccgaacgagcgcagttcgatgtatgcgacctgttccggcgagtcgtagcccatcttgcgcagtttctcggtattgcggtacgaccgctccgccttggtgcggcgaaagaacgaatatacgatgcggttgaacggattcggtcgcccgaaccgcttcacgacgaacgtttcgttcccgacgacgcagcgtactatacggttgcgtctgtcgcgcaggacctcgccttgcggcaatgcgtcgttgcgggcaatatcgtaaatccactctttcagatacccgaatttctcggaaatgcatactttcatcataatgtagcactgttgaactatcactgtgcaaagttgccgaattaaacattatccggtgacgcatttggttgtctgttatgttctattcgtgccaaaacgacacttgggaggagcagcgggaggctatgttcgctcggcgggaggtgctgttttgcggctttccctgatgaccttaatgaccctaatgtcgttaaagtctttaaggaccttaaagtcgttgagaagggtttttgctctccctgcaagaaaaaccgccgtccgcatattacgcggacggcggtcgattgaatcttcggcacctatgccgaatctgtcgcagtcggattattctactactacattggtaattgccagcgagcctgcacggagaatacctgcgagtttgtttgcatccgcagcgtcggctgccgttacggcaactccgttgattgtagttttcggactgattacgataggagcatctgcggcaccgagagttacggtaacatttgccaaacgagtggagccgaggacgattccgacattcgaatcaggagcgacaatcgtacagtcgataacgccgcctttgacagtcttgtcggtaccgccttgcgagccgatgatagcaccggtatcggttcctgcatcggatttgttggaaatagttccgtaactgctgcaattcgtcaaatcaccgtttacgtaacctacgatacctccgacttcgctaacgcctgcctccaatgcgaatgcgttctttacggttatgctgcctttattgacgcaatcggtaatcgtaccgttgtgagcagccaatacacctgcaacaatcatggtctgtgtcgcttccgcaataatttcgccttcattcgtacagttggttgcggtgttgctcgaagaactgcttccgtagccgccgctgacaccgcctacataactgcgggttgtatttttgaatgattcggtggttgcgacagtactgtctgcgaaccataccttaccgtagttatggcagttcgtaattgtatttttagttgcataaacggttgcaccgtaaacgccgccgcaataagtctgtgcaccgcccatgctgacttttactacaccgctcttctcgttcgtgcagttttcgatagttccggtaggaaaacctacgacaccgccgataggaagccaagtcgaaccgctcggattgacaagttccaccaatccgtagttgtggcaatcgctgattgttctgtttctttgagaagtcgcgatttctttcgggtaacctaccgaaccgcatacaccgccgattacagggtgtcccatactgccgactccgccgccggtcgatgtcgttccggagaatcttacatcggctgttccttgaagaaggatatgaccgtagttcgagcagccggtaacgtcgccgttcgcataacctgcgataccgccgatagcaggacgggtaatctgaggagcatcggctgctttgtaggtattggttctgatgcttacgtcgcctgtattcttgcagccggtgaagtgtgcagccgagtatcccgtaatacctccgacattcggataagcacctttgtaagccttgtcgagatagaaatcgactttaccgttgttgatgcattcgctaactacacctttggtgttattcgcgccggcaactcctccgagataaacgtttttccatccgttggcaccgtctatattgacggtgatgtcgccgttattgatgcagtttgacatacatactacattgtctgcgccggaagtgtcgcc

SEQ ID NO: 351 - DNA, 21755 bp, unidentified
  source 1..21755: mol_type = unassigned DNA
caagaactttggtaatagctgcggtcagggttgttttgccatggtcaacgtgaccgatggtaccaatgttaacatggggttttgttctttcatatttttgctttgccatttattgtatcctccttaaacaggtaatttcttaggcctgggtgcctttgtttttagcaataattgcttcggcaatatttctcggaacttcttcgtaatggtcaacttccatggagtagttgccacggccctgagttttagaacgcaggtcggtagcataaccgaacatttcagacagcggaacgaatgcatcaataacctgggcaccattacgtgcttccatgctgttaatgcggccgcggcgggagttcaggtcgccgataacgtcgcccatgtattcttcaggaacggtaacttctactttcatgtaaggttcaagaataaccgggtcagctttcagtgcaccagcgcggaagcccatagaaccggcaatcttaaatgccatttcagaggagtcaacttcatggtaagagccgtcgtaaacagttacgccaacgtctaccatcggataaccggcaactacgccattttccatagcttctttaacacctgcttcaacaggcccgatgtattctttcggaatagcaccgccgacaactttgttgtcgaatttgaagccttcgccgggttccagcggagtgagttccaaccagcagtgaccatactggcctttaccgccggactgacgaacgaatttgccttcggccttaacggatttgcggatggtttcacggtaagcaacctgcgggttacctacgctgcagccaacgtggaattcacggagcagacggtcaacgataatatcgagatgaagctcgcccatgccggagataatggtctgagcggtttcagggtcggtacgtacgcggaaggtcgggtcttcttcagcgagtttctgcaaagcaatgcccattttttcctggtcagccttggttttcggttcaactgctacggaaataacaggatccgggaataccatggattcgagaatgataggagctttttcatcgcagagggtgtcgccggtagtggtatctttcaggccaactgctgctgcgatatcacctgcgtaaaccttttcgatttcctgacggtggttagcatgcatttgcaggatacggccgatacgttcgcgtttgcccttagtggagttatatacataggagccggattcaagagtaccggaatatacgcggaagaatgcgagtttacctacatacgggtcagtcatgattttgaatgcgagagctgcaaacggttcttcatcactggacgggcgttcatcttcttcaccggtttccgggttaacgcctttgatgtgaggaatgtcggtaggagccggcatgaatgcaacaattgcatcaagcaaaggctgaacgcctttatttttataagaagaaccacagcaaaccggagtcattttgcaggcaatggtttgtttgcggatgcctgtcatgatttcttcttcggcgagttcttcgccttcaagatatttcatcatcaggtcgtcatcgctttcagcaactgcttcgataagagcctgacggtattcttcggctttttccttcatatcttccggaatttcaacgaattcttcgtctttgccgagtttatcgccataaacgatagctttcattttaataaggtcaaccatgccttcgaaagtatcttcatagccgataggaagctggataggtactgcattagcaccaaggcggtctttcatcatttgaactacgttgtagaagttcgcgcctgtaatatccattttgtttacataagccatacgaggtacgctgtatttatcagcctggcgccatacggtttcagactgaggttcaacgccgcctttggcacagaaaactgcaacagagccgtcaaggacacgcagagaacgttcaacttctacagtgaagtcaacgtggcccggggtatcaatgatgttgatacggtggcctttccagtggcaggttgtagcagccgaagtaatggtaataccacgttctttttcctgttccatccagtccatggtagcagcaccctcatgggtttcgccgattttatgaacgcggccggtatagaacagaatacgttcggtcgtggtggttttaccggcatcgatgtgagccatgatgccgatatttcttgttttctcaagtggaaattctctgcccacttcttcgtcctccctctaataaaagtcagggttctggttaaattaccagcggtaatgagcaaacgctttgtttgcttcagccatcttatgggtatcttcgcgttttttaacagcagcgccggtaccgttagcggcatccataatttcgccggcaacgcgttcgcacatggttctttcaccacgcaggcgggaataatttaccagccagcggataccaagagtggttttgcggtcagcacgtacttctaccggaacctggtagtttgcgccacctacgcggcgggcacgtacttcgaggagcggcataacatttttcatagccgcatcaaatacttcaaggggatctttgccggttttagcgcggacaagatcaaaagcatcatatacaatgcgttctgcaacgccttttttgccatcaagcatgattttgttgatgaatctggttaataatttggagccatacaccggatccggcagtacgtctcttttagtaacagggccttttctaggcatgtgtttccctccttaatcatttcgtgaaatcagttaatactgcttatttttttgctttagcacgtttagcgccgtatttggaacggccctggctgcggttagcaacgccagcagtatcaagtgcaccacgaatgatatggtaacgcacgcccggaaggtcttttacccttccgcctctaataagaacaacgctgtgttcttgcagattgtgaccgatacccggaatatatgcggtaacttcgatgccgttggttaaacggacacgagcaaccttacgcagagcagagttaggttttttaggggttgtggtataaaccctggtgcaaacgccgcgtttctgagggcattctttcaatgccggagcggtggatttttcaattgcaacctgtctgcctttgcggactaattggttaattgtaggcatatcggcacctccttcccgaataattagatttgaatgattataaaaactcccgactggcggaagtccctatcagtctttaagcaccgcggcggcagcagccccaacgtgaatgccgcatgctttgccaagttcatgcatcgaatccgcggttattacttttacaccggcggcttcgcagctttccaaaagcgggcggcttatgcggatatcggcatcggctgcgataaacaccagcttcgctgttcgcttttcaaccgcttttgccgtttgtttaacaccaacgacatgtttagttgcttctgttaattgcttcagcatctggctgttcctcctgaaaaagggcataactgttccgtgatactgatatattgtaccattacaaaaaaggcttgtcaatattttttgcaactttttttgcaggcttcagcgcccattttatgggcttctttctttacacgttgccttgtgtttcaaatgccgtttttgttatattctttacacataaaagtgactgtttttgcgtctttttcacaattccgccgcaaaaattttaagcaataaaagcaaaaaacaaataaaaaactttaaattttcttaaatttcaggtcaattcaaaagggctggcgcccaaatattttttaatttttcaaaattacatctggcatttgccggacttgttgaaggcattgccaaaatttccactccgtttatgctgtttgtgcggcaatattttttcaacgcagcataggctttgccgccgttgcagcaaatgcgcttaattttagggtgacatgcaataaacccggccaaatcattatattcctcatcgcgtattgccgaatcgaggctgccttcacggcggcagaacgcaagaacatcccacagggcaacattattgcgcagcagcaaagccttgcgctcctcataatcgtcaagcatttcgccattattaaaaacctctgccattaaacgccaaaaacggttatttttatgcccgtaatactgctgcagctccagcgagcgctcacccggcattgaacctaatattaaaattgtgcagccggcattttctaccggcgcaaagcacttgcaaatatcactcattattttcaccctccaaatatatggaagcgtttttagtttttataacttcaatacaggcgcccatcttttgccagcacttaatattactgttatgctgcccgcgcagtttcgattccatattctgcggcacataaatttttattttgctcctgcctgcattaaccagcgccataatttgcggcataagttcgtttctgacagccatacttttcactatctcgccaaaagcgggatgaaaagggcctgctacaatatttccggggctgcacaattcgtcatccggctgtaagccgatgcggataacattaatgccgttaccggtaaatttctgcaaagctgctgcacaaagctccgcggcagcttccactccaagcggagtaaactttccgctgcggtacgtttcttcaagcggtgtatctttaattaccaaaagcggataaagccttaccatatccggttttaaggcaatgctttccgcaacggtatccataaagcttgcctcggtttgcccgggcatgccgcacatcagctgcaagcctgttttaaaaccatgtgcgcgcaaaagttccacggccttggcaacacttgccgcattatgtccgcgcccggccagctccaaaacgctgtcgtccaaagactgtacgcccagttccaccgtgcttacattatgcttttttaaaagagccagcctttcttcatctatataatccggccgcgtcgataagcgcacgctgccaatgattccttcctgcaaaagtttatcaaccggcttgaaaagttcttcctgtaatgccatatcaaggccggtaaaagaaccgccataaaaagcagctccgttttctttacccggtttaatccattgtaaatacttttctatctgctgccgcactgcctctgccgatgctgttttttgcccgctgattttcttctggttgcaaaaaacgcactgatgcgggcagcccgcgtgcggaataaaaattggaataatgctcataactttacctttcattgtattcttacctgcattatattctgctgccgccgcatcgtcaatacggcaattgcaagccccgtttatatatgttagaatagcaggtacaaaataatataaaggatgaatttttatgggttatttatatcttgctttagcaataagccttgaacttatcggcacaacctgccttaaatattccgaaggattttcaaaactttatccgtcacttgcaacgcttgccgcttacgggttatgcttttatttattttccaaatcgcttttatacctgcatttaagcattgcttatgcaatatggtgcgctatcggcattgttgcggcaacgctgatttcagtttttctttttaatgaagcgctttccccggcaggctattttgccattgcccttattgtggcaggcgttataattttaaaccttttcggccctgcacactaaacaaaatttaattaaggcatacaaaaaacggtttcaggtattcagcccgaaaccgttttactttattttttaagtttttccaaagcactttttgcagcgtgctgctcagcttcttttttgctgtgccctatgcctttgccgataaccctgcctgcaaccgaaacaactgtcgtaaacgacttgttgtgctccggcccgctggaatcaatcagttcataggtaatttccacatcgccatctttttgaactacttcctgcaaacgtgttttataatcggaataaattccgtgttcgcaaataaaatcaagttcctgcttcatcagccccagcaaaaatttttctgcggaggcaagcccctggtcaatatagtatgcacccaaaacagattcaaaagcatctgccaggatagaagccctgttgcgtccgccggaaaggtcttcacctttgccgaggcgcagatacttgccgagagaaattttatgtgcatactgtgccagtgaagtttcacaaacaatatgggcacgcagcttggtaagttcaccctcattaagttttggaaagtttttgtacatataggtgctgacgataatacttaaaacagaatcgcccaaaaattcaatgcgttcattgtgttccggacgcggctgctctttagcctcatgggcataggaagtatgtgtcagcgccgtatttaaaatatctaaattattcatggtaattccaagctgcctgcaaaactcaagcagctcttccttacgcttactttgcatagcaatcaccgtttctgtgcttatgccttatattttttcagaagaatgcatgcattgtggccgccaaagccgaagttgttggaaagtgcagctcttacttctgctttgcgggcaacattaggcacatagtcaaggtcaaggccttcttcaaggtcggggtcttcgtagttgatagtaggcggaacaacgccgttatcaatggttaaagcggttgcaatggcttcaacgccgcctgctgcaccaaggaggtggccggtcatggatttgttggagctgatcatcattttataagcatggtcgccaaaaattttcttggctgccagagtttcgttcaggtcatttctgtgggtagaagtgccgtgagcgttgatataatcaacttcatccgggctgatgcctgcatctttaatggcaagttccatgcatacagccggcatttcgccgctcgggtccggagcagtgatatggtaagcatcggccgtcatgccgtagcctgcaacttctgcgtaaatgtgcgcgccgcgtttaagtgcatgttcaagttcttccagaacaagcacgcctgcgccttcgcccataacaaagccgtcacgttttttatcaaacgggcaggatgctttttcggggtgttcgttattggtagaaagagctttcatgttgccgaagcctgctactgccagcgggttaatagcagcttcgctgccgcctgccatcataatatcggcatcgccgtactgaatgattctgaaagcttcgccaacacagtgggtgccggttgcacatgcggttacaatagccatgttcgggcctttaaagccaagagcaatggaaatctggcctgccggcatattcggaatttccataggaataaagaacgggctgattttggacgggcccttttcaacaaatttcaaggtctgttccaggtaagtatgcatgccgccaatgccgctgcctacgcaaacgcctgctcttacagggtcaatgctttcaaggtcaagtttggcatcttcaacagccatttttgctgcagcaaccgcaaactgggtaacgcggtccatgcgtttgccttcttttttatcgccgtatttggaaaaatcaaaatctttaacttcaccggcaattcttgtaccgtattcgctggcatcaaactgggtaatcgggcctacgccggatttacctgcaaccagattgttccaaaattcatctttgccgataccgataggggtaatagcacctacaccggttataacaactcttctcttcaaaacaaatcacctcaaatttaaattttttctatatcttctttcagccttctgaaaatttctttaacaggcagaatttccttaatcttccacatatttgcaccggtgaaaacaagcccggtttccacatcgccctgctgtgcacgggttaacgccctgataatgcagaagctgcgggaacaatgcttgaggcaggcgtcgcaggttgtaggacgcggcggattgccgtcaagaactttttgtgcaaacggatttaaaattgcgcggcccttataaccaaccgggctgtcaatctgcacaacatcttccttagtcattttgagataaaattccttcagagcaggagcaccgttggattcttcgctggcagcgaagcggctgcccatttgtacgccgctggcgccaagcttcagaagttcggctacatcagcaccgcaaacagcaccgcctgcggcaataaccggaatttttacagctttaataatatccggcagaatagttttgatagattcctgcgtgcccagatggccgcctgcttccgtaccttcaacaacaattgccgaagcaccaagcttttcggaaattttagccagctttacggaagaaacaataggaacaactgctacgttgtaggcgcggccgatggcgaaaatatctcttgaaaaaccggcgccggcaacaagcaaatcaactttttcttcagctgctgttgtaataaggtccgcaaaagcgcgtgctgccaccatagcgttaatgccaatcatgcctctgccttcgctaagttttctcgcaaggcggatttcttggcgcagttcatcaagctcaaggccggacgcagctacaaggcctacgccgccttctcttgctacagcacctgcaaggcgcgcagtcgaaagcctgatggccatgcctccctgaaatattggcatttcagctactttatcacctattttaagcactggtaatttcaacaaatatcccccatttctggttaagatgcaacttttaaaacttggcagggaggcttaatgcctcccgccaaactgcggataaattatttttcttcatccaacattttaactgcgtccgcaacagtgcggattttttctgctttttcgtcaggaatttcaacgccgaattcctcttcgaaagccatgattaattcaacgatgtcaagagagtcagcgcccaaatcgtcgatgaaggaagattccatttttacttcttccgggtcaacactcaactgttctacggtgatgtttttaactttgtcgaaagtgctcattacgattcacctccttccaaggtagtttgataatacattattacattaccataccgccgtcgacatgtaaagtctggccggttatataagcggcattatcgctcacaaggaacagtaccgctttggcaatatcctcaggctcacccaggcgggcaagcggaatggaagcttccatggcagcaacaactttttcggaaagaacgctggtcatatcggttttgataaagccgggggtaacagcgttaaccctgatgccgcgggcagccatttctttggcaacgctgcgggtaaagcccagaatacctgctttggcagcggcatagttggcctggcctgcattgcccattaaagcaacaacggaactaatatttacaattgcgccgctacgctgttttgccatatattttacagctgctttagtgcagttgaacacacctttaaggttggtattgagaacagcgtcccaatcttcttctttcatgcgcagaagcagggtatcgcgggtaatgccggcattattaacaagaatatcaatatggccgagttctttaaccactttatctaccatttcagcgcaaacttcggtttgggaaacgtcgccctgcacgagaatggcttttctgcccattttttcaatttcagcagcaactgcttcagcagcagcggtgctgcctgcaaaattaacggctacatctgcgccgttttcggcaagcaaaagcgcaattgctttgccaatgccgcgggatgccccggtaactaaagctactttgccttctaacagcattttaacggacctcctggaaataagcaagtgtttttgcaaggcttgcttcatcttctacgttaagggaagttacggatttgtcaattttcttgttaaagccgcacagaactttgcccgggccaacttcaacaaaagtatctacgccgccggcaatcatttttcttacgccggtttcccaaagcacaggcatagcagcctgacggattaaggattctttaataacctctgctttggttacttcttcggcgttaacgtttgccataacggggattttagcatcgtggaaagtaatggttttaaatacttctgccagacggtcggaagcgggctggagcagagtgctgtggaaaggagcgcttaccggcagaagaactgcgcgttttgcaccggcttctttcaaagcaacaagagccttgtctactgcgccaacggcaccggcaattacaacctggccggggcagttaaagtttactgcctgtactgcttcgccgcattcagcttccacgctgcggcagatttcaacaattttatcgctgtccatgccaagtacggcagccatgctgccttcgcctacaggaactgcttcctgcatgaactggcctcttttgcgtacaatgcgtacggcatctgcaaaatcaagtgcttctgcctgcaccagtgcggaatattcacccaggctgtggcctgctgcaatttcgcaggttacgccgttttcggcaagaactcttgcacaggcaacgctggcagttaaaattgccggctgggtattaaaagtaaggcgcagctggtcttccgggccttcaaagcacagtttgctgatggaaaaaccgagtgcttcgtcagcttcttcaaaagtcctgcgtgcgcaggcatagttttcgtacaaatctttgcacatgccaacgctctgggagccctggccggggaaaataaatgctactttactcattcacaaagcctctctttcgccaattatttacaccatttaagaacaatactgccccaggtaaggcctgcgccaaaagcaacaagcagcaggttgtcgccttttttcatggcatgctggtcctgcatttccgtaagagcgataggaatgcatgctgcggaagtattactgtatttatcaatatttacccaaactttatccatcggcattttaaaatgcttggctgcagactgaatgatacggatattggcctggtgcggtaccaacatatcaatatcttcattggtcaggccggcctgttcgagggattttttagccgttttacccataatttttacagcgaacttaaatacttcgttgccgttcatatgtacggtatgttctttggcgtcaacggtttcgtggctggcaggttttctgctgccgcctgcgggctgcataaggtgaatgctgcctgcgccgtcactgccaaggtcaaggcccaaaatgccgtagccttcttcaacctcgccaagtacggctgcgcctgcgccgtcgccaaacagtacgcaggtattgcggtcttcccagttcaaaatacgggaaagggtttccgcaccgattacaagggcttttttataaacgccgctggcaatcatctgtgcagcaacgcttacaccgtaaacaaagcccgtgcagcctgcggaaaggtcaaacgcagctgcgtgagttgcccacagtctgtcctgtacaaggcaggcggtggaaggatatacgccgtaatcaggcgtagcggttgcaacaataataaggtcaaggtcggcaggggcaacaccggcatcttccagtgcacgccttgcggcgataagggccatgtcacttgtagcctgttcaggagccgcaatatggcgggttctgatgcctgtgcgctgcacaatccattcatcgctggtatcaaccattttttcaaggtcgtggttagtcaaaatcttgctgggaagatagctgcctacacccaaaataccaacttgttttacagctttagtcatgtatttatcctcgtttctttatttttcttcgtctttgatgacaatttcagcaatatgttttaccacgtcacgttcggcaaagttaatggctacccttaccgcactggtaatggattttgccttgctgttgccgtggcaaatgataaacggagccttaacgcccaaaagcagcgcgccgccgtattccgtaacgtcagcacgtttttttaaggctttcattgtcggcagaagcaaaagcccgccgagttttgccattaagccgcctttggaaatggcgtcttttattactaccattatagcacttgcaagcccttctgcaaactttaaaacaacattgcccacaaagccgtcgcatacaacaacatcaacggtgcctttattaatatcgcggccttcaacgttgccgataaagttaatatgctgttcttctttcagcagcgggtacgttgccagagcctgctcgttgcccttggtttcttcttcgccgatattcaaaagacctacgcggggtttatcaacgccaaacatcagctccgaataaacgctgcccatcagtgcactctgcaccatgtgttccggtttggcatcaactttggcgccgctgtccaaaagcaccgtagtgccggtaagattcggaatcggcgttgcaatagccgggcgctcaatgcctttaatgcgtcccaggtaaaacagcgcagccgcaacagcagcaccggtactgccggacgataccagagcatcgcattttttctcgcgcaaaaggcgggttgccacaacaatagaagaattcttctttgttttaacagcaatggaagggtgctcgtccattcttacaacttccgttgccggacaaatgctgagcctgctgtccgtatcggctttgtattcgcgcagcaggttctcgatagtttccgggtcacctaccagcacaatttcacagttaaattcttttacagcctgtaccgctccaagcacaagttctttcgggccatagtccgttcccattacatcaagcgcgattttcatatgcctgtgtcgtcctttcgtccgggcatggtacaattataaattttgcccggaatacttcctcattattatttcttattttaacccaaattatatatttattaagctccctgcggataacctctgcctttgccaccagcgtagcccctgcgtatacgggcactttatacttaacattgcccacaccggtaagggccgcttcggcatcaacaactgccagcgccagggtatttgccatggcaaacatgtaatagcctcttgccacgcctgttttttccaataccatatcaggagttattttcagcatggaaatgccggaatgattaagttccaggtcaatcaggtcaccgacaatatcttttttgtcaatggctttcagctttacctgcgcattttcagccatctggcgcgtgcgctcgcgcagttccgggatgttaaggcttagcctgtccaaacggatagtctgaatgctgaccgccagatttttagcaagctgctcatccgttaaaaaagggtttctttggagcattttaaacaagcgctcatgccgtattacttttttagcagaattcataacatcaccttattttaatacctactcctaatatctggatttattataatagtacaaataaaaaaaagcaagcaaaattttttacttgcttttcatccttaaaacggcaaaataaaaagaggccgcaaagcctctttaacaaatatccggttaaaagcaaaaacccccaagcctgaggcttagggggtattttttactcagcgtcttttgctacaacctgtttaccattgtagtaaccacattcggggcaaacacggtgcggcattttcatttcgtgacattgcgggcattcaactaagccgggagcggtaagcttccagtttgcacggcgggaatcacggcgcgctttagacatttttctttttggtactgccattgttggtacacctcctcaagctgtaaggcaaaatttaatttttgatgaattgctttaatgccgccagtctgggatcaaccgaagttgtatcacagccgcagtcgccttcatttctgtcagccccgcagaccggacacagcccacggcaatcttccctgcaaagtgcttgcaaaggaactgccaaaaggaggctctctcgaacaggctctgttatatcaagcagatctgattcatagataaaagcatcattttcaatgttttctgctcctgccggataaaatttttcaacaacctggacattcagcttttcggtataaaccttaaggcagcgtccgcaggtgcgttcaatttccgttgctgcttctgccttgagcaaaattacatcgcccgcattttcaaccatgccttttaaaacaacaggcgcggtaatttttaaatcggcttctgtaattcccagctcgtctggcgtcagttcatacgaaaactctttgcttccgacaagtctttttttgatttctgcgacatttattcttatcatatttcaccaatcgtatcaattatagctatgtgaagctgctttgtcaagtaatagttatcgcccgcaggcttacaattttataatgcggcggcagatatttacagtgtcgcgcgcaattacaagctcctcgttggtaggaattgcaaaaatttttacctttgcgccgtcaacattaatttcctggtttttgccgcgcgccttgtttttcactgggtcgatgccggtaccgagatactccagcccttcgcagattttctcgcgcatcgaagaagaattctcacccagacctgccgtaaacacaatggcgtccacgccgcccatcgccgccgtataagcgccgatatatttttttacgcggtaagcaaaaacgtcaatcgccagctggctgcgttcatcgccgcggtgcgccgcgctttccaaatccctgaaatcgctggaaagcccgctgatgcccaaaacgccgctgcggcggttaagatattcatcaatctgctcggcatccatattttctttaacaattaaaaacggaataatcgccgggtcaatctcgccggagcgcgtacccataacaagcccgtccagcggggtataacccatgctggtatcaatggatttgccgtatttaacagccgccacgctggagccgttgcccagatggcaggtaataatgcggtaatccgaaacttctccgcccatcattctggcggcttcctgcgccacatatttatgcgaagtgccgtggaaaccgtaacggcgcacgccgtattttacatacagttcataaggcaggccgtataaataggctttttcaggcatggtctggtgaaacgccgtatcgaaaacaacaacctgcggcacctgcggcattaacgccatgcaagccttaacgccgtttaagttgggcgggttgtgcagaggcgcaagctcggcgcacgcagcaatgccttcaagcacatccggcgttacaagcacggaatcagaaaagcgttcgccgccgtgaacaacacggtgccctacagcgtcaatttcgctcatgcttttaataacgccgtaatcgggatttaccagtgcgtctaccgccagctttatgccaaagttatggtcgggcacgtctatattgatatcaaccgtgtattttccttccggagtatgctttaaaacagaaccgtccatgccgatacgctcaatcaagcctttagccagcaccttttcgccgttcatatttataagctggtatttaattgaagaactgccgcaattaacaacaaaaacaatcacagtattcacccctaaaattagttttgcacttccgggtaaattttaatatactattagtatacactatttgacatttaaccgccagtaaaactttctgaggtgaacctatgaaaaaatctatcggcattgtagccgaatacaatcccttccacaacgggcatttgctgcatcttaccgaagcgcgccgccttgccggaggcgctttgcccgttattgccgttatgagcggcagcgttgtgcagcgcggcgaacctgccttctgcaataaatgggcgcgggcgcagatggccgtgcaaaacggtgcagaccttgtactggaactgcctgccgtattttcgtgccgcagtgcggaattttttgccgcaggcgcagttcagcttttagcggcgacaggaattacgggttacctcgcttttggcgcggaaaccgcggaaacacaaacgcttgcagctgccgcccactttatcaacactcatcaggaagaactgcgcgcgattataaaaagcggtgcttcttacgctgccgcccagtccacccttttgcaaaatgcaggctttacttttgccgcggcggaagcaaacgatattttggcgttggaatactgccgctgcctgcaaaaatacgcaccgcaaattgcgccgcttgttatacgccgctgcggtgcaggctacaacagcagcgatataagcgcggaatacgccagcgccagcggcatacgcgcggaatacgccgcagcagggctttccggcaaaattttaaaacaaatcccggaatgcagccatgaactacttgaaatgctccattctttaaatttgcttggctggaatgcagaaaaactcgacgtgcttgttttatacaagctctgtatgcttacggaacagcaaattgccgctgcctgcgaatgcaccgaaggccttgaacaccggttaaaagcagcagctgcctgcccggatatgcaaagcgctgtaagcagcgtaagcagcaaacgctatacaaaatcgcgcatccgccgcctgttaatgcagcttttgcttggcaacgataaagccatttttaccgaagccaaaccgcaatacctgcgcgtgctggcttttaacagccgcgggcgcagtatgcttgcacaaatgcgcaaaacatcctcgctcccggttattaccaaaataggccgcaattttaaaaactgcctcaccggcaacgccgaaaaagacaaacttattatacgccagctgcaaacggatattaacgccgccaaccttttggcactgctgcaaaaccgcagccaaaactactgccaaacttacaacagtgatttttttatgcagccatttcagcaaaccctataaaaaaacaaagccgcttacccgtaagagtaaacggcttaaatttttgccttattatttttcttcttcgtcgtcctgaatttcatcgccgtaatattcctgcggcgctgcaagtttgcggcgttcatcgttaacggaattgcggttatcgttcaatccctgcagggcagactgcaaattgccgcttaaatatgccagcatatcgtcggcatattgcagcacatccatttttacgcgctctgcataagcgtctgcttcttccttaacttcctgttcatggcgcagggccgtatttttaatatcttcggcaaaagcctgtgcctgctgcacaacttcttcctggcgtacaaggcgttctgcttctgccttggcaatttccacaatgcgttccgcctcggttttggcctgcacaacaatattgtcggcatcttcgtgagccttgttgattatggctttctgttcttccaaaagcttggcggcactttttacttcacggggaatggcttccttcaaatcatcaagaatctctgccaaatcgctttcttccacaatgattttatcagtcagcggaattctgctggccgcagaaataagattatacatttcatcaaaaattctgtctaaagcagcactggtactcttgtctatcatcgtaacatcctctttctataacaagtgtttttccgccagcagctccttaatgcgcacctcaacgttatcgggcaccaaaccgtggatgcagccgccaaacgtagccagttcgcgcacgccggaagagcttaaaaacgaataattggcattggtcatgataaaaacagtttccagattattatcaatttttttaatcagcagcgcacgctgaaattcatactcaaaatcggaaaatgcacgcaggcccctgacaataaaaggagctttttcctgcctgcaaaactcattcagcaaaccagaaaaacaggtaaccctggcatttgggatatgcgctgttgccatacgcagcatttcaacacgttcttccatgctgaacattgctttttcctttcccggattgtgaaaaacactgatgacaatctcatcaaacatctggcttgcccgttcaaaaatgtccaaatggccattggttaccggatcaaaactccccgggcaaattgctctgcgcactttattaacctcctaaaatctgctttgcagacggtaaattttggcaatattctaaaagctttattctacacaaaatgtaatattcctttaattgccgcaccttttatctattgtaacatgttttcacacttttgcaaaacgtataaagctaatttttgtttcgccgtaagtttcgcagcgcacaagttcaaactgcggcggcagtgttcccagctcgtcatgtgccgaatgttcggcaattaaatagccgccgtcgtttaaaagagggctttccgccagtgcggcaataaccttctgcaccaaccccttgttataaggcgggtcggcaaaaacaaaatcaaaactcatgccctttttatacagccgccctatcagctggcaggcatccccgcaaattgtttccgtatcgtcctgtgccctgcatttggcaatattgctttccaccagccgcagcgattctttgcttgtatcggtaaaaacaattttttccgcgccgcggctccagctttcaaggccgagattgcccgtaccggcaaataaatccagcacctgcacgccgattattttgctgccgataatattaaacagcgattccttcaccctgtcggcagtaggacgcacatcccagtttttgggcgtagtcagcttcagtcctctggccctgccagtaataattctcattttaaaaactccgtacttgtaatataatatttgtaactatacgctgcaaaggaggcttaccatgaaaaaatatttatggctttttttaaccgccctgtgcagctatattttttattttttcagcctgccgccaagcacgccttacacaccgccgcccctgccggtgcaggaacagctgctgcttgtgccgcttgacagccgcccgccctgtacgttaatagcgcaggatttgggcaggcttgcttccatagatgtaattttacccccaaaagaacttcttgacaactaccgcacaccggcaaaccgcgaaaaattatcctcatggctcagccataacgcaggcaaatgcccggctgttatttccggcgaccttttaattcatggcgggctgcttgcttcgcgcctgccgcagggaaccgttaatgacgagcagaacttttttaaactgctgcaagagatgccttcgggcgaagatattaccgttttttcgattattccgcgcctgctcgtaagcgataacctgctgccggacgcctggtaccagtggcacttaatgcgttattccaccctgcgcgatattgtagaacagtttggcgactacccttccacagcgcagctggaagaaattaaaaataaaattccgcaggaaatactgcaaaaatataacgtgctgtacagcactaacgacagttttaacaaacagcttgcagcattgtgcgccgccaaaaattatacgcttgtaatagggcaggatgacgcccagccctttggcctgcccaatcgcaaccgcactcacgccgaagcctatatgcgccgggcagggttaagcagcgccagcacaaccacctgcggcgcggacgaaatagcgcaaatgcttacggcacgccgtttttgccaaattaataactatacacccaaattttatattgaatataccactggcagcgcagccaccgccattatgccatacatggcagttactgccgaagccgccctgcttgacaaaattaaatttaccggcggcacgctgacgcaaaaccttaatgaagccgacgttattttatatgtacactgcggcagtgccaaagaacctgctaacgaaaaaatggcgcagaaactgcaaacactgcttaacagcggcaagcatgttgccgttatcgacgccagtgaagattatgaaagcagccagatgcttttgcccgtgcttttggcaaacaacgtaaccgtaaacaaacttatttcttactcggcctggaacaccttcggcaacgcggcaggcacagccacagcgcaaagcgcaatatttacagggcagcttaaacgcctgccaaaacatctgctgcctgagctttacgcgcaaaaccttaactttacagttgcccgcctgctggatgattacagctaccaaaaacttttgcaccaccgcctcagcaccatactttccctgcgcggacaggaccctgcaaatttgaatgacagctataaaacttttgccgaaaaaattatagaaggttttatttataacgaaaagcgcagccttttatatactaatttaggccttacgcccttttacagcgacggcgcagatgaatattaccttaccggcattaacgccgaaacaaaacttccgtggaacagaatttttgaaatagaattaaaaacaaattgtgaatacggcataaaaaaatctgcacgataattaaagcacaaaacctcacggcacataaataccgtgaggttttagtttatttgttaatttattgttttacgaatttttaagcagtatttaaactaatcagcagctttttaaaacatttttgcttgcttttcagtttttaaaattttccagactgccgcacaaggttagagcgtaaacgcttttggcgcctgcctgctttaaggtttttgccgcttcgtccagcgttgcaccggtggttaaaatatcgtctaccaataaaattttagcaccgcgtacatctccctgcactgcaaagcagccgcgcacattgctgcggcgtttatccggcgcaaggccgtactgcggcgctgttgcctttatacgcgccaaaacctgcggctgccacgcgcctttaacggcaagcgcttgtgcaaaaatgctttcaggtatatcaaatccgcgctgtctgcgccttactgcatcagtcggtacagatacaaccatatcaaagccattttcgccatacgcctgcactaaaaacgcagcttcttctgccagcggctgcaaaaatttgctttcaccttcaaatttaagtttgtgcagcatttctttaagcgcgccgcagtatttataccccattaccgcgccgtcaatgtttaacagtcccggcattgtttcaagcaaaagtgcgctgcgcctgcacgcagggcaaaatacgccgctgtcggtttctgcgccgcatacggtgcagctttgcacaaaaaacacgcttacaagcgcctgccaccattcttttatataattcaaattatcaccattttatcaaaatacatcagcctgttcttgcaagcgttctgccaaaagcgaatagcgtttgcgcgttttatcgtttaaaacagctgcctgcacggcttttttgctgccgactattacaaccttttgccgcgcccttgttaccgcggtgtaaaacaggttgcgctgcagcattatataatgccccggcaccattaaaagtattaccaccgggtattcgctgccctgcgatttatgcacgctcatggcataggctaactgcagttcatccacctcggcagaagtgtaaacaattttgttgccgctgataccggcataagcatattcatcttcaaacgaggtaaataccggtttgccgccatcgtcgtacacaaccgttacattgccgccgtcgatgcgtattatgcgccctatgtcgccgttaaacacttctttttcgtagttgttgcgaatctgcattaccttatcgccttcgcgcagtacggctccgcccggcagc

SEQ ID NO: 352 - DNA, 19956 bp, unidentified
  source 1..19956: mol_type = unassigned DNA
ttacgcaatgtgtgcgccgcttcgatttccagcgccgattacaatcaacttatctgaccaggcgctgataagtcggtttcttcgtggaaaagtgtactggctcggacgaactccaggcggatattcagataataaaaggcctttctcctctatcctttccatcagtcgaatatatccttttttcctgtggtcaggcaccggatgctccccggatgctatgaatgcatctattccctgtattgcaaaactccttaccacggtagccacatcgcatcatcttctatcattcttccatccttctgctcctgcataatatatttgtgtcctgtatctgcaacaaatttccgataacgcattacactattatttttaaaataagccagtgtcttcgacaccattgtgatcttatcatcggaaaggccgatcattgttcggtaactgctccagcgatattcctccggatatttgaccatgcctgcttttaccgggttcaaatgtatataccgactggtctgcaaaaaataggagtcctcttttaccagacaggatttatatcgtccctcaaacacatattgcagttctcctcactccacggtgcatcagatgataattgcacccggaaaccatattctcctctttcttgccataatcctttcgtttttctgttgaaacacatcgttttttatcacattgtcatctatgattttctgcaaaaaatgagggactttctaattccctcattttctccggcgtcactcttgctctttgaggtcacagatttttatgtctatatgctttcccagggcgtttgcatatttttccagtactacaagcgtaggaatcctgcttccgctctcgaatcgcgccagattagatggcaggactcccataatgtctgcgatctcctgctgagtcatattctggcggtgtctttcctccaccagcttcttaatgatttctgaggaatgatacagcatccgttcctgtattttctctgtatatacaagtaaccttctctcgcgtgcttccttctctgcgatataactttctatattgtactgcatagatttttctctccatcacccggttgctttttgtaagcgtatcacctatgatatggttatacaaccactttttcttttattcttccgatttcatagaaattttagagttttttattgttttttcccggggtcttttcccagggtcaggcaccggatacttctaccgccaacaactattttccaaatgtattactggattttgctgctgcttttgcaatcatagtgttggtcgattcaaatagagaagtggttggtgcaaccggacacatcagtactcttcctgtgccacgatagacatttactaacccttctccgctaactgctgatcctacaagtgtctttgtcgatctttccacagtaaagtcaaggtttgatgaccagcatacagcaaggtttccattaattttcaattcatcgttttccagtacaatttcaatcagttcgtcttcaggaacattagattccagtgctgccacgccatttccctgcaaactcaggttaaacagtccttctccacctaatacagcagatgaaatattctttctggctacaacattcctttttatattagcatcacaagccaaaaacatgccatcttcgattgtcattccagcagatccccatttgctaatatctgccaagataatgtatttatatgttggctccagtaccagacagccttccccaatatattccggtttaacagctgtttccttagtaactgcacctttgattgcttttccaaagaaatctccgataccttttactccggatgtggcccgtacattaccacccatccactgcatagcacctgcttgaataatagcagaatgatccttatcgatatcaataaccacctgccttcttctgacgttcattctgctcatgaagtactcgttcattgcattcatcggagaaacgctagcatcctgtgcatattcaagaacatgaaagtttcctatgcttttcacaaattttctattttcattttgtaaattctcaattctcatatcgtcaatcgtcctctcccttcgattttccaggtcctgataccaatttcctacgacattatttaccttattcttataatttcatagaaattttagagttttttattgttttttcccggggtcgggtagcaacaattacttcactcaaactgttttaattcttccagtggttccttgctcgtatcaatacacataccatctttcagccagtctgctttcgtatatcccgttcccgtcacttcatatacctcgccttttcggccgacagacttaacccagccccacataataagcatatccaatgcttcttgccatctggcagattctctctgtgaattatctgccataaactgtttgccatcagctgagacctgaaccgctgaacctaatgtagcaattctgaagatttgtccatttccctcggctgcgtatactaaaagaaacgctggttcaactggaatgctaccaacgtcatctcgtcctactgttggcacatgttgttgatcagcctcctctgtatctttacattctcttgccctagcttccgtaatagtagatattctatctaaaaagtcatcgcgctgtctttcccatgttgcttcagacattgggcgaagattgaactcttttataagttcatccttaaactcactcaatctatattttaatgtcctgttgtttgaatcatccaatttaattgctatttgtgtcttatcaatgcatccatctagctgattgaattgaaatcctggcagtaaaactcctgtccatttatgtttcattgcccatgtagctcccatttcatttaatgatgcagcactactataataatcttttgaaaaagcataaatcacatgaaggtcactattctgaaattcattaacaagccactcatacaccttattgccaagtggaatacagtacggaggaactgatgaacaaattatttcttcatctcttaacccaagaatttcaagcaaacccacaaatgcttcgacataatcaacatctttgctactgtgtgatataaatagtttatgtggtttatccatcctactttcctcctctactgattcagatagtgtttttcctaatactgttaatttggcctctaattgagcaaatgttgaatcatcaccaacgttttttcccatttttgaaaaaagatgaattacatcttgaactgttttactctgtggaagtttttcaagttccgcctctatttctgctttccacagcaaatatttttcatcattatgaatcgtttgatatggagtctgaatagcaggctttccggctggctttccaaaagatatgtactccattttgaatcgtttttttatatctggagtctgctcaataagcctaatcaacctttcatttgccaactacttttcctctttcacctaatcattaacttttttaatcacatctcagccgatcatcgaatccctgattcgtagatcgttgcctgctgctcaccacggagaggtgtgtgatctatcaaaaagatttttgatttgtacgagcagcgtagggagcatccgctcccagtatattacaggtctgcaaataaatcggctttgtacacgccgtcctccagcatcttcttgaagctatcctttactgctgcaacgtcctcatggtaggtcatgccataccatgtatcgtttgtcttcaggactttcacggacatctttccctgttccaatagcttaccgatgaaaatcggaatcagatactctgctttcagcggattttcaggtacttccttcttgaaaaactctttgaatccctgctccagaacatccagaaaatcaggagtcaatccccacatgttcatagataccagagaatttacatccacagccactccgtctgtttctgctccagttgcagtctttacaatgttcttggtctctacaacttcagtcaagttcccgttctcgtccatcatgcagataccgcgggtcacaccaccattatcggacagcgtgttcttcagtacaaaccctgccatacaggacttaccgccattcaccagatactcatgaacagccttgaagccttctttgccatagtaatcgtctgcattgatcacaataaaaggagtcttgatgaccttctttgcagcaagcactgcctgaccagttccccacggctttgtacgaccttccggcagagttcccggaatatccttaatatcctggaaagcgtagtctacagttacatcatgagcggagcaaatagctgcgatacgatcaccgattacctctttgaactccttctcgatatccttacggataataaataccacatggttaaagcctgcctcaattgcatcatgaattgagtaatccatgatgatatgatttgaagcatccaccggctccaactgtttgattcctgttccaaaacgactgccgatcccggctgccatgataagtaatgttgtattcatagtttttcatcccctttttctgacaatattcttttaccataggtttcgttcttcacatctcagccgcccaaaatcgaccgttgcctgctgctcaccacgaagaggtgtgtgaaggtttgagcagctaccgtgtggaggcccacacgactttattttgtcgaatacagacacgagttcgacagcattcgcctttctagttacattttgttcattttgcgtttacagtttagtaccgagggtctggcaccaaatattccatgaagttaatgatcttagctaaatggcatttcctaatgccatttgattattccggggatctctggttcttcctcaattatccgtatcgtttggccttcacatacattagttttgctgctaaaagtgctttgctgcatcttccatacatagtacgttttaccatttttaatttactatttgttccttcaacaaaaccatttgaaagttcacaggcaacagaattctccacagcttctagatccttttctaatccatttgcaaatcgggatatttcttttaaatcggagtttttgtaccgttctataaacaaatacaatagaggcatacttttcttttcatatacttcacggaattctcgaacacaacgcatcaattctctgagtttaggatatttctgtaaaatatatgcctcatgatttgcattgagttccactcccatccaaagataacggaatatgccgtttcgtgaaaggtggtcatatttttgtaatgcctttttattttgaattatttcaggtgaagaacttttgtaaattgaaacatcaatttggaatcgttctatgattttattcatatagtcataagcagcagatttgccgcctttatatcctttttctataacattgcgatatacatcttttcgactgacgccagaagttaaagctctgataatataatcataaaactgatccattccgctacgaaaatcttttttacaaagtgcttcatattctccattgagatattttgtcacggtgtttctgctgcaatgtaatactttagaaatttggcgtttactgtatccggcagagttatattcttttatcgtagtgtacagttgtacccttttttgtttatattcgctaaggttatacacactgcatggcattttttttactatcgttttcaaccgatcgttctgcaatgatattagaatcagttgggattctgatatcattgggcaatacagaattgatagtatttcttatggcctctaataaattttgatgaagatgaaatctgtcagcaatctgcatagcatcgggcaatatttcctttatggcagctgaataagcacttgcccggtctcgtgttatcgtttttacatgtttatttttacttaaccattcttttaatgttttaccatcacgtccatctaaaattgccactggtttatgtgttgtttcatctacaataattgtcccataagtatgccgtttcttaaatgcaaaatcatccactccaatgatgcttccatatgggacttccggttgtgttacataccgtttggttaacaatcggataatgctgtcaccactggttttcagattcatagaacgacagatacgagcactaccttcacagcttgtttccaatgccaaagtgcatataaaatcttcacaacgctctgtcatacggctgtaataattcaaaaatccatccacattctcaacaaaagtcgtaacatcacagaaagaattgtcgcattgatactcgtaagcatttacgattaaatacgttgttctacccaaaatcggaaggtcttgaagttttcttttataagtaccatgtttatgttctgaaatcactccgcacttgggacatatacagtttttggattgcacagaaatatggatataaatttctttttcgttttgaattacttctgtgacgcttattttctcagggtaaaatttttgtagatcaagagcatctttcatttgtttcagctccttccataatgacaaaatttctaagataattttatcattttagcacttttgtttcaattctatttacggataattgcggaagaaccccagtctgtcggattggcggtgttaccgcacgagaatattcagttcgacctgcggacagtgtgagttaattgatccatgcgctttagcctcctctaaaaaactaatagtttttttgtgtcatttagagtgtggcataaaaaaactaattagccaaggcgcaggatttgacgtttacaaataacctccaaactgagtaattttatcttacatcagtttggaggtttacacaaactttgggatgctcccatttgaaccgtaatattcattctttgaatattcttgttcgatgaaatcgcacttccggaaatttggaaatcagagttccggtactcggaaatcgcctattttgtgcttgatgacttatccatttctgttgggatatttgtcaagaccttgccgcatctgcggtgcgtagcaatctttacaaatgtctcagcagaaattatgatttgatatgcacaaaagcggatctaaaaagtaatttccatatcaccggacagctgatgtaaaaccatctggaatattcattcttttcgagcaattaaaaatatcatttctttaacacatttttcatcatattcctgatagatgtttctttactttatttaaataatacataatatttttaactacaaaaaaaactgtctctttcataaaaaaataacagactataaccgttacggccacatacacacacaagcctaaaattggagatagcttatatccacaaaaacaataagttcccatgattacgaataaagaaagatactccttattactgaatctcaattctttgtctttgtactcgcaaataagcatccagataatggatgtacaaaatgttgcaaaagcaatcgaaatagtactattatagacagcaaagaaaagtgcgtttagtactgcacctaagacaatcattactaccatctgttgcaaataaatattttgttgcttttctgctttatataaatttacatatattgatttaactacaatataaaagacttgtgctccaaacaataaaaaaatcacatcattcgccgcaagataagtatttaaataatgaaccaatatccattttgcaggaaatgcagccgaaataacaacaaatccccatatcaaagataatttctttacactcttaatttcatttagactaggttttttacaaaagtaattatacattgatacagttattggcgaaatgaatacatttattatattttccatactcacagcaaaagaatacatagcaaaatcaaatgacagcaacaaaatcttaacaaaccatctatctaacccagtaaaaatactactagaaaaattaccaagcataagaataattcctgatgagatgttttctttatactcattcatatttagagaacctaatttcaggaatctaacctttgtttctaactttagcaacagtattacagtgacaactaatcctataataacctgtatccaaatgtaccacaaatagttatctgatttaataatataaattagaattaaattaaaaataaatatagatactttttctatgtttaacgccctgctataagctccaaattcaccagttgcctgatataatgacttcaaatagcctaatatattatacgatattattccgaaagaaaatgcaatcacaatattatcattaagaaacaaccctacagcaaggacaaaaagctgcattaaaattattaatattgaatagttaaaaaaattatccgcaagttcctttttgtttatttgatcgaggttttttcctccgtacttcaagtacataccatcattgtatccaatactaaaaaaacccgcatacgtcagatacaatgcgtaagtttttataagactataagaatcaactgaaacatattttggaatcaaaaaattagtaacaacgctaattactaaaccaattaaattagcgatcattaccttaaggagtccttttctcataatgctgttttctcctctctattatcgtatacatttaaaagccaataataaacactatccggactcatattcaccttgcacttattagataatttaattatttttgtgctttttataatttcatcaacgctctcttttacatcagaataatcttttgtaaacatttttgctaattgcattgttttagtattatttaccgaaacttgattgacttgatctctgcaaaacgggcatacatcaaccaacaaagagataaaacagtcaattatcaaatagcaaatcggatatttttcattcctccaatatttttcttgcaaatctgctaaatatttaaaaaatttgtttcctttacatgacgccataaaaaatgtagaccattttccttcgcaaatatgataatctgatcgttccccatgtcttatcgtataaaatccatatttagtcagatcttcatccacattatccgtcaaaaataatgtcgcatccatccatattccaccgtatttatataacaacctagttcttatataatcagaaaaatgttgaatagaaatctcattattttccaatttactccaaaaaaaatccgtaacatcaagataattcataagattcgtcttatcgatgattacaacattgtgcttacccttaaacttaataatcgtactaagacattttttcaccaattcaggagcattacaaatcccttgccaccaaaatacccaaatatttgagttttcatctattcttccaatttcattactatcatcaaagctataatctgacaagtaatgtgaataaaggtagtctttgcataatctgtaatattttttattaattttcttccacaacgaaatatgttttataaacggaatagacaacagaaaattataacatcctaacgaaagcccaaaatagcggtatatcgaaataatatttctaatcttccctttaatttttttcacttatatcttcacctcttgtcagtccgaaaataatactatcgacattttcttcggtaatatctttagtgagcaagtctaattgatttacgcttaactcacaattagccaaatcaataccaatgattttttttataatgctctccgaaaacctatatttaattattctggcaggtgagccgcccacaatagcgtatggtggcacatctcttgttacaattgaacctgttgcgataattgcacctttgcctactgtgacccctgacaatatccatgccccatcaccaatccagacttcatcttcaatcttgattggtcctttcgatctaacatcattagttaaaccaaaaactctatacctatatggaaatgtagtgatacatttataattgtgttcaccacccaataaaaaatttgcgcttcctgcaatcgaacaattacttccaattgttaatgcttcgttgggagctccagtatagttaatatttaactttccgtatgtattctttccaacattcactccattgttttgaattaattttaataaatttggagttgtaatgtaacctatacttgtatgattatgcttattgttttttttccaaagtttgcgtatttttagatcttttacgtaatttaatatttttcttatcatatatcttcacctaaacaatattcctttttctatacttaatctttaatcctctaatttttacacaggtgaatatataatacaccgcaaataaaacaatcaatgttgtcaaaaaattgaatgaaatgaatgatttataaaaggtatcatcgataggcatttcaaatacgtgatatgacaaatatgcatacaaaaaatacgtaaatttcgatttttgtttgctttgttgttttatcttagtgtaaaaagcattgaagaaaaaagagcaaatggtctgtaaaacaattacccccataataccaaaatcattataatatcttcttacagcgccataaacatttccaatagaaacaccatttgaccttctaaactccaaatttgaatttgtcaaatatatcccagaaacatcaacaaatccaaatttctgtaatgtggaataaacacccataaatgtttcttggccccatatttgccggcttcctgttggtggattatctaaatataaattaaaattttgaattgaaccccctgcataatatcctatataatccaaaatagaatttactgtattacccactcgtactacatatttcaataaataaaatcctacaaatacagcagccataagtttcaatccaattttgatgtacttaaaggatattctttttttccattcactttttttcatagtgataatataggatgtcataaagccagtagaaaccaaccataaaatgtatcctctaccacctccaataatattttgaagtgctgttaatactacaaacgggattagccaataatcccgttttatattacgatcaatttgattattgtacataagtataaacaatgccgtaaaaccaaatgaccttcctagcttgaggaactgatttgctaatgtagataatccctctgcatcagcattattagcggtatacattctataataagagaacattcctgctattccgagtggatttccaccaataagggatatgcgataaacctctctaaagtaataaatagagataagtatatcgacaataagacatcctataagtattcctttgtcaaattctatgatttccaattcataatctgattgtattcccaccttattatttttcatattaaaaaacacagagggtagtacaaacgataatatcattattatcatcacacaaaatgctttgtccgaatactcaattccccatgatttttgattcaatacagtaaacattatacatattacatatatcatgctgcacagaaccgatggagcaagaagatctcttttattaatcaaatatgctgacataaaaattatgatagtgcatatccataatacaactaacatttttacgattatctccttcctgttccaatatatgcccttttatcattctaaacatatttcctttcaaagcttcttatactgctgaatccttcaaaacagttttcaataatattctgctttttatctatcttcagggagtccgaatactcattttaagacataatacaaatctgtaagccacaatcgtttccgtgaataataatttagaactgaaaccatcttcacaattcctgttacagatcttctgcttaaaagatctattcttttacaatacacttcgtattgtttcgatatgaattcaacttgtttttttgaaaggaagttgctattcagcatatttttgatgatagacgtctccttatacatcctatcaattctattactggacgtatgagccatacgactcgatgcattattatcatgacgtctaaattcaatagtgtctttattaaaaaggtatgccgttcctcttaacaccgctaagccccaaagtagacaatcatgcgggtaaccatcaaaccatatttcatcataatattcaagcagacttcttctaatacacatggtacatccaggtctggctggcttaacccatgatgccaagcgattaatctttattaatgagccataaaacttttcgtaattaaccttctgcggtttatttccttcgtaaaatggatgcggattagaagccagtaactgtatttgcttattgctctccataacagaatacatttgttctactttatcattatgccaaatgtcgtcttgatcggctaaaaaaataatctctcctgatgccctcattagaagtttggaaaaattcttagaatatcctagattattctcattcctataaacagaccattgctccaagctatgtgattttatataatcaagaataaattcatacgtcccatcagttgaacgatcatctgcaataataacttcatccgcaattagcgtctgatttctcaaagactccaattgctcttcaataaaatctttaccattatatgttgccatcacaatcgatatcatattactggtctccattccgaattaaatctttatatttttcctgatattctaaggccattctttttgcatgcaaataattataagcacagtttttcactaggctattaattttatcatctttaactttatttttaatgatagttgataaatcatcaacattatccaaatcaaataattctattccttcttcacaacattttttcacctcaatatgtgaatctatgcgtgacaacacaggcggcaaacctaaagccatcccttccattactgccataggtaaaccttcagatagagatgctgatataaaataatcagataattgcaaataatttgcaggagttgaaacttttccaacaaatatgacattatctttttttgcagatgtttttaatgcaactagttcatccccatctccaattactagtaacttataattatttggaagtgtattgaacacctctattaaaaatttgacattttttcttttagataaatatccacaaaacgcataaactgtatctgattcttcaattttcaactcacttcttttaaaagatttattgactacaagcattgtaggatctattccatttctgatataatcaaatttaacttttctatttttataaattttgtttgatatagtttctgaacaggctattggacaatccattctttttagattatgtaaaaagatattggctacaatagttcctttaacctttccatatttcattatcaaatcaatatccggatcacaatgaatagtagttatttttttagacccatttttcgtatgaacgtttatccaatctgccagtccaccatgtgaatgtataatgtccggactaattcttttaatctcttcgaatgctttatttatccttttcaatttgttattttcatttataattattaattcacaatttaaattgctaaaatctctagcattaatatcgcatttcttgagtgtcattacatatatcttgtattgtgtattatctaaatatttacacaaactatataacatattaactgggccaccatttttcaagctgttaatcaaatacagaatttttctcatttttctctctcctcgataacaaaatacttgatgcctttcttttcaagcattgacagtacttgcttcatacactttattgcgaaatccaaatatttatcatctgataacaaatccttttgcaattctgaaccgccattattctttctcaataataatctattctttatttcatctttctccgcactgataaacaacaccgtattacaacaatactcgttgaacatatcgaaaataccgttaatcgcttcaatagaatctttagaattataaaaaaatgcccataggacctgccccaatccctcatcaattagcacatctttatctttatatttatctaatagtcccaatgtcataaataaatataaattcattttaatcttggtttttctagaattaaaatgaatattatttaatctatttatgccgagtaaatagcgttttgggtttcttgcgacaaaaaaaacatagaaaacaattttattcaaattttgacgaattctattatcagaatatatattgttttcaagtatatttgtataatcgcccaattttttctttgcatatgttgtttttcctgctcccggcaggcctaacaattcaatcattctattaactccctatattttaacattctcatactaaccttatgggcatcatttttcttacagcattccgcccgttttctattagccatcttcccactaatttaagttgagcaattactctctcagcagttttcttctaatcattcttctcaagtagaaggctatcctcccagtttacttgagaattttaatcattatattcacaaattcttgatattaatgttaataaatttgcgctgaccacaagctatttcttatgatttttttccatatttcaattccaaccagcgctaatgtaattcctatcgcataccctatcaaatcaaatctcatatctatgaaatcaaattctctccccggaagaagtcccttcacaacttcatcaataaagctaatagtcacacaaaatattccagctttcaaccatttatcaaaaacaaaatatgcgcttccaccaagcaataagtattctggtatatgtccgagttttctcattaaaatatagtcattccaccaatttgtttttgatgaactacttacaacatttccaataacagcttgtgtactttctgttagttgcttcgattcagccccattttgaaaagtcaatccaaatatcaaaagtaaggaaaaaattagcggaatatatcttatatatttcttcatcctgtcttccttgtctaagcactcatagttttagaatattttatcactaattctttgttcctattatcatcgcagttcccaggaaatacagctactgttcttcattttccctctgcagccttcctatttatttgttcttaatatttgaatgtatccttcaatccaagccacttctggtctttatcactcaggttcagtgctgtaccgtcttccagcgtataaccctctgcacttgcgctacccttgtactcgcccttcatctgcggccattcaataccgatctccgggtcattccaggccatgccgccctcgtcattcggatggtaaaaatcatttaccttatagcagaactctgcttcatcactcagaaccaggaagccatgtgcaaagccttccgggatcagaaactgaactttattctctgctgaaagagttacaccataccactttccatatgttgcagaatctgcacgaagatcaactgcaacatcaaacaccgttccacgcactgcacgcaccagcttgcactgcggatactgcttttggaaatgcagaccacgcagcacacccttggtggacatggactggttatcctgcacgaaatggatgtcgataccagcttccttcatatctttttcgttgtaggtttccatgaaatagccacgtccatcgccgtgaacagcaggctcaatcacacaaaggccctcaataccgcctacatttttttcaactttaatctgtcccatttcctctatctcctctattactgctcgatttctttcaggtaacggctcagtgcatcctgccaagtcggaagtagcttaaatccagcttccaccagcttgctcttatccagacggctgttgaacggacgagcagccttgctcagaccatattctgctgtagttacaggcaaaacttccgtcttatatccagcctgacggtagatttctttcgtgaaatcgtaccagctgatgtacccgccctcgttagtggcgtgataataaccgtacttttcggtttcattcatatcgacgagcagtcgagccagatcatatgtataggtcggtgtaccaatctggtcattgaccacgcggacagtgtcatgggttttgccgacattcagcatggtcttgataaaattcttaccgttcagaccgaacacccaggcaatgcggacaatgaaatacttctccagcgtctggctgactgccagctccccttccaatttcgtctgaccatacacatttagaggtttgtaatctttgcagtccggcagccaaggctctgtgccctgaccgtcaaacacataatccgtactgatataggtcatcttgcaatccagtttcttgcaaacatctgcaatgttctgagtgccgcctgcattgatagcacgaacttttgctactttatcgtcatcctctgccatatccacagcagtccatgctgcacagtggattacagcatccggatttatttctgtaattactttttcaacggcgtccttatcggtaatatccagatcgatatacggtgcctttgttaccgcagagccatctgccacaccgctataggtttcctgaatatcagagccaaccccttcatgaccgcgcttcagaagctcgttcatcacatcatgacccagctgaccgccaacgcctgttacaaaaaacttcatgttctttcctcctgttagcggttgctgtacattttctcgtagtagttttggtattcaccggaaataatggtctcccaccactcacggttatcaaggtaccactgaatagtcttcttgattccatcctcaaacttggtctccggcagccaacccagttcgttgtgaatcttggtcgggtcgattgcataacgcatatcgtgtcccttacggtccccaacatgagtaatcaggctttccggcttgcccagttccttacagataatcttcacgatctcaatgttctgcttctcgttatgaccgccaacattgtagacttcaccaacacgacccttatgaataatcagatcgatggccttgcagtgatcttctacatacagccagtcacggacattcagaccttcaccgtaaacaggcagaggcttgtcagccagtgcattcgcaatcatcagcggaatcagcttctccgggaagtgatacggaccatagttgttggagcaacgggaaatggtcacaggcagaccgtaagtacggtggtaagccagaaccaacaggtcagcagaagccttggagctgctgtatggagagctggtgtggatcggagtttcttcggtaaagaacaggtcgggacgatccaacggcagatcaccataaacctcatcggtagaaacctgatggtaacgctggatgccatacttgcgacaagcatccatcagaacgctggtaccaatgatattggtctggaggaagatgcctggatcttcaatagaacggtcaacatgagattctgccgcaaagttcaccacgatgtccggatgttcttcttcaaacagtttattcacagcttcgcggtcacagatgtcagccttcacaaaacggaaattcgagttatccataacaggtgccagtgtggacaaattgcctgcataggtcagcttgtctaagcaaatgatccgataatccggatacttcttcagcatatggaacacaaagttactgccaataaaaccagcaccaccggtaacaataatattcatgatttaatctcctctacacttatcttttagttcttctttttaatacagatgctcctgatacttaccgtccatgacatccttcaaatactgtccatactgattcttcttcataacctcatagacttccatcagctcatccttgctgatccagccgttcagatatgcgatttcctccagacaagcaattttacgatgctgatgctgttccacagtctttacaaagttggtggcatccactaggctttcatgcgtacctgtgtccagccaagtgaagccctgacccagcagttctacattcagagcgttatcttccaaataaatgcggttcaggtcagtaatctccagttcaccacgtgcagaaggtttcaagttcttggcaaactcgaccacacgattatcgtaaaagtacagaccggttacacagtagttactcttcggatgttctggcttttcctcaatagaaatagcttttccgttcttatcgaactccacaataccgaagcgttccggatcgtccacatagtagccaaacactgttgcgccttttccgctctcagcattctgaaccgctgcctgcaaacgcttcttcagcccgtgaccagcaaagatgttgtctccaagcaccattgccacagaatcattaccgataaagtcagcaccaatgataaaagcctgtgccaatccatccggagaaggctggacagcataagtcagattcacaccaaactggtgaccatcccccagcagatcctcaaagcggggagtatcctgaggtgtagaaataatcaaaatgtcacggatgccagcgttcattagaacagacatcggataataaatcattggtttgtcatagattggcaagagctgtttacttgttacctttgtcaatggataaaggcgtgtgcctgaaccacctgccaaaataatgcccttcatctcgtctatccctccattattctctcgaaaagcttctcatgctccgcagaaactctccgagcattaaatctgttatgtacatcttccaatccctgtgtcaccaatctatctcttaaatcatcttcctgatagatttgtaacacagcttcacttgctccattagcatcatccgcttcaacaagcaaaccattttccccattccgaattacattgggaatagcatccactctgcttgctacgattggctttcctgccatcatatattccggcaaagctaaaccaaagccctcccaacgactcagtaagcatgcgacatcaaaaatttccacataactcatcggattatcaacccattctgtaatatgtaagctttccgagaaatcgttgtcttctgcatattctcttatttcagtctcttgttctccattgccaacaataataaagtgtgcattaggtactttatccttcacttgttttgccatctttataaaaatatcaggtgctttctgtggactcattcgtccaaccatgccaacgacaaatgcttcttctggtatattcaggtctcttttcttaattacaccgtgttgcccattttcataaccttcaatgtccacaccattaaaaataacctgcagcttattctctttacaaatcttcttatcgatggccgactgcttttctgcatccgatatgcagatgatcttatcgcaaaatggtgctgcaatcttctcaatagcagtatatacagcccttttctttgcagaacaacgcatattaaaagcccagccatgtggattgtacacacaatgatttttaaatccaatatccgcaacgcgagcaatcgccccagctttgctagaatgagcatagacaatgtctggattatattttttaattagtgttctaaccgatttaattgcctttaaatcattgcttccgatggcccttgtcatttctacctgctcaaaataatcaaccaaacctttataatcttcttcattaaaatcttgcgaacaaaccaagatattctcaaacttttctttatccaaatatttgagcagcattcggatgtagcgatccacgccacctgctgcctgtgctacatgcagtattctgattttattctttctcatctccaaacaccctcatttttttactaaattttatatacaaactcacaaagatagtatttttatgcttaatcatatgtctatcacatgattaaacaaacaagattttcgtgttccttcactcctcaacttacttcttagcataacaacaagcctatatacagattgcaataacaatctatacgcaggcttgtcctcgtacctccttattttgttttctgctc

SEQ ID NO: 353 - DNA, 15594 bp, unidentified
  source 1..15594: mol_type = unassigned DNA
  misc_difference 4240: note = a, c, g, or t
  misc_difference 4241: note = a, c, g, or t
  misc_difference 4242: note = a, c, g, or t
  misc_difference 4243: note = a, c, g, or t
  misc_difference 4244: note = a, c, g, or t
  misc_difference 4245: note = a, c, g, or t
  misc_difference 4246: note = a, c, g, or t
  misc_difference 4247: note = a, c, g, or t
  misc_difference 4248: note = a, c, g, or t
  misc_difference 4249: note = a, c, g, or t
  misc_difference 4250: note = a, c, g, or t
  misc_difference 4251: note = a, c, g, or t
  misc_difference 4252: note = a, c, g, or t
  misc_difference 4253: note = a, c, g, or t
  misc_difference 4254: note = a, c, g, or t
  misc_difference 4255: note = a, c, g, or t
  misc_difference 4256: note = a, c, g, or t
  misc_difference 4257: note = a, c, g, or t
  misc_difference 4258: note = a, c, g, or t
  misc_difference 4259: note = a, c, g, or t
  misc_difference 4260: note = a, c, g, or t
  misc_difference 4261: note = a, c, g, or t
  misc_difference 4262: note = a, c, g, or t
  misc_difference 4263: note = a, c, g, or t
  misc_difference 4264: note = a, c, g, or t
  misc_difference 4265: note = a, c, g, or t
  misc_difference 4266: note = a, c, g, or t
  misc_difference 4267: note = a, c, g, or t
  misc_difference 4268: note = a, c, g, or t
  misc_difference 4269: note = a, c, g, or t
  misc_difference 4270: note = a, c, g, or t
  misc_difference 4271: note = a, c, g, or t
  misc_difference 4272: note = a, c, g, or t
  misc_difference 4273: note = a, c, g, or t
  misc_difference 4274: note = a, c, g, or t
  misc_difference 4275: note = a, c, g, or t
  misc_difference 4276: note = a, c, g, or t
  misc_difference 4277: note = a, c, g, or t
  misc_difference 4278: note = a, c, g, or t
  misc_difference 4279: note = a, c, g, or t
  misc_difference 4280: note = a, c, g, or t
  misc_difference 4281: note = a, c, g, or t
  misc_difference 4282: note = a, c, g, or t
  misc_difference 4283: note = a, c, g, or t
  misc_difference 4284: note = a, c, g, or t
  misc_difference 4285: note = a, c, g, or t
  misc_difference 4286: note = a, c, g, or t
  misc_difference 4287: note = a, c, g, or t
  misc_difference 4288: note = a, c, g, or t
  misc_difference 4289: note = a, c, g, or t
  misc_difference 4290: note = a, c, g, or t
  misc_difference 4291: note = a, c, g, or t
  misc_difference 4292: note = a, c, g, or t
  misc_difference 4293: note = a, c, g, or t
  misc_difference 4294: note = a, c, g, or t
  misc_difference 4295: note = a, c, g, or t
  misc_difference 4296: note = a, c, g, or t
  misc_difference 4297: note = a, c, g, or t
  misc_difference 4298: note = a, c, g, or t
  misc_difference 4299: note = a, c, g, or t
  misc_difference 4300: note = a, c, g, or t
  misc_difference 4301: note = a, c, g, or t
  misc_difference 4302: note = a, c, g, or t
  misc_difference 4303: note = a, c, g, or t
  misc_difference 4304: note = a, c, g, or t
  misc_difference 4305: note = a, c, g, or t
  misc_difference 4306: note = a, c, g, or t
  misc_difference 4307: note = a, c, g, or t
  misc_difference 4308: note = a, c, g, or t
  misc_difference 4309: note = a, c, g, or t
  misc_difference 4310: note = a, c, g, or t
  misc_difference 4311: note = a, c, g, or t
  misc_difference 4312: note = a, c, g, or t
  misc_difference 4313: note = a, c, g, or t
  misc_difference 4314: note = a, c, g, or t
  misc_difference 4315: note = a, c, g, or t
  misc_difference 4316: note = a, c, g, or t
  misc_difference 4317: note = a, c, g, or t
  misc_difference 4318: note = a, c, g, or t
  misc_difference 4319: note = a, c, g, or t
  misc_difference 4320: note = a, c, g, or t
  misc_difference 4321: note = a, c, g, or t
  misc_difference 4322: note = a, c, g, or t
  misc_difference 4323: note = a, c, g, or t
  misc_difference 4324: note = a, c, g, or t
  misc_difference 4325: note = a, c, g, or t
  misc_difference 4326: note = a, c, g, or t
  misc_difference 4327: note = a, c, g, or t
  misc_difference 4328: note = a, c, g, or t
  misc_difference 4329: note = a, c, g, or t
  misc_difference 4330: note = a, c, g, or t
  misc_difference 4331: note = a, c, g, or t
  misc_difference 4332: note = a, c, g, or t
  misc_difference 4333: note = a, c, g, or t
  misc_difference 4334: note = a, c, g, or t
  misc_difference 4335: note = a, c, g, or t
  misc_difference 4336: note = a, c, g, or t
  misc_difference 4337: note = a, c, g, or t
  misc_difference 4338: note = a, c, g, or t
  misc_difference 4339: note = a, c, g, or t
ttcatcggcactcatgccttcggcaagcagctttttcagaacggattccgcttctgtctttttcgcttcttctgcagcctttgcatcttccttcgccttttttgcctccagtttgacaatttccttgtcgatagctttcagcgaagccttcttctccttcaaatcagttttcagagaatcaatgttggcggtgatagatgcgatttcagcagagagcgattctcttgcagactgcttttcggcaatctgcgttgcaaaatcagcagtcacagttttaggcttattcttgctacctttagttctgggcatacggatacaaacctctttccaattataataactaaagtatatcactctgcgggtctacgagcaatatctatcataccatcaaattggcattttccttaaccttattcagtaccatatccgataaagcaccttggctattcagatggattgctaaaataatatattctgtcaaaaacatatctgtatacattttaaatgtatctttgtttgcattgatgctgttcattcgagccgcaacattaccatggaaattgttgcaacgagaagcatagagaacaccaaaaagaacgaacgacatattttgttcattttgcgtttacagtttagtaccaggggtctggcactttttttgtcggagcctttcttcaataaactttgttacaattttctcatatcctcccgggtcttttctataattttctgaatgatctgccccatgaactatatataactgcttttcaccattacaactatcgtatagtttataagccatagataaaggtgccttcatatcttcgtcaccgtgaatgattaaaagaggaatattggtatgtgctaaagccttacacgcatctgcgtctgataaatcaaaactcccccaaatctttgttcctacattaagcatagtaggaagtagatttttgggtatgtattttgatattttcttgttattattctgctttatcacgtccaatgtagatgtaaagccacagtcatcaataattccatatactgaatcaggcaactccaaatcactgctcatcatcacaattgatgctcccattgaaactcccataagaaaaataggatttttatctccaaagcgattttgtgcccattctacccaatcaagacaatcatatttttctagcactcctaatgttgagaattccccttcactatctccctgtgcgcgtaagtcacatagtagaagattccaattgtgtttttgtgtaattctatatattggcacgccatccaaataactgtgcccccacaatccatgaaaaaacacaattaaaggcgcacctttttctctttcataataatgacctatcagttttgtattatcaaatgcttgtatcataacagtttcatttgattgattttttattttatatgcatctatgagaattctatattcatcatcgtctgcagtacctaaatctgaccatggagtagttcttctttcgcaggttcgctgaaataccaatcggcttccaaatataactccgaccatgcatatagcaaatccaataacaactgttatgaagtatactttttttctcttcacttttgatttcattccttttacataacattattgcttcatttttcgtgttcaaatagttattttcgtaactcaagttggtatttctggcaaatttacaatttataaatacctccatctatcacacagcaatttgaactgtccaaaatcttttttacgtatccctctcttttttgttttactttccctctattatgcaaaacggctctggattactgcccagagtcgtccttgactttacgccttatatcccttttcgcaaatcacgttgaccacttcgtcaacatacttctggcaggtgtcgtggtcaggtgcttccaccataacacgcacgactggctcagtgccggattcacgaaccagaatacggccagtatcgcccagtgcctcagcaactttagacacggcttcctgcacggcatggtcattctgtgcagccttcttatcggtcacacggacattctcaagcacctgcggataaatcttcaacggtgctgccagttcgctcatcggcttcttcttcgccagcatgacttccatcatcttcagactggtcaaaatgccatcgccagtgcttgcatacttggagaagatgatatggccgctctgctcaccaccgatacggcagccgttctttgccatgtactcgtagacatacttatcgcccacagcggtcttggcatagccgatgccctgttcatcgaacgctttgtacagaccaaaattggacataacggtcgtgaccacagtgttagtcagcagcttgccgcgctccttcatgtagcaaccgtaaatgtaaaggatatggtcgccagtgatgacattgcctttctcatccacgcacaagcagcggtcggcatcgccatcgtatgcaaaaccgacatccaagcccttctccacaacaaacttttggaggccctcgatatgagtggagccagcattattgttgatgttcagaccattcggatggttattgatgacgtaggtatctgctccgagggcatcgaacacagacttggcgatgttccaggaactaccgttggcgcagtccagaccaaccttgacgcccttgaaagagtagatacccagagagatcaggtagcccatgtaacggttacggccagagatgtaatccacagtacagccgatatgctcacgatgagcaaaaggcagttctggccagtccttatcgaacacattgagcttgccatcgatgtaatcctccaccagcagcagagtctcctccggcattttttcaccgtagcaatcgatcagcttgatgccattatcgtagtacggattgtggctggcggagatcatgataccacagtcaaagtcatccacacgggcgatatacgccacagacggagttgtagtgacgtggagcagataggcatctgcaccggaagcagtcaagcctgcgaccagactgtactcgaacatataggaactgcggcgagtgtctttgccgatgacgatacgggcatggtcagtatcaccattgcgctcacgcagagcattgtaataccatcctaagaatcgacccaccttataggcatggtctgctgttaatgtaattccggcttcaccacgaaaaccatctgttccaaaatactttgacattttcaatcaccttttaatccttttcttgccaaccatccacggagcagtccttattacaatctcgtatgtcacactacaaatgaacatcgtaacagtaacaacaatcatcgcaagtaggaaactttctcttactgcttctgtactcatatgtagtggaattgatataatcttcaccactatccgatacaccgggccatgaatacagagaacgatcagagatatccgtccaaaatattgcagaattccgtttttattgataaactgagaaaccagaattatagccgtcacaccgatgaaagctgtcacaaaccacatgattcccgatgtcaagttgcggaaagacagaaaaaagttcagcccaaacagaactatcgccgttattcctgcttctaatttcttatcaataatctttgcttttcttcttgccaatacagtaccaacagcgtagaagcctatgtatttgaacacacggttgaagccccaagggaactctggcattgggagcaaaatatagatcaaactcatcagagcagaagcaatatatgaaattttcctgccgcctagattaactagaatattgaacagggccactgttacaaagaagcatggcaaaaaccacaggtggatattaaaatccagattattataacaaccagaaaatagcccggccagagcatcaagaaagctcatgtctgaatcccggaattttctctcaatcaattgccaatagataagaagcagaataccgaatgcgaaatacgggataacaatggtctgagttcttctctttatatccgtcagcacaggcttttctttgtacacccagcctgctgctaagaaaaacagcggcatatgaaaagaatatagccaattaaagatagtttgattggaatagatatgtcctatcgcaacaaggatgatacctattccttttaatacatcaagccatgataaacgctctgctctgctctgctctgctctgctctgctctgctctgctctgctctgctctgctctnnnnnnnnnnnnnnnnnnnnnnnnnnnnnnnnnnnnnnnnnnnnnnnnnnnnnnnnnnnnnnnnnnnnnnnnnnnnnnnnnnnnnnnnnnnnnnnnnnnngctctgctctgctctgctctgctctgctctgctctgctctgctctgctctgctctcaaaattatgttctctccctactctttgtcaattacattttctacttatttttccaaagaatttttataaaaatcactcatatccataatcatccgtctatatgcctcctctaatccaacttctggtttccaacccaattcttgcaatttatcagagtttagtatcatccttgtatcagctgcatagccaaacgaattatctttggggatatcaaacactactttgatttttccgtcagctatcttctcagcaactaaattagccatctcggctatagttgtatgtgttcttggattgctcacgttatatgcctctgcgtttgtaccctttagcaaaattgtaagcagtccagtaatacaatctcttgtatagcaatagtttccttctgattgtcctttcgtgtgtagaacaatatctttcccctgcatggcacttcttgcaaattgtgcaaacaccctattctctcccggaagaattcctgccccaaaggtctgggcgagtcgcgcaattttaacaggaactccatattctgaacaataagccacacacatattttcacacaaacgcttgctttccggatagttacttcgtacttttaaattatctataaaccctaaatcattttctctaacttctttactaatattaaaggctccatacatctccatggatgaaatgtaaaccaccgatatacacttcttttctcgtgcaagattaagtatattctttgttccttcaatacttgttaagagcgtttctaccggtttttcaatcattatttttgaagccgttactgatgcacaatgaaatatataatcaacagattcatcaatgtgtatctcatttacaacatctgcaacatataattttaatgatgaatctatagattcaccaaaaatccgctttgctttatcgatacttcttacaagagcaataactcctatgtctccaatagcaagtaatgcacgaaccaaagaagcaccaattaaaccagtggcacccgtcactaaaatattttttcccttaagctgttcatagggaagatcgtatctagcaataaactctagatcctcttgtaaagcactaagatgcataaaacaccctcctttgcaaatttactattatagcggtcaaaagtaggcttattaaaacacataaaacatagttttgaaagtaaaatgtttttaatccaacaatattcataagtgctctgactgctacatgtgtcagatacaattcataagacactgccccaaatttttccaatactttaataattttttttggtaatttcggcatacaaacagccatacaatacagaagagaaattccccaaaaacacatcaagaaccgaaagccaagttttaatataattatttttattacaggcacaaactgacacagcataagccctacgccaaaaattatcccgtttttttccttatcactaatatattcctgtcggtaaactttttttccacaccagcaaccaataaagaaaataagaaaccttcccaataatatttctatattttgatttaatgatggcattacatatttcggtattaattggatagataaagctaaaaatattaacatcacagcttgactctgattcgtccaattagtgtgaagtaatttataaaccagcggataactcaaatatgcaagtataatgaatggtacataccaaaaagttcttatcccctgtgtaaaaaatgtcacaaagaaaaaatccaacacaaatgataatggaccttttctcataattagaagatcaactaaaacccaatacggaactgcaaccatcaaatacgctggtaaaattctctttgctcttttggtaaaaaagtgcaaagtatttgaatctttttccaacgaaaaataaagtccaaccccggacaaaaatacaaaaaattcaactccaacactactaataaacgtgttatataattggcatatctggcggagccccccagtcaaatttaacgctgccacatcttcaaaataatgatatataattattgaaattattgcgacaccataaattgaactacgtttcttgctaaagatactccaattagtcttcaaatccatatatttgttcattttcttttgcctcaagaatcgcacgcatcgtataaaaatcttcaggagttgtaatttttatattttgactaggtccgtcaatcaaatgcagtttgaatccattctcttgcatcattgtgcatgaatcgatccaattatattcctcttttgctaaagctttttcgtgaacagcgagaatatcatttaaccaaaaagactgtggagcctttgcaactctagaattgctcctactcggaacataatctatcgaagaatctttctcattcacaacaagaattgtttctttaacttttgcggtggtaatagctgatccatattccttaaccgactcaatgttatttgtaatcaacttttctgtaataagtggacgaaccccatcatgaatcagaacaatggctttttcattttttgccaactctttcgcagcatttagtccattatatatagataactgcccagtttttccacccggaacaaccttttctactttttcaattctgaacttatagagaagatcatttaaatagggaatccaactttcgatacaaacaacaactattttatcaataagtggatgattttgaaaatgttctagtgtatgaataattataggtttattgtacatttccaagaattgttttggtcgctctttactatgcattcggctacctacacctcctgcaaaaatcactgctatattcatcatagtataccttacctccttatgtattttgcaaaaaacttcatttcctgtttgaaaaataaaaggcttattccaaataaaataataccaatcacaatgcaatatagaactgcatgaataacccaactttcaacggttatatttgtgaatgggagcattcgatgacagataacgaatcctataaccgaaccaacagaaaacagaaacaactttctataaaaaatactttgcactctttcaggaacaattctgcttgtataatagacatgaaagatcatacggtaggtcattcccactattgttccgattgctacaccaatcagaccaaattttcttacaagtacaacagatatcacaatattaagaattgcctcgatataggccggcaaagtaatttctttaaatttattagccgtataagccagattcaaatgtggaagcttgaccaaatacaacgcttccgatataacaaggagaactccaaataagggttgattataatctgtatctacaatcccctttgtataaagtaatacaaacggagtaattaaaagtgccgccacagtgaaaagagaaaaaaccaaaacaaaaacaacatattcatatatatcgagtttttgatttagctctttccaatcttttctagcataagcctgtcctattgtatgtgaaataccagacagacaagactctatcaattgtttaattcctttgcttacaaggcagtacacgctataaattgaaactattttaagactcgctaaaaaagtaagtacggtaatatcagtgctattgtgaataaatgcagctagattaattgcaaatccattccatctggattgaataagagaattatcaggttcaactttccaatttattctataattcttttttgcatactttccaaaaattaaaggttgaagaataaataagaatccgcttattaatttcagaatatgtatgcttgggtaaacacataccgaaatcaaggctatcacaacattgcaaatcactatcaatgtttgtgtaaaattaacaatatatccctttttatccgcgttcagaattgttttaagtgttaacgaaaacatgtattgaatcagcaatgtcaaggaaagaatcagcgtcaatgaacacacataagaaaatttgaattctgtcttaaaatatagaggatatgcaattgatagaatcacagagtaagcgataaacaatgccccaatttttttatagaaacggtcagccgtcactagaaccgaggatattttatagttatcatggtcaacaattggcttatataaatttgcaataatgactcctgtaattcctccctccactagtgttatatagcttagaaattgattcaatgacgaaaccaatccattcacttctgaaccaaaataaataagaataatctttggaagaacaaagccacttacaagtgtaaagaactgtaaaatcaatccagaaatcatatttaataatgtcgtcttattcttcattcttctttactctccatgctacgactccatgattaaccctattttcctccggcggaagctccatatagtttccatatatacgcttaaggtacttgtcatagtcctcaaacccttttacacatacggtttcaaatttatagtcaaccagattatcaaataaatttcgtggaacactcttctttccccacgttaaatcttctacccattctgatgtgttcacatcatactttgaacagatctttatgtaatatttttcaaaattcttttttgaaatgaatccagtaagaaaattcactgttttcagtgcaaaaaaatgctttctatttttcttgtcaattgttagatcatctcttctataatgaaatatttttcttaaaagcataatatatcgttgatataaatttgattgtctgcatggcattccgtcaaatggaaatacatcaatccagagattaactggtttttcctccatattctctttaaccagaatatttttattgtatatctttaagaagggccattgcccattttccagttcaattcccactccaaacaattcttcatttagacaattagaattcttccttaataaatttaacaatttattatattccggacgcagcattccaatatcaatatcgtcatcccacggaatgaatcccccatggcgtatgcaccccaacatagttccggacataatcgaatattgaatgttattttttttcaaaaacatatctatttcacgcaaagaattcaaaagttctgtctttatctcatcacttgtcagataatccattctataattttctccattttctatttcataaatatgtatggcaccgtttgatgtgttcctgataatacaaaataaaaccaccaataaaacatatagtatagtataataatcggccgaattattactccactttttattggctttaacgcactcatcgcccgtggtattacaattacatcaaaaatcgcaaagtataaagcaattcttccaccataaccacttacactggtaaactgtgagaataaaactgcatatacttccataactaagaagaaagaaacatctcctccctgatctcttaaatatctaaaaccccaaatgattagaataatttgaggcacacgaattaaaagctgatttggcataaatgaaagcttaccagtaacatagcttaaatactgtccaaatccaaacgatgataacgctgacacaattacagacatcgatagcattccggccaatcctattcctactgctatcaccattctcggtgtttcatttctcttgctgatattgtttccagtaaagcttaatttagttcccttaacaatataatcgtataaaagataaattagcaatatcagcaatgaacttgtgtggaataagaacgctatgaacacacaaataaatgcgtttttcttttcctcatttctccaatattcgaaacctagaactcccaaagacatagcgattgactgacgcatcatattcatcgagggattataaaaggccatacaaaagacaaacatcgccatccaaaggtttgtctgtttatcttttctaacagcgatatatagtggcaaaatcacacacaattccaaaatggtttggacgcaatacaatgagcccgtaatttttgtcacaatcaaaactaacagcggaaataaaggttccatatctttcacataatccgttgtccatgtaaaagcatgaaaggatgaattcaagtattctccaagactatgacttttttttgctgcctcaaaaataggcaccaaataaactcttgtatctgtaccaatactttccgctcgcaggccagctagcaagcacaatgttataactgctacaaaaacaacgggttttctttgtgtaaatttcactcgatcagaaagtgcaaaaagacctatcgaaatcataaatacaataatatatggtgtcatctctttttgcctcccctctttacgccttccacttcctatttctcgcaacgacaactttaagtgctattctatttccaaataatgatatcgcagcaaaagcccgtaatctctttggggcattaccatcttttagcacattcatccgatgcgatttcaatacactctgaatgcgtttattctgaaactctgaaagctgtggatttctcgcagcaatatcatatacaacatttatatattgagtcgacagtgcgttatcaaattgtgtttttccttttaccgctcttgcaatatcatcgatagcatccaaagcttctaaatgcttttccttatatccagaaacgacgatgcttccctcatcgcgataatagtaaaaataaccatcaaatcccacataggttacattttcactcttcaaaattgttttatagattgtaaagagatcttcagagaattttccatatgggaattcaacatctgtaaacagacttcttttaaaaagttttccacatgcagacgtgccaaatggtgtaccatatagcatccgaatcaaagcatcttcatttttgtaactggacactttccaatctattacagtatttttatcatcgcgtctgctcgtcctcttcatatttgcaatagctatatcagaattgttctctgacatagcttcaaaaagaattttcacaaaattctttgaaatatagtcgtcactgtcaacaaaagtaattaaatctcctgttgcaactttcattccagcatttctggcatcagacaaaccaccatttttcttatgaacaaccttgattctgccgtccattgctgcatagtcatcgcatatttttccacataaatctggagactcgtcatcaactaaaatcacttcaatattcttatatgtttgggaaagaatcgaagcaacgcactctttcaggtaaagttccacattatatatcggcacaactacacttactagtggcatcttatctctaactatcttattttccgtcatggcataatacttcctggtatatattcttcatagctgcaatagacttggatacatcaaattcttttgctttttctttacaagcaattaccatcttggctctttcttctgatggcaaattcactattttttcaatggcgtctgcaaattgatgtgcatcgtatgggtcgcaaagatatcctgtttttccgggaattacatattctcttatcccctgtacatcagatcccacaacaggtacacctgatgcaagtgcctccactcccgtcattccaaatccttctcttacggatgggatgacagcaacatctgcacatgcatttatctctggaatatcaagtctgtgtcctgccaagaagatcctgactcctaatttagaggctgtttctttgagttcttcctcaattgttgaattaacaactgctcttccgcaaattacaaatacatactgttcttttctatcaagcatacccaatgcttctattataatcttctggttttttcttgatgataattcacctacagacaaaaccatatggtcttttggctctacaccaaatgacgctctatactcgtctctatttattcttaaattagaaaacctattactatctaaaccaacgctcggaataatataaactttaggacaatgcattctttttgcgttgttataatcttcatgatttattgtaataatagcatcacagaatcttgacattagcttttcagcgttaaaataaacaatccagttttttttcgatgacttgtctgtgaatgtaaatccatgtgttgtatatataactgttgtcccagtctttctatatttctttgctgccattctggtcaaaataccaacaataggtgtatgacaatgaatcaaatcatattcttcattcactactttttttaattgtttatacgcaattacattatctcttgataaaggatttttagtatcaaaatctatttgaaaaaaatctatcttcatttttttcaatttttcaacttcaactgcgtcacttccatctggcatacgtgcattcattgctactgaaactgtataccccatttcttgcaaagtttttatatcattccatagaaaagtcaaaaagcctgctaaatttacaacaataagtgcctttttcattctactctccgtgttttcgttgtgctttttcataaatcttcatcaacttgtcataatgtccattgggagtgtagcactcctcaaacatatcaaatgagtcttttttcatttggtcatatcgagcccttgatattttttcaaatttatttatgcacccagataattcttcaatgcatccgctagtaaatagctctccattctttcgaaccagctctggtattcctccaatgttggcgccgataatcggtcttccaacctgtaaagcttctatcgctgaataaggtccattttcgtaccattcagacggaagaactacagctctagcatttccaacaatgtcaatcaattcttgaccacttttaaatcctagcaattttatattgtatagttctctgctcgaaatatatctttcaatttctcctttaagcggtccagaaccaactatatacaacttagcattaacattctcaatcgcctttataagcgtcagtatacctttctcttcagatagtcttccaaaataaagatagtatttttcttgatcttctctatcattgactgtaggtacttctctatccaaaaaattgggaatgtgaactaatcgattaggctgaactccaaattcctcaaatttggtcttataaaattcactcggtgttataatatagtcaattgcatcataagattttctccacttatgtaaataaccttccacggtattaatgcaactttttgaaaaagaatctttcacacatttattcaatgcacaatggtacatatgaccgtctttacaatcttcacaaacatgaccatgatgcatcattttataattcaaacacaccatttttaggtcatgtgcagtatataccgttggaagattatactttttgcatacatctaagattgatggtgataattgatgttgaaagatatgtaaatggacaatatctggtttggtttttattaccaattcttcaaattttctcttagcttcttgggaatagataatattaatccccattttcaacttgttaataagcgaagtgctccctgaatagtcaacattatccacaaaataatcagcatatttagattcaaaatttttcttatctttcattgaaaaatcaattactatatgaccttctttttcaagtttccttttaagagcgaaataataggtctcgctccctccctttatataaaagaatttatttaccattaatattttcattgcttatttccccacaaacacatcttcatactgcccacatatcttatcccatgtgtactcttctgccacacgctttttggctttccggcccatctctgcaatttcatcagcattcatctgatctgtcttatcgaccaactttgcaagactccccggcttgcggctccaataaagagcacaatcctctgcgacttctttattaaagccaacatcaaccagcaggtttaaatctgtactgccgagagcttcaatcagagacgggttcgtaccaccaaccgtatgaccgtggaaataagcataggcattctcacgaatctttttcagcagttcctgatcgtaaacagtgccgacaaatttgattctcttatcacgcttgaaatgaagtttttcctcaagctcatttaagaacttttcattcacattcgtaataatcgcaaagttctttttgctcttgcttttcatgaactcccgaatcataacttcaaaagagttctccggtacaaaacgaccgacgacaaggtagtagtccttttttgtcagtcctttttctctataccagttcatcagcttctcatcgtcatcagccaacttactaagggtcagatctgcaccatacgcaataaatgtagtcttcggatttctgcctttgatgccttttccgtcataacactcgtggatatacttctcgatattcacagagtcacagatagcaaggtcgcaatatttgaccatcatctgctcagaaatcttccaatacttccgaattggtgccgaccattttgccctcatccactcatgtccatccgggttcagatacacagttccacccagtttatggatttctctgtaaaaatgactagcaaaaggcccaatgcggcaagccatgatgtaaacaatcggatgcgggatatggtttttcttgatatgttcgcaacaagcctttagtgcagcaatatcataataaattgcctgcgcaggcccaatctgaggaacatcaattttgaagcagtgggcattgtggaattcaaattcgtggtcgttgatttttgtcacgccatcaaatttgctctcatccatgcagccatcgccattggctttgcaggcaacatgatatttgatgttttctttattctggtgatactctgtgagcttgtagacaaaggtctcataacctccgtaagcccccaatgacttcgcgccgacaaggtatacgtgctgcacttctttttttgaattcattcctctaatccatcctcacatttttatcgctaatgttgcatctattcccttatgaataaaaacaaacctacggcgggtcgcacaaaggcaatccaccgtaggcttgaactctccttcaatctttatttgctgctcctttttgtgggtcaaaacagagcttccaaaagcctcctacatataaccccggattttccgcatcttgcagtttttcaacaaataaaacatttgaaggacaactcaagcagtcaaaaccctttagttatcgtaggttttcttggttgaccctattatttcacactcccc

SEQ ID NO: 354 - DNA, 6231 bp, unidentified
  source 1..6231: mol_type = unassigned DNA
atgggaaccgttttcaataaaaaggagcttttggtcctcttgcaggattttcactgccttacggggctgcgctccgccgtttttgattcgtatggaatcgaagtgcttgcctatccgccggaactgccagcttattgccgcttgatccgcagtgtgcctgatggcaagaccggctgttacctgtgtgaccaggcggcttgccgcaaggcaacgcggcaaaagcagacgatcatctacccctgccatgcggggttgatcgaagtgatcacgccggtccaaatcgatggtgctgttgtgggctttttgctgttgagccacattgtacagggggccgatgagcagagcgagtggagctatgcgcaaaaatgctgctcggcttacgcaattgataaagcggcactgcaaaaagcctataatgccttgccgcgcacgccctatccggtgctgaaatcagcagcggatctgctggctttggcggcggctgcattgtaccaaaagggactgacgcggctggcagcgggcagtgcgcaggaaaaactgagccgctacctggcgaaacatctggatgagacattgacaaacgaaacgatctgccgtgatctttcgttaagccgtaccgggctgtactatctttcccggcagctctatggctgcggcatcaacgagcagatcacgcacctgcgcatccaaaaagcgatgaagcttctttgcgatacgaatctgtccaatgcacagatctgccagcagatcggattcctggatgacaattacttttatcgtgttttccgtaaacaaaccggtctgacaccacgccagtaccgtgattctatcttagcagatacagcaaagactgagtagagacgattgttttcaatactggattattgttcaaacaattctgatggaagcggcaatgttgaattgtggccggtgacgtgctataataaacctacatacggtaagccggcacggcgcaattttgaccgctgccttacggaaaattcgcagctgcggagtataaactgttatgaaaaaatataagatcgcggtggccgggaccggctatgtggggctttcgattgccacgctgctttcccagcaccatcatgtgacggcggtggatatcctgccggaaaaggtcgcattgatcaacgcgcgcaaatcgccgatccgggatgattacatcgagaaatatctggctgagaaggagctggatctgaccgctacgctggacgcaaaggcagcctacgccgatgcggactttgttgtcattgctgcacccaccaactacgacagccagacccagcactttgacaccgctgcagtggaggcagtcatccgccttgtcacggaggtcaatccaaatgccgtcatggtcatcaaatcgacgattcccgtgggctacacggtgtcggtgcgggaaaggctcggcagccggaacatcctgttcagcccggaatttctgcgagagtccaaggccctgtatgacaacctctacccgtcccgcatcatcgtcggcaccgacccggaggatgcgcaccttgtcgcagccgcccacgaatttgcggcactgctgcaggaaggtgccatcaaggagaacattgatacgctcttcatgggctttaccgaggccgaggccgtcaagctgttcgccaacacctatctggcgctgcgcgttgcctatttcaatgagctggatacctacgcggagagcaagggcctgaacacgaagcaaatcattgacggcgtatgtcttgacccgcgcatcggcagccattacaataaccccagcttcggttacggcggctactgcctgcccaaggacacgaagcagctgctggcaaactacgccgatgtgccggaaaatctcattgaggccattgtggagtccaaccgcacccgcaaggacttcatcgctgaccgcgtgctgaagctggccgggtactacggctacgatcaggaaaatgagtttgacgaaagccgcgaaaggcccgtcacgatcggcgtctaccgcctgacaatgaagagcaacagcgacaacttccgccaaagctcgattcagggtgtcatgaagcgcatcaaggccaagggcgcacaggtcatcatctatgagcctacgctggaggacggcaagaccttcttcggttcggcagtggtcaacgatctggacaaattcaagcggcagagtcaggccattctggccaaccgctacgatgcctgcctcaacgatgtgcaggacaaggtctacacaagagatctattcggcagagactgaaacgcctttcttccgctttttgacagtggagtaaggctctccatgccattaccgcacaatatccctgtgacttttaaagagaggaacgcctgttatatgaaatatgattatctggtagtcggctccggtctgtacggtgccatcttcgcccatgaggccaaggcccacggcaaatccgtgctggtcgtggataagcgccccaacattgcgggcaacatttataccgagaacatcgagggtatcaacgtccataagtatggtgcgcacatcttccacaccaacaacaaaaaggtctggaactatatcacccggtttgccgagttcaaccgctttacaaactctcccgttgccaactataagggtgagctgtattcgctgcccttcaacatgtatacctttaataaaatgtggggcgtcgtcacaccggaggaggcagccgccaaaattgaggagcagcgccgtgagatcacccacgagccgcagaaccttgaggagcaggccatctcccttgtaggccgcgacatttatgaaaagctcatcaagggctacaccgaaaagcagtggggccgcgattgcaaggacctgccggcatttatcatcaagcgcctgcctgtgcggctgacctttgacaacaactatttcaacgcgctgtatcagggcattcccatcggcggctacaccaagatgatcgccaatcttctggacggcatcgaggtgcggctgaacaccgattacctcgaaaacaaggccgcgctggacgcactggctgacaaaatcgtctacaccggcccgattgacgcttattttgactacaaactcggcacgttggagtaccgctccgtccggtttgagaacgagctgctcgacaagcccagcttccagggcaacgccgccgtcaactatacggaccgcgagacgccgtggacccgcatcatcgagcacaaatggttcgagttcggcaaggacgagaacggcaacgacctgcccaaaacgatcatcagccgtgagtattcctccgagtggaagcccggtgacgagccgtattaccccgtcaacgatgctaaaaacggcgcactgtatgccgagtacaagaagctggccgacgccgagtcgaaggtcatcttcggcggacgcctgggtgagtataagtattacgacatggatcaggttatcgccgccgtgctggaccgctgcgaaagcgagctgcactaaagtacagccaagcgaaagcacaaaattcaaaaggcagcaaagcagaccccaaaagctaaaatcggggtttactttgctgccctttttatttgctcaatccgctggcgccgcttgccacaacgccgccgtccataagaatgtctgctccggtcaggaagcccagccgctcatccagaagaagcgcaaacaaagcggcgatttcttccggctttccgttgcgcttgagagcagagtattttttgaatacatccgcctgcctgctttccagtgcgcccatcggcgtgtcaaagttgccgggtgtcacactcaggcaacgcacatttttctcgccaaagcgtgcggcatcggtcttagcaaaccaaattacaaaatgcttgctgatggcgtaggccagacccgggcgagcgtccttaggggcgatgcctgcccgcgccaccagctttttgatgaatttttcacggtcggtgcgcgccagcttgtacgcacccttgggcatgataaactgcggggcaaggtaggcgctcatgctggaggtgtcgatcacacagccgcccggtgccatgacctcataaaaggcatcgttgatattcaccgtgcccagcgcattgccgcgcaaaatcttttcaacatcgcccatgtgagggctgaggcccgcgatgtgcaataccgcttttacttcgccgcattcggcggcgtatttggccagcgcaaaacagctttcacggtcggaaacatcacagctgaacgcctcggcctcgccgcctgcactgcgcagatcgttgactgccttttccagcttggacgccgtgcgccccaccaaaatcgtgtaatatccttcttcacagacgagcttcgccgtggcaagccccatgccgctgccgccgcctgtgataacacaaaccttcttcatgcgatttttccctcctgcttgagccaaaccgccaaatcatgcagtgtttctttgtagggacgcggggcaaagccaagctcattttttgccttggagcagtcaaaatggttgttgcgctccagattgtaaacggcaaactcagtcagtacagcaggcttaccggtcttggcggcgcgggcctccatctgcttggcggcaaaatgcgcaaaagaaagcggcatgtaaaacaggcagccgcggcagccggtttctgccttcagcatttcgcagagttccttcagcgaaacctcgtcattggaaaggatgtagcactcgcccttgcgcccgcggtcagcggcggcaatcgtaccggcggccaggtcgcgcacatcgacaagattgaacgagccctgcataccgatgggcatctcaccgttcaaaatctggatcagcgtgcgggtcgtctgcccgatggcggggtcgttggggccaagaataccgctgggatgcaccacgcaggcattcagcccgtcagcggcggcgtccagcaccttctgggtcgccattgccttgctgcggctgtaccagccgaccacgcgatcatcatcgtagggaacaaagctgtatacctcatggatgctctcgcccttaggcagctcggggatggcgccggtgctggaaacatagacgaactttttgcactccgggtgatttttggcggcattcagcatattttcggtgccgcccacattgacggcgatgagtttttcactgtaattcgggttgatcgtcaccatgctcgcgcagtggatgcagacagtctggacgcccggctccacggcaaagaatttctcgcagtcctcggcactgcagaggtcaccctcaaaaatttcgacggccttcggcatgaattttacagcggggtcgcccttcagcacaaaagcacgcacagcatcaccgcgctccaaaagctgtgcgcagacattagtgcccataaatccggcagcaccggtgacaagatagatggttttcatagctgtatcctccgttttcccgtagggtgttttttgtttcgatgctcctaaggatacaccgccaaaataaacctttggtaaacgggaatgtttatctttcgtttatctttgcgctgtactataatagaactaaggaggatacacggatgtttcgtattttgattgccgaggatgaccccagcacggcgcgtctgctttgcgccatcgtaaagcgagcgggctatgagccgctgattgctgccgacggtgtgcaggcactggaaatgctcgaccacaaccatatagatctgctgctctgcgatgtgatgatgccccggatggatggctttaccctgaccaggaccatccgggaaagcggcagcatgctgcctattttaatgctgacggccaaggatatgccgcaggacaagcacatgggttttatcgttggcactgatgattatatgacaaaaccgccggaccggcaggagcttgtgctgcgcatcaaggcgcttctgcgccgcgcccgcatcgtggatgaacacaaaatcacgataggggatgtcgagatggactacgacacccataccgtgcggcgcggccacgatgcacaggtgctgccgcccaaggagttcaacctcctatacaagctgctggcttatccggaaaggacctttacccggctggagctgctggatgagatctggggcatggacagcgaaagtgacgacaaaacggtaaatgttcatatcaatcggctgcgcacccgcttttacgattggccggagtttgagatacagaccattcgcggcattggctaccgtgctataaagaaggtgtaa

SEQ ID NO: 355 - DNA, 39155 bp, unidentified
  source 1..39155: mol_type = unassigned DNA
atcatcgctatttttttatgcaaggctctttggacaacgcttcagcatcgccggggtctcctgaccgaacttgcggcgaagacgttttacaacatagatataggcaggaatcaggaagatatctgcaaatatccatgcgagcggactgccgagtgctacaaagacataaccgaattttggtaccaggataaagcctgcgatcgtacgggcaaccatttcacagatacctgcgataacggcaaaggcggaatagccaagcccctgaatcataaaccggacgatatttacaagggcaagtaggatgtaagctcctgagttgccaagcaggaaataatatacaagcttgatgatctctgtctcttctgcatccaggaagaggagtgccagattcttgccaaataacaggataaatacaaatgcaagaatcgcataggcaataccgagtttgatacatgcctttaagccggcatccacacgatccattttcttagcaccgacattttgtccgccgtaggttgccattgtcgatcccatggcatcaaacggacagcagaggaacatggagatctttgttccggcggatacggcagcgataacggattcacccatcgaattaactgcagcctgaagaataacactgccgatcgctgtgatcgagtactgaagccccatcggaacacccataccgcataaggtcagacagtggcgcatactaaatgcccagtcctgttttgtaaaatgaagatatccgagcttcttacacatatagatcagacagccgacaccggagattgcctgtgcaacaacggttgcaacagcagcaccggcgacacccatcggacgaactaacaggatatccagtacgatatttaacagggaggatgcaatcagacagacaacaggggttacactgtcgccgagagaacgcaggataccggaaaccatattataaaggaaggttgcaggtattcccataaatataataaatatgtagataaatgcctgatccaggatgctgtccggtgtcttcatccagatcagaatatttctggtaagaattccgactgcaactgtcataacggcagcgaagaagatcgaagcccagacacagtttgtaatgtacttcttcatattatcagtgtcctttgctccaaaggcctgagcaaccgggatggcaaaaccattgcagataccgatgcagaaaccgagtatcataaagttgatcgatccggttgagccgacggctgcaagtgcatcgacacccagaaatttaccaacgatgattgtatcgaccatgttataaaattgctggaataaaagcccaaataataatggcagtccaaagttcaagatcagtttcataggattgccttcagtcagatccttggaaccgttaatttttttcagtaagtttttcaatgattttacctccttgtgttagtttagtcgttgcgaacagtttatttacgaatcatactgacattgccaacagggaacgcttccgctcgttgagtcctgcagcggtactaagatgcagcttatgcgccatcgagaaccggcggactcaaatgtccctgtattggcaagtcgtatgattctattaaataaaccgcccgcaacgacttccatattctaaatgcatactggatattacttctttttataagaaaaatcaatctggtaaaaatcatgttttttgtcgggggttttagtgcaaaatgtcatgtttactccggcttgctttttatgactgtagaaaatataatagagaacagaaaatatacagaaagaacgaggaaaacacatgcagcataccgtaaagaaaaacagagcaaccagaattgcataccggatggttggtgtattttttgttgttatcggagcagcatttatcctgttgatgatcaaatcccatggcagtaccggtggtcgtatttttaagctggcatttggtcttgcacttggagtatacggattggtgctggtgaaatcatcatttcgaaaatcggcatttgatctgacctatcattttgaagacgatgaactgatcatagaaaagggaaagaaatcttatcatacaccatatgagaagattacaaatgtgaatctggtcattccggatccgcatttgccatattacatattgaagattgatataggaaaagagcaattcgtactgccgttcagcggaaaacgtgataagtgcgatgcaatctattatcatttattaaagaagatgggaatttatcaggaaagtgagatagaaagaaggtaaatcatgaaagaaaaaatccttgcgttgcttcggacaagcagtgattatatatccggtcaggcgatctgtgagaaattaggtgtctcaagaaccgctgtctggaaaaacatcaatgccttaaaggcagaaggctacattatagatgctgtaaataataaaggctatcgtctggtcggagagccggatattgttacgaaagagaagatagaggcagcactcacgacatcggtgatcggaagagaactgtattattatgatgagacggattccacaaatatacgggcaaagcttgcaggagagacagatggaacacacggagcgttgtttgttgcaaacgaacagaatgcaggacgaggaagaagaggaagggcatggagcaccccgaagggaaccagcatagccatgacatttctgctccgtccggatgtgccgatcgagaatgtatccagacttacgatcctttcggcacttgcaacggcgcgtgctcttgccgatacagcgggcttacaggcacagatcaaatggccgaatgatgttgtagtcggcggcaagaagatctgtggcattcttacagagatgagttcggaaggtatggatatcaaatatgcagttgtaggtatcggtatcaatgtatccatgatggaatttccggaagaactggcagataaggcgacatcgatcaagctggaaaacggaaccggctgtgacagaagcaaactggtcgccagtgtggcaaatcattttgaagagctgtatgacgcatttgtcaaatgccaggatcttcagttcatgctggatgaatataattccatccttgtgaacaaggatgaacaggtctatgtgatcgaaggatataaccggacagaatacacagccctcggacttgcaccaaatggaggacttcgtgtgaaggataaagatggacaggagtcgatcattatatccggggaagtgtccgtgcgcggaatttacggatatgtgtaaaaaactttcaaaaaactggaaatagcaacatttttcatgtataattctaggcgtgtataaaaacaggtaagtaattagaactataataaaagaacatggaggaacgagcaagatggaaaaaattcaaatgactacccctttagtagagatggatggagatgagatgaccaggattctctggaagatgatcaaggatgaactgatctatccatttatcgatctgaaatccgagtattacgatctgggacttgaatatagaaatgagacaaatgatcaggtaacatttgattctgcatatgcaacacagaagtatggcgtagctgttaaatgtgcaacaatcacaccaaatgctgcacgtatgacagagtatgatctgaaggaaatgtggaagagtccaaatggaacgatccgtgcaatcctcgacggaactgtattccgtacaccaatcatcgtaaagggcattgagccatgtgtaaagaactggaaggctcctattacaatcgcaagacatgcatatggtgatgtatataagaacgtagagatcaaggttccgggtgccggtaaggctgaactggtgtttacaggtgcagatggtacagtgatcaaagagacgatccatgaattcgacggaccgggtgtgatccagggacagcacaacatcaataagtcaatcgaaagctttgcaagatgctgcttcaactatgcgctggatatcaagcagacaatctggtttgcaaccaaggatacgatttcaaagaaatacgaccatacattcaaagatatcttccaggagatctttgataaagaatacaaagagaaattcgatgcagcaggtattgaatatttctatacactgattgatgatgctgtagcaagagttatgaaatccgagggtggattcatctgggcatgtaagaactacgatggtgacgtaatgagtgatatgatatcatctgcatttggttcactggccatgatgacatctgtactggtttccccagatggaaagtatgagtacgaagctgcacacggaacagttcagagacactactacaagcacttaaagggtgaagaaacatccacaaactctgttgcaacaatctttgcatggacaggtgcacttagaaaacgtggtgaactcgatggcatcgacgctctggttgatttcgcaaacaagcttgagaaagcgacgatcgcaacgatcgaatccggaaagatgacaaaggatcttgcacttatcacaacccttgagaatccaactgtattaaacagcgagaacttcatcaaggcaatccgtgagaccttagagggcatgttataaaataactataaaaatgttgtttttataatatgatttgagtataataaatataagaatagagatattctcgatgaaagagcatcgtaaaaagttgggctgcaaatggagcagggtaaaaaatccatttcattagatatcttaattgatatcgagccgtgcaatcaggatatggttgtagtccacgtgggggacttaatgatttccacgccgatttagatatcttaactgggtatcgaggctgacaaccagcataaaactctttatgaagaatacaaagaggagtgtggttttcatcacactcctctttgcatatgatgaggtgtgaatggctacaaagacagaaaaaaggaaggcagtatgccttcctttttatgtagacttgcaaacaacggagttatgtggtacactctaactaattttgtggtactataaataatagtaggcaattgcgaaaacaatagtctgaatgttgtttggatactttgacttactaatacaggggtatttgaggtcgccggtccttagatggcgcattaagcggcatcttagtaccgctgcagaccgaaacgagcgaaagcgtcccctgattggtaaggtcaaaagtatccaaacatagtaaagagtagtattgcaattgcctaataaaacccagacaaggagacataccatggttattacagacgaaacaatcgattatgtaggtattctggcgaaacttgagctttccgatgaggagaaggagcaggcaaagaaagatatgtcagatatgcttgactatgtaagtaagttaaacgaactggacactgagaatgtggaagcaatgagccatacattttcttataataatgtattccgtgaagatgaagtaacaaatggcgacgacagagagaatatgctgtcaaatgcaccggagcagaaagatggctgctataaggtgccaagaacatttgattaggaggtaacggacattggatatgatgagtatgacagcagtagagcttggaaagaagatcaaggccggagagatctccgttatggaagcaaccaaagcctgcatcgagaatataaagacatacgacaaagaatataactgttttatcaccgtagatgaagaaggtgcattcaaacaggcagaagaaatacagaagaagatcgacagcggcgagctgacaggcccgttggcaggtgtaccgatcgcgatcaaggataatatgtgtcagaatggtgtacttaccacctgcgcatccaagatcttatcaaacttcgtaccgacctatacatcagatgctgttgtgaaattaatggaagcaggagccgtgatcgtaggcaagacaaatatggatgagttcgcgatgggaagtacaaccgagacttcttattatggcgagacaaagaatccatgggatacaaataaagttccgggtggttcttccggtggatcagcagccgctgttgcagcagaagaagtaccgtgtgcactcggttccgataccggtggatcgatccgtcagccggcagcattttgtggtgtaacaggaatcaagccaacttacggcagagtatccagatacggtctggttgcatatggttcatctcttgaccagatcggaccacttgcaaaggatgtaacagactgtgcaacgatattagagatcatttcccggtatgataagaaagattctacatctgtagaacgtatggataatgattttacaagcgcattaaaggacgatgtaaaaggtatgcgcatcggacttccaaaggactatttcacagaaggactggatcctgagatcaaggatgctgtgtaccatgtagctgaagtgttaaaagaaaaaggtgcgatcgtggaagaatttgaccttggtatggtagaatatgcaattcctgcatattatatcattgcatccgcagaggcaagctcgaatctggaacgtttcgacggcgtaaaatacggctatcgtacagcagagtacacagaccttcacaacatgtataagaagacacgttccgaaggcttcggcgcagaagtaaagagacgtatcatgttaggctcctttaccctgtcatccggttactatgatgcatactatgtaaaagcacttaaggtaaaagccctgatcaaacaggcatatgataaagcatttgcaaaatacgatatcatcctcggcccagttgctccgacaacggcactgaccatgggtgaatccttatctgatccgatcaagatgtatctgggcgatgtatacaccgttccggttaaccttgcaggacttccgggtatttcccttccatgcgggtacgacaaagacggcatgccgatcggtgtccagatggtaggagatgcatttaacgagaaagcaatcattcaggcggcatatgcatttgagcagacaagagagtacaagcagcctgccgctgtagcagaaaggggtctgtaagatgagtaaagtatacgaaaccgtgatcggtctggaggttcatgtagagcttgcgacaaagacgaagatattctgcggctgcagtaccgcatttggtggtgcaccgaatacacatacatgtccggtctgtaccggtatgccgggttcccttccggtactgaataaaggggtagtagaaaaagcagttgctgtcggtcttgcaaccaactgtacgatcacacagaactgtaaatttgaccgtaagaattatttctatccggataacccacagaactatcagatctctcagctgtactacccaatctgcagaaatggaaaggtagagatcgaagtggagggcaagaagaaattcgtaaggatccatgagatccatatggaagaggatgcaggtaaactgctacatgatccatatacagacagttcactggtcgatttcaaccgttccggtgtacctctgatcgagatcgtatctgagccggatatgcgttctgcggaagaagtaattgcttatcttgagaaattacgtctgatcatccagtatctcggagcatcagactgtaagttaaatgaaggttcgatgcgtgccgatgtcaacctgtctgttcgtgaagtcggagcagaagaattcggaacaagaacagagacaaagaacctgaactcattcaaggctatcgcccatgcgatcgagaatgagagagaacgtcagatcgatctgatcgaagcaggcgaaaaggttgtacaggagaccagaagatgggatgataccaaggaatattcatatccgatgcgttccaaagaggatgcacaggattatcgttatttccctgatcctgaccttgtaccggtacagatcagtgacgagtggatggaggagatccgaagccgtcagccggaattccgggatgagaagaagatccggtataaagaagagtatgatatcccagactatgatatagatatcattacaaatacaaagaagatggcagaccttttcgaggagacgatcgctctcggagcaaatccgaagaaggtatccaactggctgatgggagagaccatgcgtctgatgaaagaacattccatcgatgcagatgagttgtcatttagcgcagagcaccttgcaaagctgatacagatggtagatgcgaaagccatcaacagcaatgtcgcaaaggaagtatttgagaagatatttacagatgatattgaaccggaaagctatgtaaaagaacatggactcgccaccgtaaatgatgaaggtgcactccgcaaggtcgtagaagaagttattgccaataatccaaaagcaatcgaagacttccgtggcggaaaagaaaaagcacttggcgcattggttggacagaccatgaaagcaatgaagggcaaggcagatccggcatccgtaaaccagatgctccgtgaactgttaaaataatcgataccaatagaaaaaaatgaagagaaagcaggtggcatatccacctggtgaccacctctcatggtgggatggagattgatatggaagaaaccagacatgtgagaaagagagacatttacaaacgtattatcacattttcggaaggcgtgcttctgttagctgcggaagtactgctgtttgcgagaatgtggtataccgaatatgcagataatactcaggctatccagattccgttctggaacaaaggtaactgggcggtaatcggtatgtatgcgattatcatttatctgtttacgaagctgtatggtggttataaagtaggcttcctccgggtgatggatgttctcttttcacagatattatcattggtctgtgcaaatatcgtaggttatgtcgagctgtgtatcattgcccgtaattatctgccggcactgaacatgatcgagcttacattcttagagatcatagttatatttatatgggtatttgtctgtaggatgatgtaccgtaagttttatcctccaagacatttactgcttgtctacggatataagacaccgaccgaattcattgataagatcaatgccagaaaagacaaatacatcattgctgaccgtattcatgtcagtgaaggtgagaaagcattaaaagaaaaaatcttacagtacgatggtattatcctttgtgagacaaaggcatatatcagaaacgaattggtaaaatactgcttcgagcattcgatccgttcgtatgtggtaccgaagttatcggatatcattatcttaggagcagaaccgatccatttgtttgatacaccgttattattatccagaaaccagggactgacaggagaagatatgatcttcaagcgtctgatggatatcatcgtatccctgatcatgatcattatcttttcaccgtttatgatcctgatcgcacttgcgatcaagctctatgacagaggccctgtattctataaacaggatcgtctgaccttaaatggcagggtattcaagatcatgaaattcagaagtatgcggatggactccgaggaacatggcgcacagcttgcaagaaagcatgatgacagaatcacaccggttggccgtgtgatccgtgccacacacttagacgagctgccacagctctttaatatcttaaagggcgatatgtcagtcgtaggccctagaccggagcgtccggagatcgcagcacagtatagggagactttcccggaattcgactatcgtctgaagatgaaggccggacttaccggatatgcacaggtttacggtaaatataacaccacaccgagagataaggtgaagcttgacctgacatattatgagcagtattccttatggctggatctgaagctgatcctgctgaccttcaagatcttattccagaaggagaatacagagggaattgatgcaaatcagacgacagcgatccgcgaagacaagacaaagaaaacaggcatcaagcatccgcatgatgaagccgaggatgccttctatagtgtagaggaaaagaaataaatgaaaccagaagtatccgtgatcattccggcatataattgcagcagaacaattaaacaggcaatcgattccgcactttgtcaggatgtgatatcagagatcatcgtgatcaacgactgttcaccggaggatctgacggagtgtctggcagaatataaaagcaatccacaggtcagactatataagaatgaaaccaatcttggcgtagcagcaacgagaaataaaggtgtgcagcttgcagagggcgaatatgtagcattcttagattccgatgatatctggcggtcgggaaagctctcaaagcagcttgctgttatgaagaagaccggagtggtattatcctcaactgccagagaactgatggaagaggacggaacccataccggacggatcttaccggtaccggagaacatcacttacaagatgctactgtatgggaatgtgatcaactgctcatccgtagtgatgaagcgtgaggtggcagcagagttcccgatgggggatgatgatgctcacgaggattatatctgctggctgcagatccttaagaaatacggggaggcagcaggcatcaatgaaccgttattgctttaccggatggtgaagaacagtaaatcaggttccaaattacattctgcaaagatgacgtatcaggtataccggaagatgggatttggaacagtgaagtcacttggatattttgcaggatatgcgatacatggagtaaagaaatattttctttaaataaaaagaaacggagcagggagatggcagaggaaatcaagagaggtccgggaagaccgaccgataaacggaaagacacaattttaagacttaggatcgacacagatacacatgaactgctttcaagatatgcaaagcagaagggcgtatccatgtcggaaatcgtcagagaggcagtctatggtattgtaaaacaggcgaacatagaagaataagactgtcagacaggagaacgttgaccatggaaacaaataaggaaggggatgtgacactatctgtcgtcatgcccgcttataatgaaggagcacatataacagataatctgcttgaaaccagcagagtactgtccggtttcgtcaaacgatatgagatcatagcagttgacgacggaagtgcagataacaccgcagagtgcatccgccgggcagaaatgcaggatactcatatcagaggaatctcatatcagccaaatggtggaaaaggacatgccatccggacagggatcgcagcagcagagggacgatacatcgcatttttggattccgatctggaactgccaccgatcctgctgaaacgattcttaaaggatatgaaggagcaggatgccgatatcgtgatcggttccaagctgcatccggagtcgaagctccattatccgatgctgcgtaagatcatgagctatggatattatctgatgttaaagatgatgttccatctgaacacccacgatacacagaccggtatcaagctattcaaaaaagaagtgatcaaaccgatcgtcagccggatgcaggcagaaggatatgcatttgatattgagatccttgccatggcagcaaaggatggcagaaagatctgcgaagctccgattgaactgaactacagccgggatgacagcaagggtggaagaaggattggattaagggatgtattcaaagtgtttggtgagacggttgcggtgaagaagcgagttaaaaattatagatagtgtgaaatgagggaaaattatatgacatatgaaaacgctttagaagtgctgaaaaagtacgggcaggagcatgtgcttgcctattatgatgaattaaacgatgaagagaagcagagcctgctttcccagattgaagagattgacttctctatatttgatgtattaaaagagaaagaatcagacggtaaggaaggaatgatcacaccaacagaggttttgacacttgatacgatcaaggactatgaatttgcctataaggtgcttggtgaaacggcaatccagaagggtcagcttgcccttgtaatgcttgccggagggcagggaaccagacttggatttgatggaccgaagggtacatataatgtaggattgacgagagatctctatatattcgaatgtcaggtgaaaacgatcctgactgttgtgaggacacttggacgatggatccatctctatatcatgaccagtgataagaactacgaagcaacgacatccttctttgcagaacataagaattttggatataaggaggagtatctgcatttcttcaaacaggagcttgtaccatccgttgattttaatggaaagatattgatggaagcaccatcaaagatctgcctgtcaccaaatggaaatggtggctggttctcatccatgaaacgggcaggactggtagaacagcttgataaagagggcattcggtatatcaatgtatttgccgtggacaatgtgttacagaagattgcagatccggtattccttggttcgatgatgatggaagattaccagtcggcggcaaaagtcgtaaagaaagcagatccatatgaacgggtaggcgtgctgtgtaagaaagacaataagccttacatagtagaatattatgaattgtcagatgagatgcggtataagaaaacggttatgggcgagtatgcttataattatggggtgatcttaaattatattttcccggttgatcaattgaaggtgctcttaaacgagaatatgccgcttcatgctgcgaagaaagttattccatatatgaatgagaaaaaagagttggtaaagcctgcggagccgaatggttataagtttgaaactcttgcacttgatatgcttcagtttatgaatgactgcttaccatttgaagttatcagagagtatgaatttgcaccgatcaagaatgcagagggcgtggattcgccggagacagcgagagcgctgctaaagaagaatggatataagttgtagaactgcgtcgaatactttggaaaaattgcctaaaataacagtattattttcagaaatatctacattcaacttaagcttagaaaattgacttttaataagaattgaattatagttgttagtggttaagaagcgttaaggatttttaagccattaacaactatatttatatagcttgacttgataacgatacatgatgaacacatttatgagggaaatgagggaatagaatgtatagaaaagagcctcagggctggttaaagcatcttgattttacagtgctgaatctgatagcactgcatgcatcttattgtatggcgtattttatacggatgggaacagaaaatccgtatcatagtaagttatatcggacaatagccatacttctgacattatttcaattattagttaccatagtatgtcatatatataaaggcgtgctgaaacggggatatttccgtgaagctgttgcgtctgtgaagcagtctgtactggttgtacttctggcagtattcgttctgttcatgatgaagatgggcgcaacttactccagaaaagttatggctttgtttggcatgatatatctggctatgggttatgtggtcgcgcttctctggaaggaatatatacgaagacatcgcgtggcaaagaaatccattgtaattgtgacagtcaaagaatacctgaatgcgttacttgcagaaatggatacagaatactataatctgtatcgggttgcaggtgttgtattattagatgcaactgaggacgaggcagaaaactacaatacagaatatgcagatttggagcttagcatatatacatattcagacgaagttctggaacagatcatgcatggctgggtagatgaggtttatgtgaatataccatttgagaagcatattccggagaatcttctgggacagtttgcagatatgggaatcacggttcatgtgcgggtgcgtgttccggcagaactttctgattatcagtatgtattcgataaacagcttggtcatcatgtactgaccgtcagcactacatatataacaacgtatcaggcatttgtgaagcgtgcaatcgatatccttggaggaattgtgggatgtatctttacaggcatccttacgatcattcttgcaccttgtatctatattgcatcaccgggaccgatcttcttctcccagtaccgtatcggtaagaatggtaagaagttcaagatctataaattccgaagtatgtatatggatgcggaagcacgaaaagccgaactgatggagcagaatcaggtcaaggatggtatgatgttcaagatggaatatgatccgcgaatcatcggctgcaagaagctgccggatggtacgatcaagaagggcatcggaaaccggatccgtgactggtcactcgatgaattcccgcagttcttcaatgtgttaaagggtgatatgagtctgatcggaacccgaccgccaacagaggatgaatgggagaaatattctgcccatcatagaggacgtatggcgatcaaaccgggtattacaggtctctggcaggtcagcggaagaagtaatatcacggatttcgatgaggttgttagattagatcgtaagtatatcgatgaatggagcttggtaaacgatattaagatactgttcaagacagtgggtgttgtgttgaagggtgaagggtcgatgtgatcctgattggatataatatggaagataaatacatatgtggagaataagaacagatgaagatagcgatgttcggacaaaaaagaattccatcaagagaaggtggggttgagatagttgtagaagaacttagcactcgtatggctatggcagggcatgatgtgacttgctataacagacgtggacatcatgtgagtggttctgagtatgatacaaaagagaaaaaagaatataagaaggttagaatcaaatctgttcctactatagagaagaaaggacttgcggcagtatcgtcgtcattctttgctgcgctttgcagtgcgtttggaggatataacgtcgtacatatacatgcagaaggtccggcggctttttgttttataccaaagatatttagaaaaaaagttattgttacagttcatggattagactggcagagagagaagtggaaggcaggatttggctccaaatatattcattttggagaaaaaatggcagttaaacatgcagatgaaataattgtgctcagccgtgaagtccaaaagtattttaaagatacatatggaagaaagacaagatatatacccaatggtgttaccagaccagataagatagaagctgatctaatagagaaaaagtttggtttgaaaaaagattcttatatattgtatctgggcaggattgttccggaaaagggtgagcattatctgatagaggcatttaagaatatagacacagacaagaggcttgtgatagccggtggatcttctgatacagatgaatatatggacaagttaaaacagctggctggacaggatgatagaattgtatttaccggatttgttcagggacagctattacaggaattgtatagtaatgcctatgtatatgtacttccaagtgatcttgagggtatgccgcttagtctgttagaagcaatgagttatggtaactgttgtcttacttcggatataaaggaatgtacagaagttgttggaaataaagcggttgcatttaaaaaatcagatgtgaaagacttgcaggataaattacagaaattatgtgatgatagtaagttggttgacaattataaggatcaggcagccgattatatatgtaagaagtatgattggaatgagatagtagataaaacattgcagctatatagaaggtaataattatgcgtatattgatgattaataatctcctctaaccgaacacaggtagcgagatgtacatagtgaaaatgccggaaaaatagcgtatttacggcactttttgagagatgggtggaactgcaagagcagttttaatctcactacctaggttcagcaacagcagatgattttatcataaggactttcagtatcactacctgcgtttgtatggagcactctggtttatgaacaatacattggaagtgctgcatctgaacagaggtagtgaaatagaacatgttacgttaaaaagattctgtcgtagatgaataacgctttggctgtagtgtcggttgactgaactattaattacagattgagtgagaataaaaaatgatgaattatatttatacattaataccaatagctttgctgatatttgccgcagtacaaggtagcaaatggaattttaatgcggcaacatacatggataagaagtatacgaatgcggttaaaggcatgatgtgtgttgtcattatgtatgttcatatatcgaatgattatactaacacggtacagaacattatcggtagttttgcgtatgttggtgtttttacattttttgcgatttcagcttttggatgtaggactagcgtagaaagaagtcaaagctatttaaatcaattctggaaaaaaagaattttggcgctgtttgtgcctgcaatattgatcaatataatttcattcggttttaaagtgatgaccttaaatgtatatgaggttcgaggactctatgcgtttaatcaatacatttatgcgattattgttgcttatttggtgttttggataatctggaaaacaaaagttataccagtggatataaaagattggctagtggggctgatttgtttactgtttagtttagtaacatatttgacgccgataaagattttcttcatttggccgacagaaagtatagggtttatttttggtttaattctctatcataaaaaggagataataacaagtgaattaaaacaaagtcatacaaggaaaataattatattattcctattatcagctttgctaggaactctatatatgaaatataagcatgtttttttccttggaggatggttgctgagagtagttttggctgtggtattattgctactgttttcagcatgcacaatgaacatttcttttgaaggaagactggttcaattattaggaaatatttcatatgagttttatttagggcatttggttgttatttcgatagttagtagactgtttccgaaaatgagttcaggcgtttttattgtaactgtatttgttgcaacattgattttagcgattgtggttaaaataatgtcggataaaataatgagtcctttgttaagaactcgaaaaacaactggtagagcgtaaaaaagaaaaagctatcagtaagacttggtaagtgaggagaaaacttgtggctacaaaagcggatagatatgagggaatagatggattgaaggcgtatgccgtcattggcattgcactgatgcacgtccttgcaaatggagaatataggatgggaggatttgtgtttgaacggttgataccgtctttcacaaacctcgttttcctttttatgatagtcagtggttttggaatgtgctgcggctactaccagaaattcaaggatcagaaaatcagtgtagtggatttttacaaaaaacggtacaacaagatctggccatatttcgcattgctctgtgtgcttgatttcgtaatgtcgcctagtaagagtgcgctgtatgaggtttttgctaacctgacactatgccagggacttctgccgaatatgaacatatcggttattggtgtgagctggacgttggcagtgatttttgtgttttatctgctgttcccctttttctgctttctgctggaaagcaagaaacgtgtatggttggcatttatctgcgctgtaatctacaatttcgtatgcggtacatatttctttgatgaaagccacattgcagatagagtggcagtgaattttagtgcgaggacaaacattctgtattgtgcaatatattttatcgcaggcggtctgattttcctctatcggaaggaactggccgagttcgcatcgaagcacaaggttatcgctggagcgattttgttgattgccgcagttgcttattttgcattaggcggcaatacgctcacgatgctgttcttctgtgtggcagcactggtatatgccctcggttgtacaacggggggggtactggtcaatccagttgccaagttcctcggcggtatcagcttcgagatttacttgtgccacatggtaatttatcgtgtgcttgagaagttacacttagttcatccatttggaaatgttctgctggcatatatcttcacagcggttgcagtcatttgcggttcggttgtgttctcggtatgtgccaagtggttcttaaataaaatcgaaacattcttaaaagagagagttaggagagttaatcatgtctgaagaaaagaagttaaatggtacggtcatcgttacttatcgctgcaacgctcgttgctccatgtgcaaccgttataaagcaccttccaagccggaagaggagatcagcatcgaaaccatcaagaaactgccgaagatgtacttcaccaacatcaccggcggcgagccgttcatccgtaccgacctgaaggatatcgtgcgtgaattgtacaagaagtctgaccgtatcgttatttccacgaacggcttcttcaccgatcgtatcgttgacctgtgcaaggagttcccgcagatcggtattcgtatttctatcgagggtctggagcagaccaacaacgagattcgcggcctgcagaacggttatcagcgtggttatggcacgctgaagaagctgcgtgaaatgggcatgaaggatgtcggcttcggtatgaccgttcaggacaagaatgctcctgacttggttccgctgtacaagatctccgacgagatgggcatggagttcgcaacggcatctctgcataacagcttctacttcgttgaggctaagaacatcatccacgaccgcccgatggttgcaaagaactttgagaatctggtcaacgagctgctccgtagcaacagcccgaagaaatggttccgtgcctactttaaccacggcctgatcaactacatttatggtcagaagcgtctgctgccttgcgacatgagctttgataccttcttcattgacccgtatggcgatgtcatgccgtgcaatggtaccaaggataaggaagtcatgggcaacctgaataatcagacctgggatgagttgtggaacagcccggaagcagagaaggttcgtgcaaaggttcgttgctgtgaccgtgagtgctggatgattggaagcgtaagtcctgctatgcacaagtacatctggaagcctgctacctgggttctggttcacaagttcaaggctctgttcaccaagcatccgtacagcatgtatgagctgaaaatctgccgcgattatcgtgatggcaaagttaccaaagaggatctggacaagtgcagcacctgcgatatgaactgtgtgattaacaatggtctgagtgaggcatccaaagagcagctgaagcataagaccggcgaggaaattgtggatgctgatatcgcacagcaattaaaaaattaatggagatgtaaggatgagtacaacattttctgtaatagtgccaatttataaagtggaaaagtatttaaataaatgcattgacagtattctaaagcaaacatttcaagactttgaactaattttggttgatgatggatcaccagataagtgtcctaaaatctgtgatgaatatgcgaaaaaagataaaagagttcgtgtgattcataaggaaaatgctggtcttgttgcggcaagaaatacaggtataaaagaagcaaagggtgattatatttgttatgttgatggagatgattggatatcagagaatcttcttcagactgtatggagcaaggcagtaagtaaatatgatgtggaaatggttgtgtatagtgcggtacgacaatttactgatacacaagaacaaattccgaagtcggttcctgaaggactgtataacaaagataaattgcgctcagatgtttacccttatatgatgtatgattcgcgcaaaccattttgtacggggcttatttttccagtagcttggaataaaatatttaaacgggattttttactcaaacactattgccaagaggaacgtattcgcatgggtgaagataacgcatttgtgtttgaatgcttatatgcagccgaaaatgtctttttctgtgacgatatattatatatttataaccaattgaatgttgaatcaatggttcatagttatgatccaaatcgatttgataataataagctgttaacagactacattgagcggcgaattggaaaacgtgatccgataattgatgagcagattaatgcttttaaagcatattggcttatcatggcagtattccatgagataaaaagcaaaagaaaaattactgttgcgagtaagcatattcgactgaaaataaaggaaacagaggtcttaaaaggaataaagtgtgatggattaccaaaatcggcaaaaatgtatttgattctgttaaacatgcatctgtatattccggcattgcttgcagcaaaacttataacagtcataaggggtaaataatggtggattcacagatattgttaagtatcattattcctgcattcaacgctgaaaactatatagagaaatgtataaatagaatagtgccacttttagattgtgatgttgaatgcattgttgtggatgatggatctacagataatacactgaaactactaagaaatatttcgaatgatatagtaaatattaatattatctcgcaaaataatacaggggtaagtggtgcacgtaataacgctttaaaaaaggcaaatggaaaatatatttgctatatagacatcgacgatgttatcgatactggaacactaaaaaaagtgattgagtatctaagaaataatttatctgaagaactagttgtttttccacattatgaaggtaatgaaagcaaaggtttcattttaaaggagcagatacttcatgaaggaaagaacacggatttgatggagttatataaagctacatttagccagaagcttaacgagccgtggaaaaaaatatttcgagcagatattttactcaacaatgacgtgaagtttcctacagatatgtatatgggtgaggacttatgtatgtttgtggattatctgcaatacattcattgtttcacatatatcaatcttccctactattattactataaaaatgatgacagcgcatctgcaatgattaagacttcattcattgaacaggaaatgaagttatatgcttgtttgggaaattttatacaaaaacagtcgctggataggattttaagtcaagaaaatgatcgtcttctattacataaaatcacacggtatataaaaggtttagtagatcataacgtttcaaaaagagatattaaatttgtaataattcaatctggagctgaagataggctaaatcaaattgaattcaataataaggcagacaagattagaaaatggcttttagttcatcgaaagtattacacactgacagttattttaaaaatattcaaaggaaagtaatgtgataacaaatgaaaagaattggaatattaacttttcatagggcaattaattatggtgcttgtcttcaagcgtatgctcttaaaaaatatataaaagatcaaggcaatgaatgtgatattatagattatcattgccctgctattgaagacttctacaatagagtatttttgtgggaagatagcttcaagactaagataaaaaaagttcttacatggtcgattcaaaaaaagagaaatataagattcaaacaatttattgaaaagaatctgttagatgcaaaatttggcgacggatataataaaaataatatcagcgagactaacgagctatacgactcttttattacaggaagtgatcaagtatggagcccattttgtacaggcggggatttgacttatttcctagactttgtgaaggattccataaaatgcaattcttatgcagcgtgtgtaggtattgcaagtgatacatttttaaagtctcaagaagttgtgagtaatttaaagcgattcaatcatatttccgttcgtgaggagattgcacaaagaaagctctcatctatattgtccgatgaaaatagggaaggtatcagtctggatctggatccaacgttactgttgagcggcgaagagtggaataaggttgcaactaatgttacagaggaacattatatttttgtttattctttgtcgatgccaaatgaagttgtagaatttgctaataaattggcaaaaagtaaacacgaaaaaataattttttgtacattagacaacttgtttgctatgaaaaacaaaaacaatacagtaaaccctagtccagaagagttcttaggctacataaaaaatgcagattatgtagttactaattcatttcatggcacggttttttctattatttttaaaaaagttttttttgtaataaaaaacgtaaacccgaatcatgataattcgagattgactaatgtgctttcattgcttgccttagaaagccaattggtagatggttttttttcgccagacaatcttgaagatatagattatttgaatgctgaacacaagttggaagctatgaagaaattgtcgaaagcttatattaacagaattatatcagagtaatatatattggaaaggtggtcacatatggtaagcttaaaaattcaaaaaaggtcagtattagttttgatcttgacgcttattctttttagtgggaatacaattattattggctatgtaacaccgcttttatatttagttgggttcttttcattcatatggggagataggaaacaaataagatctaataaatatacgagtagaattatagggatatatttggcatggcttatatttttgataattaatactgtacaatcatatgattttagcgcctccaaaagcatgattccggtatttatcattggcggagttttttgctttttttcgtggaaagaaactaccgtttatacttacatcaatatgataagatttttttgcctttttttcgctgtttcaattttggtggaggttattgcaccgaattttatattagctgtatcgaatgtcattgccccaggaagaagctctgtaatacaaaatgagatatctagaggcatctatagtggtttgacaggtgaaaaagctaaagcagcatatacgatggtaataggaatatgtgcagagttatctttttttgtttttaatgacaaaaaattgaataagagtaattacttgcttatcctgctttattttttagctactatgctaacgagtaagcgaatgttatgtgttattattttactggaaattggtgtcgcccttaagctgttcgactttaagagtaaatcggtaaagataatcttagggggagcgattgcactagttgctgtttttgtgattacaattacaattccacaaaccagtaatatcgtagaccgttttatggaggcttccgaagatacatccgcgggtgggagattgatgttttggaattactgtatagaaatgtttaaagataaacccattattggatatggaattaatacttttaataaagccttttctgataatgtaggatatgtgtatcagggctctcgctggaatatgtatgctcatagtatgtactatgaattgcttggagaaactggcattgtggggattgtgctttttggcttttttatgttttattctttagtgtattcattaagactttttaaaaattcctgcttgagcaatgtgtggaaaggtctgctatggttttcgataagcttgcaaattttgtttattgtttacgggtattctggaaatgttctctatgataaggcacagttatttacttatttgtcatcgatttcgatgcttatagcagttagctatcatgcatttaatgaaaaagaaatttcaatttagagaaacggaggtatatcataatgggtcatgcctatttagtagctgcgcatcaccaaatgcagttattacagattcttcttcatctgattgatgacgaaagaaatgagatatatctgcacgtggataaaaagtgtaaagaatttaaggaagaagaattttgtcagatagtaaaaaaagcaaaaattcattttattgaacgccggtctgttacttggggtggatattctcagattcaattagaattagatttacttaaagaagccaccaatacataccacgattattatcatttgatttcaggagtggatctcccattgaaatcacaaaatgagatttataatttttttgaaatccataaaggaatgcagtttgttagctacgattataagatggatgtagatgatgtgacaaatagaatggctcaatatcggttattccaagatctttatggaaataaaaaaaattttttgtttaagctggatgctcttttaattagagtacaaaagcttctaggtataaatagaataaagcatatttctgagccaataaaaaaaggagctaattggtttagtattactcatgagtttgccagatatgtaataagtaaagaaaaagatattcaaaaacaatacagatttacgcgctgttgtgatgaagtgtttttgcaaactttgctatataactcttcatattccttgaacatgtattttgatgaagacgcaaaaagatactacaatatgagatatgtagattttcagagaggaaatccgtatgttttcagaatagatgacaaaggacttttaaatagtagaaaagaaatttttgcaagaaagtttgattacgtggttgataaggatattatttttaacctgcgtgatcgaataacaaattgaaaaggggatatatatgaacaagaaaaaaattggcattatcacatttcattcttctcataattgtggttctatgctacaagcatatgcacttcagacagtacttgaaaaacgctatggtgctgaagttgaaattattgacttctctaataaaggatcgcggaatttatatgggttatttgattttagattaaaaagaagtgcacttaagcataatttgcttacaatcaggcattggaaactggttaatcagtatcgaagagattatattaattttaaggaaaagtatttacatacaactgagcgtcaatttagaagtcataaggagttggagtctcttgatggaaaatatgatgtaataatagctggtggagatcaggtttggaacgtattatgccctgatgcagatgatgcgtatttcttagattttattcatgacagcaaaaaagccgcatattctcctagccttgggggaaacaacttaaatgaagttgtaaaagatactcaaaagtatagaaggctattgaatgaatttgattttatttcagttcgtgaacctaatggaaaaaaatggcttgagcaactgataggaagagaagttccaattatagcggatccaacgttactgttgagtcatgaagaatggttgcagagttttagtattcctcaaatggatgaaaaatttattttcaattatgctttcttccataatcgaccagaggcaaatgctgcaattcagaagatttcagagaaaatggggatgccagtttatgtgctagatagtaaatcatgggctgcatataggttggacaagtatggtattaaaagatataaaatgactggaccaattgtattcttaactttgatggagaatgcggaatgggtcttaacacaatcatttcatggaactcttttttcggcaatgtttcataagaatttttggtcttacagggcaccatctgttaataagccgggggatgatcgggctatagcgattttaaaacagttaggactggcagacagatatcaggttatcgatgatttgcctaatcagaattttacgaaaactattgattatgcaaatacagatgctctgatttctaaattgagaagtgatgctttttcttatttagataaaattatgaatagtatatgataggtgaattgcttagatgaaatcattacagaaaaattttttatataatgttttatatcaaatattattagtgatacttccgttgattacagcaccatatatttcaagaacattaggtgcgactgcagttggcgtatactcctatacatattcagtggcatactattttttacttatcgcaatgcttggaattggaaaccatggaaatcgaagtgtagctgcggtaagagatgatagagaaaaattgaataagacgtttagtagcatttattctttgcaggtcataacattttcaatcgcaatattggcatatgcaatttatcttgttctgtttgttaaagataatagattgattgttcttctgcagttaatttatgttacatcaggactgtttgatattggatggctatttttcggacttgaacaatttaaactgacagttgctagaaatacgctaatcaagatttcaacggttgttttaatgtttgtttttgttcataagcctagtgacttatggaaatatacattaataatgtccgctggaacattattcagtcaagcatatctgtggctatatgttaagaaatatgtttcgtttgaaaaatgcagtgttaaagaaatcacttctaatattaagccagtgttaattttatttataccggttctagcatatagtatctataaggttatggataaaattatgcttgggaatatgtcaagttacgatcaagtgggcttttataataacgcagaaaaaattataaatattccaatgggaataattacagcattaggcacggttatgttaccgaggatgtctaatattgttgcaaatggagataagaaaagggtagatgactacatcagaatatccgctaaactcgtaacactattatcttcggcaattgcttttggattgatgggagttagcagcgtattggcacctgtgttttttggtgatgaatttatagcttgtggggaaataattagattattatctgttacagtgttttttattgcctgggcaaatgtaatacggacacagtatttaatcccaaacaaaagagatagtatttatttgacttcgacaatggtaggggcaattttgaatctcattataaattggatgttaatccctaaatatcaggcaaatggggcagcatttggcactattgttgctgaattttctgtaatgctagttcaaatggttgcggttaaaaatgaacttccaatgcgcaagtatattatgtcgtactctcctatactaattattggattaattatggcagtattagtggataggattgggattaaacttggcgtaagtgtctcaactctagcgattcaaattcttgctggaggattctttttttgcatagcgacaattgcttatttgcgaattagtaacgatgaaatgtggagactgggagttgattcgattaaaaaaagaaaaaaaagtagttgaaaataattgtgtggttggcggaattgcggtagagaataattgtaatatatgtcattctaaattgaattgaattttataaagttgaacattattgaaatctgcatatgttttgtgcattgctagtaaagggggatatcatgaaaacgaatgttgagctaataagtacaagggtttatgccggacgattaaaagatagggaaaacctaaatgatagttcttctggtggtgcgtttaccgcactttctgatttctttttgaaaaatggcaatgctgtggttgcggctatctataactatgagaaccacacgacagaattccagatgattctagataaagatcagcgtgaaagagcaaaagggtcgaaatatatgcagagtaaaccaggcgtcattttccgggaagcctatcgctggttgatggaaaattcggggaagaaaatgctctttgtcggcatgggctgtcaatcagatggctttcggaaattcaacgaaataaaagaaatccgagacagagtgtatatagtagacattatttgtcatggctctccaagcccgaagttgtggagagaatatgctgaatccgttcagaagaaagatggaaagataacattccgcacattcaaagataaacgcaatggctggaaatctccaatagcttatgtgaaggtcaatggggagaaaaagtcaatcaaggattatgttaaagtgttttataaccggtgtgcgtcgcggccctcttgctatgaatgcccttatgcgactacagaaagaaaaacagatatgactataggcgacttctggcatatcgaggagcccattccggatttctatgattcttatggtaattcgttattcttgattcatacgaaccgaggagaagaactatttgaaaagattcaaagtgagttggattatagatcaagtaatacaacacaatgttggcaggcaaatcttgaagctccgccccaaaagtctgaagaaagagaagagttctggaatgaatataagaagaaaggaattgatttcgtgatgaagaaatatgggtcagttccaatgaaaacaagaattaagaataaactcctcaaaataatggggggtacacagaaggtagtatctgttatgctaattactccgaaaggagggcggtataatgaactggaagcagcctaaagtatatgcagtaaaacataaggatgaagcgacaagagcagcctccagatctggtggtatttttacagctctttcggatcaggttttatccaacggtggtgtggtctatgggtgtgttttgacggatgaatttgatgccgtacatattcgcactgataatgaggaagatcgtaatcgaatgcgaggctcaaaatatatccagagtaaactaggtgatacatttaaaagtgtcaaaacagatctcgatgctaagaaaagtgtacttttttctggaacttcctgtcaggtagcaggattgaaaaaatacattggaaaagagtatgataacttattctgcgtggatattgtctgtcacggagtaccaagcaaaaaaatatgggaggcatatctgcgttggcaagagcagaaaatgcactctgaagttgcaagtgtggacttccgaaataagaaagactttggatggcatgatcatgtagaaacgcttttttttgaaaatggaaagactacgagtagtcaggtattcaaggaacttttctatgggcataccgtgctgcggccgagttgctatgaatgtccctataagtctgtaatacatccaggagatattacaattgcagattactgggggatcgagaaagccgcaccagagtttgatgataacaagggcgtttcattggtgctagtaaataatgaggctggagaaaaaatctttgaaaaagtaaaaaagagactgatttggaagcagacaaagctagaggacagtatgcagccgcctcttaaagctccatttccaaaaccagataatagagagcagttctggagtgactttaaaaataaatcgtttgagtatgttgccaagaaatacggtggcatcggactaaaaaatgatgctaagttgcttttgagcaagattaagagaaaaatcaaaaagttggtggtaaaagatggaaagagagattccaatattatataaaagaaaagaagaatgttgtggatgtacggcttgttatgccatctgtccgaaagaggctatttctatggtcgaggacgaagaaggctttgaatatccaaagattgatgagaataaatgtgttcattgttatcagtgtatcaaggtatgtccaatcaaagcggcaagagcacagtgaggaggaatcatgaaaacaacattacttatcatggctgctggtattggcagccgcttcggaactggaattaagcagttggagccagtggatgatgttggacatatcatcatggactactcaatccatgatgcgatttaggcaggtttcaaccatgtagtgtttatcatctgcaaggatatcgagaaactataaaaggaaagaggttatcaccatgcccagaacgaaaggcagcaaaaaacgtctcaaaatcaataccatcaacgactacgcatctcagatcgcggagaagcaggaatctatcacttccctgattgctgagatttcatccatcaccgcaaacattgacactttgaaggctgatctgaaagagaagaagactgctctgaagaaggccgaaaaagaagtggaaacgctgaaagcgaagaaggcaaaggcagatgcgaaggccgctgaggaggctaagaagaccgaggcagaggctgtgctgaagaagttgctggcaagtggcatgagcgcggatgagattctggaaaagctgaaataaacaagaaaaccaataacaaaaataaatgccgtgtggacaaactggactccagaagttcacacggtgttttttgaaggttgccgtatagtttataacgaaaataaaaaaaaaacaaaattaaaagaaatggagcgtgaaaaaaacgaatgtaaatgtcaatgaaaaagtttaccactttttcattgacatttacagtgagggatttttctagttttagaaaatacttgcgaaacaagaacatttgttctacaatatttatgggtgctatccttaggttaaggtggataaaagtctgttgtaacctgttgagatggtaggcggctggccctcttgcacaaaggagggactgttacaaatgccctccgtatgggaaaggagggtggtgcgattatgatgaaggagtacataagtttggtaggatttattcttaccatctttatagtcggaattgcagttggaaaacttgttgagaagatcgaaagatttctatgcaggaaagaagctgaagaacataataacacaaacaaaaacgaccgccattagtttttgtaggacttggcgatcgtttattggtagcaccttttataatttgatggtatcataaacagacggtgatttcaagtgttgatcgaaaaggctgatagcatgatcaaaaatgctgatagcaggtcgatgacagaaataaccgctgcattgggcgggcaaagatgatctttacaaatgattgggagagtaggatacattattatgaaagataaaagaaaaccacagataagaaaaaatgtatatttatttgaattggattctgttcgaaaaacaaatgaagagattgaggttgcacagaatgccttattagacgagattgttttaaacggaaatgtggttgttatgacatacaaccagttggttgattcgcgcggctttttcagtctgctttgtaatgagaaatatgaagagaagttgatccggttatttgaaatgggtgcggtccgtatttcccggtttggagatgttcgtaccgtttcccagtatttgttgaattcggttgatgcagataaggaatttatatattcggcaattccgattaaatacagccagaaacgtctgcttgccttgatgaaacgttgtttgacatactccgatctttcagaattgaatgaatatacaaaagacaatttggatgaccaggaaaaagataagctggaagatttatttgtggaagtaataaatggggaggaacagcctgttgattatctgtccgagaaggatcgtgattatcaattaggaaaatatcaggaaattttaaagaatctgagaggtttactgtcaacggtattgcgaatcagtatgctgcctgatatttatttggatcccagaaatgaatcggaatataaagagttgaaatttgtaaatttcatggctgctgttttagctttttatgaccttccggatgataaaatgataaatgtagatgcggaagcctttcggcgttcacttggaatattgggagaattggaagcctggaaaaataaaaataataatcgttcagtatatattcgtgaaattaaaaaagcatggcagactgtacctaaaagtagtgcagatgaactttcatatcagtatgcagaggttatagttgatctttgttataattatgcatgtgagaatagtatttgcaatatttccaagcattataatgtggatgaactttggcgggaatcaggggacaagtcaagctttcgtgtggatttctttggcagatttgcgaaaacttggaggaatggagcaggagcgaaagatcgtttcttaacggatgagacaaataagtttgagccgtttgctgacaaggatgatcaattatataagcagttagaccgtgtagtccgtcttgtagaatatatcgattattcacaggctgggcgagcagatgaaacgaatgaccaggttgtttatcgttatgaatataaggatgaggaacaacgcaggcagaataagagaaatataataggaaaaattgcacatgggtttggaatggctgcgctttgcattattgtggcatgtggcattgagctggtatttaataaattacaaagtatgatggaagggattatttcctttaatacagcactgttcagtgtgattgagacaattgtctggttgtttgtaacagagatgctttcaacgataatttctttgaaacttccaaggctcttaccattatcagatgctttggcaaagatcagagagtcagttgtagatggatggcggatctgccggcgtaaatttaccgcctattcctgttcggacaaggtgcagacggaacagacagaaccatataatatagggaaagcgattccctatatttgtccggcagaattgaagaaatatcgggcattacgcaaatcagaaccagaacctaaaaagtgttttgctgaatcttccatttatcctattgcgaatgtggaagatagtgatctgaccgcacaattgatccggcaggaagaattatttcaccggaagtatggattggtatatcagagcaaatacaatactatgatcgtagatccaattgagggtgaaaatggcatttttccatatgagcgtgtactaccaacaggtaaaaatggtgttgtgatcattgcgagatataaaggaacatttgtgttgttaaagcagtatcggcatgcgattcgacgtatgcaatatgctttcccaaggggatttgcagaggaggatgacaagactcctgctgacaatgcgattcgtgagttacaggaggaaatccatgctgtcatcacgaaatcaccggtatttcttggacggattgttgctgacagcggattgactggcggatgtgcatatgtgtacagtgtcgatatagattcattggaattggtcgaggatcatgaaggcatagtagccattgaacagctcagtgaccgtgagttgacatcctggataaatgaagggaagattgatgatggtttcacgcttggagcttatgcattgtataaatgtgaggcttcagaaacagaaaacaaacatagtcgattttaaagttttactgagaataactgaaagtcatacataaaatatatacatgatgggatagacatatgagaatcaaaacaataatagtgaccggtggagccggattcataggcagtaattttatattttacatgaagagaaaacatccggatgtggttgtgaattttgctgcggagtcacatgtggatcgttctattgagtcgccggaaacttttcttgataccaatataaaaggaacagcggttattatggatttgacaggacagggcatagatgtgtttagtgactgccaaaatatcgttgacaatagaaatggatttagtcgtaatagatatataaatcatatgatacgtggcattgatacatatgatgatatgtaaacaaatatataagtgttagacatatattgtttaaaaatagattgtaataataagatgaatttattttgtctgctttgcgtagtacattgatctctgaatctgaaaaagaaacaaaagtaaggtcagaacaagattaggaagactgactgatgatttgtaaaatctctaaataataaataacggctagaactatatgataaatgccagccggctccattttggagctgcctggcataagttagttatatgggcatgcgttataactatggtaagataatgcttttgcatgaatgctgctttatttattgagggcggaaagctttgctttcaaggctgcgatttcagcatcctttttggatagagcagcattcttctcggatatcacagagtctttttcggacagggcagcatccttctcagagagagcagctactgctttatcccgttccttctgtagttcatcaatcatatagtgaaccgtattctcatctaacattcgaagtgcttctgaaaacatggtgattacctcctccggatcatacatatattcggacatatccttgcagatagcttccatccatggatagtcagataccagtgcagcaaggtcgtcgaccgactgtgcagtcagcagagacaaccaagcgtttaactcattgatatctttagcatacttactttctttaaatacgtcaagggcgactacatagaattcttgcaaaagcttcaactcgattccggtatcaaaaacgattctgccatggtgcaggtagatatcggataatgcatcagtcagacacgcatccggacttttttcatatatcacgatcgtgtaaaccgttttcagatctttgtaggtgaaagaactgcctttcgagcttttcactcttgtatactggcggagcatgagatcggaggagtagcaggacatacgctctcccgggaaggtatatggaatcttctggatctcgacatttgcgatcgagccatcttctaactggacaaggatatccagaagcaggagtgaggtggacggcagcatgctgtcttcgtttgacaggatgcactgaaccgtcactttcgtaccgatgatactgctgatgagactggacaaccgttccggatagatatccggattgaacagcttcttgaaaaacggatcataggttaaaggcagagttttcttaccctccataaatccaagaaagcggttcttccattcctgtgtcatgttctgataagcaaagtagcttcgcggatgcttccgaagttccgtaagacattcatgttctgtgcgggaaggaaaaagctggcgcctgttttgtcgacaggaaaagcatagcagaaaaagggtgaaaaaaacctttgatgtaataaacagcatgtctgggtgtaacttttggtaatttaactccgattttatgcgataagttgacttggaatatgattaggattaatataaaatcatcgaacatgggcagatttgagaccatagataggatagataagagataaacaccatgacaattatcgtaaccggaggagccggatttattggaagcaattttatattttatatgctggacagttatccggaggatcgtatcgtatgtatggacaagcttacatatgcgggaaatttatctacactagcttcggcgatggataatccgcatttccgtttttgtaagattgatatctgcgacagagaggcagtctataggctatttgaagaagaacatccggatatggtagtgaacttcgcagccgaaagtcatgtagaccgttccatcgagaatccggagattttcttagatacgaatgtcaaaggaacggcggtgctgatggatgcctgccgtaaatatggtattgcaaggtatcaccaggtaagtacagatgaagtatatggagatcttccgttgaacagaccggatttattttttacagaggagactccgattcgtacgagttcgccgtacagcagttcaaaagcatctgctgatttgttagtgcttgcatattataggacatacggacttcctgttacgatcagccgttgttcgaataattatggaccatatcaatttccagagaagctgattccatttatgattattaatgcattatcagacaagcctttacctgtttatggggagggtgtgaatgtacgtgactggctgtatgtaaaggatcactgccgggcaattgatctgatcattcataagggtcgcgttggagaagtttataatgttggcggacataatgaaatgaagaatattgacattgtaaagcttatttgcaaggaactagacaagccggaaagtctgatcacgcatgtagcagaccgcaaaggtcatgacttgcgttatgctattgatccaacaaagatacataatgaattaggctggttgccggaaacaaagtttgaggatgggataaaggagacaatccgttggtatttagataataggaaatggtgggagatgattatttccagataagatgaataagtatttgtgcaagttgagatgagctgaagcttttgagaaaaaataactacacgaagaatagtaattgcagaaagagaggatattatgagaaaaaaagagagaagcaggattgcggtattattaggaataggggctatttgcggcatgttaggtacaacaggcaggtatgtatatgcagaaaatatgacaactgctactgcagctattgaagaaagcacaggggatattacgcctgcaacgggatatgaggtgtcggaaaatgcaggaccggaattatatacaagtgatgaggaacttgcattgcagagtacatcaaatgatacttcacaaagtggaacctgggagaatgtaacatggacgctttctggcacaacacttacgatatcaggaaaaggagatatgccggacgccagttcttctgataaggcaccatggtatactttagatgttgaaaaggttgtaataaaaagtggtattacaaaaatcggaagccagaattttgtggaaatgtatgatattacagatgtaacctatccgaatactctgaaagagattggagaggctgcattttatggatgtacgaaactgcaagaggtggttttgccatcttctgtgaagacaattcgatctggagcatattgtgactgtaaagctgttacccggattgagataccgggagtaacgaatttaggaagctatgcatttcaaaataactgtccgacaacatttacaatacctgcaggtgtaacctctatatcgccgctcgtattttttggaaatacaacgatagagagttatacggttgcagcaggtaacaaagcctatgttgcacggaatggagttgtatattccaaggatcagtccgaattagtgatgtatccgtttaatggaggaacaggctcatttacgataccttcgaatgtgaaggagatcggagattatgcattttataataatgtcagcttgaacacggtaaacttttccaatgtaacaacattaggagaaggtgcattttatatgtccggcttatccggaaccttgacactttcggataagatcagtaaagcaggtaattttgcatttcagggctgtaccaagataacaacagtaaagtttggcaaaggcatgaaagaaagcgcttattcaatgtttgaaaaatgtacagggattacttccattgattttggtggtctgacatcacttggtatgcggacatttttaggttgtaacagtctggtcgaggtgacagttccggcaacgataaaaagctgggacggatcggtatttaacagctgccagaagcttgtaacatttcgtggtatgggactggaatatgtgacatatgctgattttgcacaatgctatgcattaacagatgtatatcttccaaaagtaaaagagatatatcgtcaggcatttgcaaattgtccatccctgaaacagataacgctgcctgcatctacgcagtttgtagatgaaaatgcatttgcaaaggatgttgtgatcacctgcaacaataatcaactggtgcggtttggttacaatggattccgttatgcagaaacaattcagattaaaggaaaaagagattatacgaaggcatttgaggtattagacaaggtaaatgcagaacgtgcaaagaatggtcttgatgcattgacgatggataccggattgttagaaacggctatgattcgtgccggtgagcaggcagtattgttttcacataccaggccggatggtgcaagctgcttttcagcaaataagaatatgaatgcagaaaatgttgcaatcaatcagtcttctgcaacagcagtcatgaatgactggatgaattcatcgggacacaaggagaatattttaagtaaaaaagcaactacgataggagttggctgcttttatataaatggtatttatacctgggtacagtgctttggttcaaatacagatgctcagacggcagagaagcaggcagaccgtaccataacacagaatatcaatattccgaaaaagaaatttacagaagcaattacgacggacggtattgtttggggtgatagtgagacatattcttataaatttgttatacagatggacaaggatacttatactgcaggcaagagcgtaaatgcgaaggtcgttctggtaaatcccggttttagcatgtattgtccatttacaagcgggaatatcacatggagctcagataagaagagtgtagcaacggtagataaaaatggaaagattgcatttgtgggcggtggtaaagtaactatcacagcaaaaacaaaataccatgaaacgtcacttaccttgacggtgcagggtaagttacaggttacaaagaccacaccaacattgacactgaagaataagacagttacctatactggaaagggaaaaaagataggtgctgcaagcgtaaaaggtgcggcaggaaagattacctataaatattattcagattcgaagtgtacgaagcggttatctacatatccttccaaggttggaacctattatgtaattgcaagtgcaaaagcaacagcaaccagcaattcagcgaaatccaatgtagcgaaattaatgattaaaaagtcgaatccaatgaaggtaaaggtggcttcaaaaacctacaaagcaaaaaaatcaaccggaaagcttaacaaaaagcattcctttataatcggggtaaagaatgcaaagggtaaggtgacatattccagatcaaaggcttcaaaagcatatattactgttagcaaaaaaggaaaggtaacagtaaggaaaggaacgccaaagggaacctatacaattacggtaaaggcaaaaggaacttcaaaatatagaggaaaatcgaagaagataacgattaaggtttcctga

SEQ ID NO: 356 - DNA, 28423 bp, unidentified
  source 1..28423: mol_type = unassigned DNA
atgttcgaaatacaagcaaataaaaccatacaggaaaaattacatatactggcggatgcggcgaagtatgatgtggcatgtacatccagcggtgtggatcgaaaaggaaaggaaggaatgctcggaaatgcacgatcctgtggaatctgtcacagctttgcatcagacggacgctgtatctctctgctcaagattctgatgacgaatcattgtatttatgactgcaagtattgcgtgaaccgagtatcgaatgatgtcaagcgtgccacttttacgccggaggagatctgtgaactgacgatcgaattttataaaaggaattatatagaagggctgttcttaagctccggtgtgatccgtgatccggcatacacgatggagcagatctgtataaccttacagctccttcgtacaaaatacaggttcaacggatatattcatgtaaagacgattccgggtgcgccggatgaactgcttgcggcagccggattcctggccgaccgcatcagtgtgaatctggagctgccgactgcggagagcctgaagaagcttgctccgaataagagcttccagacgatcatgactccgatggggaaggtgcgtgatacgatcgcagagacaagaaccctgatagggaaagatgcaagaatggaacgcagtctggggaatcgttacctgccgggaagtatattcgggaaagaacagttacggctgaccggagcacagagtaatgggggcggctctctttggaagaaagctgcttcctttgctccggcaactcaggatacatggaagccacgggcatttgcaccggcaggtcagagtacacagatgatcattggggcatccgatgagagcgactatatgctggttcagacgacacagaagttataccagaactatgatctgaaacgtgtcttttattccgcatatattccggtaaatgaggattcggcacttccagcgcttgagactccggttccgcttctgagagaacaccgactgtatcaggcagactggctgctgcggttttatggatttcaggcagatgaattgttgtcggaggagcgaccgaattttaatgtccgcatggatccgaaatgcgactgggcgattcggcatctggaacagttcccgatcgaagtgcagacagcttcttatgatacgctgcttcgagtgccggggataggaccgaaatcagcaggcaggatcgtaaaggcgagacggtacggacatctggaatttgaccatctgaagaagatgggcgtggtgttgaaacgggcgcattattttattacctgtggaggacggatgatgtataagataccgatcgaagagcagtatattaccagacaactgataggcgagcatgcaaaagaaaactggcaggtagagcataaggaagaagaatataagcagttatccttttttgatgctcagggagtatttggagttccgaattgatttgtggataaatgtaaaatcctatttaagaatagacgattgtatgaagaaatattgtcaggatagattttatagatagatgaggatatagatgggagaatgtaaatatgaggatatttacctgtaaacatcaattagaagatatgatgacctgcatctatgatgcatgggtctatgcactccgggtcggacatgataaggtgcagttacggacggagccgatcgtgcaggcaactttatttgacgagtatgtccatgtggatgccgatgcagaaaagacggaaaaggttctgcgttccgttcgaaataagattgggatgcaggcatatatcgatgtgtattatgcctgtctgatggaagaagatgtactggacgatatctaccggtttttgcggatcggatttcaggcaggaccaagggtgatcgggatgcttgccgagtctccggtcagccggatgctggagattcggcgggcagttggaaatgaaattcatcattttcgggaatttgccagattcaattcgatcgataataaggtgtatgtctgtcatctggaaccgaagcatgatgtgatctatcaggtggcagagcattttgcagaccggatgccggatgaatattttatgatccttgatgataaccggaagtatgcggtgatccatccgggaaaacattactcagggcagcaggcagatagagagagagagatttcagaacagaaccaatatatgaaggaaaaggctcagaagatgtatttgcgggagttgtccgatgaggaaatgaagacgctccgacagacggaattattgaaggatgaatataccgaactctggaagaccttctttcatacgatcgggattgaacagcggaagaatccgacctgccagcggaatctgatgccgatatggaagcggaagcatgcggtagaattcatgcagtaaacaaaaaagaataaaatttactaacttttagtaaaaatttagcaaaaactattgattagtttttattctcgtgtataatgatgatagtggttatcgtaacagagaatccggtaccgataaatgttgtgataaccgaaggttaagaatttattttacaggaggattatgatatgaagattttagtaacaggtggtgctggttatattggaagtcatacctgcgttgaattattagaagcaggatatgatgtagtagttgttgacaatctgtataatgcgagtccgaaagtaattggtagaataaaagagataacaggaaaagacgtaacattttatgagaaggatatccgtgatctggatgcaatgaatgaaatctttgcaaaagaaaagccggatacagtaattcattttgcaggcttaaaggcagttggtgaatctgttcgtaagccactcgaatattatgagaataacattgcgggtacattaacactttgcaaggcaatgcgcgagaatggatgcaagaacattatcttttcatcatctgcaaccgtatatggcaatcctgcatttattccgatcacagaggaatgtccaaagggtgtctgcacaaatccttacggctggaccaagcatatgcttgagcagatcctgacagatatccacacagcagatccggaatggaatgtaatcctgcttcgttacttcaatccaatcggagcacataagagcggactaatcggagaagatccaaagggtattccaaacaacctgcttccttatgtagcacaggtagcggtaggaaagcttccttgtcttggtgtattcggtgatgactatgatacaccggacggaacaggtgtcagagattatatccatgttgtagatcttgccaagggtcatgtaaaagcgatcaataagatcaaagagaatccgggtgtaaagatttacaatctgggtacaggaaaaggatacagcgttttagatgttgttaaggcatttgagaaggcatgcggcaagaagattccttatgagatcaagcctcgtcgtgcaggtgatatcgcaacctgttattctgatgcaactcttgctaagaaagaacttggctgggaagcagaatacggaattgatgagatgtgcgcagattcatggagatggcagagcatgaatccggatggctatggtgcataatgaaaatattcagtaaataagtaacagacaggcaattgtaaacgtgccggaatacagggcatagagaagatacaattgcctgtttgtttaagatagaaaggggttagtttatatggctgaatatacagcttcaaagaccagatatacagagacagaaggaacggatttttaccgtcattgcggtaaaagtggtctgatgcttcctccaatcgcactgggactctggcataattttggtagtgtagataattatgaaaatatgaaacagatgtgttttaccgcattcgatcacggaatcacacattttgatctggcaaataattacggaccggtatatggaagtgcagaggaaaacttcggcagaatccttcgggaagaaatgagtgcttacagagacgagatggtgatcagtacaaaagcaggatatgatatgtgggaaggtccttatggcaactggggcagccgcaaatacctgatcgcgagtctggatcagagcttaaagagaatgggacttccatatgtagatatcttctatcatcatcgcatggatccgaacacaccgttagaagagacgatggaagcacttgcacagattgtaagaagtggtaaggctttatacgtaggtctgtcgaattatgacggcccgacgatggcgaaagcagagcggattctggatgaactgcattgtccgtttatcatcaatcagaattgttacagtattctggatcggacagttgagaagaacggactactgaagcagacatatgcatccggaagaggactgatctgcttttctccactggcacagggtatgttaaccgataaatatctgcagaatattccaaaggacagccgggtggcaagagacggacggttccttcatgaggatcaggtcgtatcgatgcgtccgcttctgacagagttaaatgatattgcagcaggctataatatgagcttgtcagagcttgcgattgcatggctgctgaataaaccggaggttacaaccgttttgatcggtgcatcgaagccggaacagatactcagtaatctgaaggctgctgagaagcagagaacaaccgagatggaagcagaggaactggcactgatcgaaaaggcggtcaacctttatcacgcatagatgataagtgttatttgacttcacttcaaaaaagaatataatataaaagacagttctgaaaagtattttctgacagagaatgcttttgaaagtattgacggaacagaacggatcatattgtatgttattttgaaagaggaagacggtattgcaggcacatcagacagatttctcaagtggaaatgtatatagaaatattatagaagtagctgtaccaatgattctggcacagctacttaatcttttatataacgtggttgacaggatctacatcggacggatcccggaagtcggtacaactgcactgacaggggtaggtctgtgctttccgatcatttcactgatcaccgcctttacctatctgtatggaaatggaggtgcaccgctttgttccatggaacgcggtaagggtaatgatgaagaagcagagcatctgatgggaaatgcttttactttattgatcggaacaggaattgtattgacgattatcgggctgatcttttataagccgattctttatctgtttggcgcaagtgatgatacattcccatatgcaggctcctatattcggatctatctgctgggaacggtatttgtcatggtatcggtaggaatgaatccgtttatcaacagccagggatttggaaataccggaatgatatcggttctgatcggagcagttttaaatataatactggatcctatgtttatctttgttttaaatctgggagtaagaggagcggctattgcgacgattatttcccagttttgctcggcagtatgggtacttgtattcctgaccggaaaacgggcagtgcttcatttgaaatggagctgtatgcggttgcagtggaagcgggttttgcggatcatcagtctgggagtgtccagctttatcatggcatttacaaacagtctggtacaggttgtatgtaacgcgacacttcaggtctatggcggggatatctatgtgggcgttatgaccgtgttgaattccgtgcgggatatctgtacacttccggttatgggtattacaaatggtgcatctccggtcatgagttttaattatggagaaggggcatatgagaaggtacggaaagccatccgtttcctgactatattatgcgtaacctatacttttgcggcatggggcactctcagattgttcccggagccgtttatccgtatatttaatcattcaccggaactgatcgcaaaaggggttccggcattacatatatatttcttcggattttgttttatggcattgcagtttaccggacagagtgtgttccttgcgcttggaaaggcgaaaaaggctaccttcttttctctgcttcggaaggcatttatcgtagtgccacttaccattctgcttccgaaaatcggaaatcttggagtggatggtgtattctgggcagagccaatctcgaatctgatcggcggatgtgccagcttctttacaatgtgtgccacggtgttgcctgaattaaagcatgaaaaagctcgatgaaaaatataaacgaccggataggattattaattaatttattcaatctcccgtagtgcctttctgaactggaagaagaacaggatggcggtgaaggttacggcgatcaggtctgcgatcggttctgccatgtagacagccattgtcttatctgaggtgtagatatgcggcataatgaagatcagtgggatcagcaggacaaatttacgcatgatcgcaacgatgatggatgccggagcgttaccgagggcattgaatgtcatctgacaggagatctggactccaaataagaacataaccgcgaggtagtatctaagtgcaactttagtaaactcgatcagagcagtatccggggtaaagatggatgcaaaaacctgagggaaacacataatgcaaagccataataaaacagaatatgtcaggctgaccttcagcagaagtttgaatgcatcctttactctggatgcattttttgcaccatagttataactgatgatcggctgagcaccctggccaagtccctgaagtgggagcatggcgaactgcatgacgctggtaaggatcgtcatagcaccgacggccatatctccgccatatttcagaagggaggagttgaagcacacggatatgatactttcacttccctgcatgataaagacggcagaaccgagtgccagacatggcagggtataggaggcctgcaaaccgaggtttttcacacggatgcggagagttgtccgcttgccgaagaggaagcttaagacccagatgcaggaacaaccctgagaaatgattgttgcaagggccgcgccttttacccccatatgaagcgcaaagataaagatcgggtctaagataatattcgcgatcgcaccgatcagtacggacaacataccttctttggcgaagccctgtgcagtgataaatgcattcatacccagagtgagctgtacaaagattgtgccgattgcgtatatattcatatatgaggttgcatagttaatggtattcttacttgcaccgaatgccagaagcaggtcgcgattccagatcagaagaacagcagtcagtataacggataagatgatctgcatggtaaaacagttaccgaggattttctcggcatcgtcttttttatttttgcccatatagatggtagcccgtggagcaccgccatttccgaccagagccgcgaaagcggagatgatcatgataaggggcatacagacaccgacaccggtaagtgccagtgaaccgttttgtggaatatgaccgatgtaaatacgatcaacgatgttatacagcatattgatcatctgtgcggcgactgtaggaagtgcgagctttgccagtaatttaccgatcggttcttttgccagaaattcccggttggatgagcctgtgttgtgggcaacctggttcggttgattattcttgatgtttttcgatatggattctccgccggttggtggtgaagcttttgatgtgttgtttgaagaatcggtcatgctgtaggcttgtgtttgtttcttcatgtatattcctcgttcctttgattgatattttatattgtataaaagttaattgcgatatgagcttgcctgaatatagtattgtccgaactgcccggtattcaggcagcagtgttgtgatcatattattttaaatgcgataacacattgtcatacaaacgcttgttataggatgcaaaattcttcttttcgtcatctgaaaaaccttcaaagatgcaggagatcagttcgtcctgctttttctcgattgcatgtacaacaggaattgatctatcggagagcttcagatgaatgatccgtttatcatttgtatccggatgtctggtcagatagcctttgtcggcgagagaatcaatggctgtggatacatttccacgctgtagcatacgaaactctacgatatctctggcagtatcatgtaccggattattgtgtaaaaaagtaatgatgataacttcaatctgtgaaagcttatagtctatccggatgctctcaagatatttttcctgaagcttcatcaggctttttgtcatatcaaaaatattggatggtgattgtaggatcatatatattcctcatttcttaattaagttctttttagaactattatagctttaaaataaaaagagtcaagctgtttatacaatttttatagaaagagaaaaacacagtctgggtgttatctgaaacagaaaactagagataaaaatattattgacaggaaagaaataatagatatactaaaatttatagtgttttttggagaattcagataatagaatatatgaaaaaatatgtttgaccagaggataaatatgccacagatgaacgagaaaaactggatgatcatagtagcagtagttattgtgcttataggatcactgatctacaatatcatttcagcaagaaatctgaagaaaaaaagacaacagtttgtagaaagtatccaatcttcatatacgcatatgaagagtatagaagacaccagcaaaaagatatatgagatttcaaacgagatcaatgaaatgatccgggagcagaaagacaccgaagagtacatagaaaaaaagaagaaggagattgaggagatcaggcagatgattgtgacaaatgacacaatccttgactgtgcaatctcagataagcgggatcttgcaaggaagaggcagattgcatttacttataatattccaaccgggttaccggagattcgtatggaggatgtcgataagattcgtctgtttgccaatctgttagacaatgcgatcgaagtagccgagtgtgtgccggtgcaggatgcaaatggggaaaataaaagattcatacatgtatcgatattgaatcgtgggagtaacttctttatcactgttaaaaattccaaaagaacggagattgccgttatggagaatcagttccatacaacgaagccggatgcagaaaaccacggcagaggtgttcgtattatcaggcagattgttgccaggtacgatggaacggtcgagttcacagacaagggtgatgcctttgaagtagcgatcatgttgtaaaaggcatacagaacagccatggtttgtgtgtttgtaatttacaacatagcatgttcggagatatatttgaggtagtcggctttgaatggtttggcatagcgtctgccaacaggcagtttgatgctgccggtcagctcggtttcctgtgaggataaattttttacatatccaagattgaccatgaaagaactatggcattgcgagaaataggacggcagtcgttcgcttacagcctgaagggattcgtacactttataggcttccccatcgtcagtataaataataatctcgcggctgagccgttcaatatgagtgatcgttccgcatgaaagggtgtaccgttttcggttggagataacgtccagaaagcgtgcttttcgttcaattacaagctgaatcgctttatccagtgccttaggcagatattgttgtatggaatcctttgtaacataatatatgtgacggacttcgtaagattcagatatatagtcggtatggctggtgaggaagataactgcacactgtgggcagcattgattaagctcggaagcaaaatcgataccgttgaagtcccccatttcgatatctaagattgcaatatcataattaatcgtatcggtctcaagcaatttttttaatttctctggctcgtaggagtcgattctgaaagtgaaggattcagaagcatccaaacaggaatgtgcaaaactggttgtttcttttaattgtagatctgaatcatcacatattagaagtttgagtttcatatatggtatccctcctgtaattggtaatttcaatgtagaaaacattttgcttaactggtaatattataataaaaaggttgccataaaacaagaaaaatgtcaaaatatatatacgcatattgatgacggtataaagaaagagagaagatagaaatgaacatatggacattcctgcaggtgctcggagcagccctgatcacggcattacaatttaatatttatctgggtgcttatatgggaatggatcgtggaagaagagaccggatctatctgggcttgaatattttaaatatgtttttcctccgcgttttaataaatacaagtatacagctagatgcacctgcatggcttcgtgccatcatttatatttttggatttgtgatgatgcttgtaggcgttgtattataccgtaaagagtgcatggttataaatttggtatcatttatggtgggtattatgacatttgatcttgttacggtgacgatgtcagcagtgatcgaggaactgtttggatatgcatataatgatacaccggtattatacagtgcaaaagcattgcttgtctggcttggagtagaagccttgcgtgagggcataggaacgatcattgaagtctggtttatgcggaaatatatgccatacaggaagttccggagacaatcatttgtcagaagcatggtgtggattctggctgttggaaccggatatatgatgttggttgtgtattttgtgactatggtaaaagaggttaatctgatgtcacagtttatagcactgggaatctgggcatctgcttttatagctacttatcatctgtatacgatcgtatataatagctatcaaagaaaaatgatacgttttctggaagcaaagatgaagcagcagaaagaggattatgagaagcttctggcggattacaacaggctgcgggatatcaagcatgatctgtataattatgtgcatatacttgatctggcaggagatgtccggaaggaacaggagcagatcagacagttacaggaagatctgaaaccgggaaaacagaaggagtatataaaatacacaaatctttcaatcctgaatctggtattaaataatgttacatctgcctgtgagggtgcaggtattcatccggaagttgcagcagaagaaattcagattgatacaaatgtagaactggacatgggatatctgatcgagcggatggtacataatgttattttgttgaatgaagatcagggagagaataagcaggattccgtatcagagtcattgtcccggacactccggattcagatcgcaccatcggaatcctcagatggaaatattcaggttgtgcttaagggtatcggacttcgtatgaagggcattgagatgaattcagacaacagaaaggagatacggaataataagcagatcatccagtttattatggagcggcatgagggattccagtggaataacaggaaagaatctcatctgtatctgactgcataagcagagaaccgtatccggaatttgtagaaatatgtcgattacgacggaaacattgcagattacgacaggtttattgtatctgataaatgttttgatataataacttcatagatatattgaaaaccgatatattattgagtgggaaagttcataatatatgcatttatgtcagagaggacatatatttttcagcccaatcagctctccttgctgcaagattgtggaaactcagaatgagtgcagtagattatggttgcaaaatatgaaaagcatacattggaacggatgaaggaagatctgatagttgtaccgagaaacgcaggtatcaggtcttctttttttagccttttaccatgtcttaaccataaaacgtgctacaatatatgttgttacagtttagaatatgaatatataataatgattgtcagaattggttgaaatggatacgattgttataacagattacaaaaagatacagcggagaaaatgatgaacagattcctgaattttacaaagaattttttaattacagcagcgatattggtatgtggatttttgttgtccctgtttatgcagaaggagtggggaaatcagactttgataccctctatttttctgttggatgtatttctggtatccgttatcacagatggtttcttatatggtgcggtcgcatctgtcatcagcattctggcggtaaattatgcatttacatttccgtattttaagattaattttacgatcccggaaaatatgatctctgccgttatcatgatagctattgcagttattacctgcggatttacaaataagttgaagagtcaggaacagttaaaggcagagagtgaacaggagaagatgcgggccaatctgctccgatccgtatcccatgattttcggacaccgcttacaacgatttatggtgcaagctctgcaatgttagatgataagaatgaatttacggaggagcagaaaaaaagcatgcttcgtggaatcaaacaggatgcacaatggctgtcgcgaatggttgagaatatgttatcgattaccagactggatggaaaaaatgttaagatcattaagatcccgattgcgttggatgagctgttagattctgttctggttaagttcaataaacggtatgaaggtcagaatgttgagattgacattccggatgaactgatcatgattccgatggatgcgatcttagtcgagcagttgatcctgaatctgttagaaaatgcagttcagcatgcagaggggatgaataagcttgggcttcgtgtatatacgagtgggcattttgcagtatttgagatccgggacaacggatgtggtattccggttgataaggtaaaggatatatttgcagggaaactggtttatggtgaatcaggacttgacagcagtaagaaaaatgcagggatcgggttggcggtatgtaccacgatcgtaaaagcacatggtggtgagatctctgcggagaatctgcaggatggcggtgctgttgtgcgatttacactggatatggaggaaactgagaatgattaataacagatataagatattgataattgaagacgaagaacatattaataatctgatcagtgcgctgatggaagcaaatggatatcaggctgtttccgcatattcctgtcgtgggggacagatgatgtttgcatcccatcgtcctgatcttgtcattctggatctgggattgccggatcgggatggaatgacatttttaagggaagtgcggcaatcatcatttacaccgatcatcgttttatcggcacgttctgatgagagggataaagtagaggcactcaatgagggcgcaaatgactatgtaaccaagccattcagttcaaatgaactggtagcaagagtacgttcagcactccgtatcgctacgcatcgggcagaggatggattgcggccgggtggaagattcgaggttggagagctggttatcaattatgatgcaagactggttacgatcgccggaaatgaagtgaagctgacacagacagaatataatattgtagcgttgttatccgagcatgcaggtaagatgctgacctacagttttatcatcaacgagatctggggatataatgattcgggaagccggaagaagctgcaggtaaatatggcgaatatccgaaagaagttcggtgcagttcccggtaaggagaattacataacgaatgaattaggggtcggataccggatgtgtgattcatagaaaagaattctgaaactctacagcattcggtcacggggatggcgcttgttataaataacgtgctgcgatttctgttctctggacattgccctattcgtaaatactcctgtgctaactcgcctttggctcagacaagcactcgtatttactggcaatgtgcagttcacaacgaaatctcgcaatgttattttataacaagcaccatccccgtgaccgagtgctgtagagttttttgtataattagataattgactataagagaaagattttatgttttttaatataaaatacaggaagtggtgttgacacattcttttttttgaactaaaatgtagcgtgctacacatgaaaaaagatgtatagtatgtataagatatgcaagctatataacattaaatgtaagagcattttccgggaattatacatagctgtaaataaaagaaaggaaccgtaatggaacaggaaaaggatatggatgcagatcgaaagctgccgtgtggtccggagaaggacatcggttattatattaagcggatcaatgataagctgaaggccggatttgacgcatatttatgtgacgtggatctgaccagttcacaggcaagagtgattgaatatgtgtactggaatggtggaatggtgacacagaaggagatcgaggtatttctggatgtagcgcatccgacagttgtcggcatcgtgaaccgtctggaaaagaaaggttatctgaactgtcatctggatgagaataacaaacgaaataagatggtatgcagcacctgtgaagctgaaaaactgctcaataaaatgtatgaaggcaggagagctgcggaacagagactgcttcattctttttcagagaatgaggtggcgcaggcgaaaaagctgcttgaaaaattatatgaaaatatcagataaagaaagaaggaggacgtatgatcagaaaattattaaaaagtttgcgggaatataagaagccgacactgcttacgatattctgtgcagtaattgaagtagtatttgagattttaattccactttgtatgtctgatctgttggattttggtatcgaaggtggaaagatgagtattgtcgtaaaggatggaacatggctgattgtgcttgcagccttacagcttttaacaggtgtgcttgcagcagttctcggtgcgaaagcgtcagcaggattttccgcaaatctgcgacaggatatctatgataatgtccagacattttcattttctaacatagataagttttccacttcatctatcgtaacaagactgaccacagacgtaacgaatattcagaacgcatatcagatgatcattcgtattgcagtcagaggaccgatcatgctgatcttttccgtgatcgtttcctttacgatcaatgcaaagctggcatggatattcctgatcgttattccgtttatgggattcggtctgatatttatagcaaccaaggtgcacccgatcttcgaacgggtattccacaaatatgacggtttaaataatatcgttcaggaaaatgtaaagggaatgcgggttgtcaaatcctttaattcgcaggaagccgagatcggcaaattcaaacatgcatcaggtgatatctataaggattttgtaaaggcagaaagaatcctggcatttaactctcctttgatgcagttcttcatgtatggatgtatgatcgcaatttcatggatcggtgcaaaagccattgtggcaagcggaaataatgaagcacttggacttacgaccggtaagttgactgcacttatcacatatgcgatgcagatattgatgtcacttatgatgttatcaatggtatttgtcatgatcatgatatccagatcttcaacggaacgtatcgttgaggtgcttgaggagacaactacgatacagaatccggagaacccggttcagactgttgcagatggttcgatcgtgtatgatcatgtggatttctcttacagcaaacgggcagataagaaagttattgacggagcagatcttaagatccgatccggtgagaccgttggtattatcggtggaaccggttcatcgaagtcttcctttgtccagttgatccctcgtctgtatgatgtgacaggcggaacacttatggtcggtggcgtggatgtccgcaaatatgacctgcaggtgcttcgtgatgcagttgcaatggttcttcagaagaatgaactgttttcagggacaataaaagagaacctccgctggggaaatgaacaggcgacggatgaagaagtaaaagaagcctgccgtcttgcctgcgcggatgaattcgttgaggcgatgccggatggatatgatacctacattgaacagggtggaacaaatgtctccggtggacagaagcagcgtctttgtattgcgcgggcacttcttaagaaaccgaagatattgatcctcgatgattcgaccagtgcggttgatacaaagaccgatgcgatgatccagaaagcatttgccgaatacctgccggacacgaccaagatcatcattgcgcagagaatttcctctgttcagcacgcagataagatcgtggtattggatgatggtaagatcatggatgtaggtacgcatgaagaattgatcgtaaagagtccgatctacagagaagtatatgaatcacagcagaagggaggcggtcaggatgagtaaacagaagaaacagatggacgcacccgacagagagcagggcagcagggtcaataaaaatacagccaaacggctgctgtcctatatcggagcatataagaagacgctggttgttgtatttatctgtattatcttaagtgcacttgcaagtgtagcgtcggcaatgtttatcgagatactgatcgatgattatatcaccccgatccttgcaatggatcatccggtctataccgggctgatcaaggcactttgtatggtcggcgttatttacctgatcggtgtattttctacatggttttataactacctgatggtagggatcgcacagggaactctgaaaaccatacgagatgagatgttcgagaagatgcagagcctgccaatccgttattttgatacgcatacacacggagatatcatgagctgctataccaacgatactgatacgctccgccagatgatcgcacagtccctttcacagatgatctcatcgatatgtacggttgttgcggtattctgctgtatgttatatcagagcatttatctgacactgatcgttgtcgtgatgctgttctttatcatgaagctggtgaaggtcatcggtggcaagagtggattttattttataaaacagcagcagacacttggtgcattagatggttatatcgaggaaatggtcaatggccagaaggttgttaaggtattctgccacgaagagaaagccagagaagatttccagaaaaagaatcaggaatggcagcaggcagcagccagtgcaaatggttatgcaagcggaatgatgccgatgatgaatgcatttggttatgtgcagtatgtagttgtagcggttgttggagcatggcttgcgatctccggtgcaacgaatctgacgctggtcggaacgaatacagccactcttggtatgatcgcatccttccttacgttgtcgaagaactttaccaatccgatctcacagctttcgaatcagtttaatgcgatcgtaacggcacttgcaggcgcggaacgtatctttaagctgatcgatgaagaaccggaagtggataatggttatgtaacacttgcaaatgtcaaagagaaaaatggtgagctggtggaagtgaaagaacgaaccggaatctgggcatggaagcatccacatgaggatggcagtcttacttaccagagattagagggcgatatcgttctggatcatgtggatttcagctacaatccggacaaacagatcctgcgtgatgtgacgctctatgcgaaaccgggtcagaagatcgcatttgtaggtgcgaccggagcaggaaaaacgacgatcaccaatctgatcaatcgtttctatgatatagacgatggtaagatccggtatgacggaatcaatattaataagatccgcaagaaggatctgcgggcatctctcggtattgtattacaggaggtcaatctgtttaccggaacggttatggagaacctgaaatatggaaatccaaatgccacggatgaggaatgtattgcagccgccaagcttgcgaatgcgcataatttcattatgatgctgccaaatggttatgacacggtgcttgccggagatggaagcggattgtcacagggacagcggcagttgatctcgatcgcaagagcagccgtatccaatccgccggttatgatattggatgaagcaacctcctcgatcgatacaagaacggaggcgatggttcagcagggaatggaccggctgatggaaggcagaaccgtatttgtcattgcacatcgtttgtctacagttaagaattcggatgttatcatggtactggatcatggcgcagtcattgaacgtggtacacatgaggatctgatcgcaaagaaaggaacctattaccagctttataccggagcatttgaattggagtgataaatagtaaaaactctactgttacctgtctctggtggttgctcttattataaataacgtgctgcgatttctgttcactgcatatgcctgattcgtaaatactcctgtgctaactcgcgttcggttgagcggagcacttagtgaagacgagcgttagcgtagtttgaggttagtgtagcttactctgatccggcaacaacgaaatctcgcaatattattttataataagcataatacccagccctaggaagcagtagagttttttgctatttttaggcaggcggtaaatggtggatagcgtattgattatagcatgactaggtttgctataagagaaagttataacgaattctaatatttatgtattgtattttagttggaatttgttatataattcatacattccgaataggaatagtaagataatgatgcgcagaaacaaaaattgtattaagtttgaacacttcggattaccaagacagaggcatttgagtccgccggtccttaggtggcgctgtaagcggcagcttagtaccgttgcaggacgaaacgagcggaagcgtcctctgattggtaatgccgaaagtgttcaaacatgatgatattacgttacggcattagtaaaatataagaaggaggaaatgccatgcgacaggtattatgctttggtgattcaaacacatatggttatgtgccgggaacggcggaacgctatgactgggataccagatggacgggaatcgtaggaaccggactgatggaaaagggatatattgtacaggaggaaggtctgtgtggcagaaccacagtatttgacgatccgcttcgtccgggcagacgtggcagtgaactccttccaatcatattagaaacccataagccggaggatttgatcattttaatgcttggaacaaatgactgtaagacattttatggtgcaacggcaggcagtatcggtttaggtatccgtaaacttgtgcgacagatccgggatggtgcgccatcagcgaagatccttctgatgtcaccgatcgcactgggcgagaaggtatgggatggatttgatccggaatttggaaaaaattctgtacaagtgtccaaagagctgccggagatttaccggcagatttgcggaagaagaaggactttattatctggcggcttctgattatgccgtaccatcggaacgggatcaggagcacatggatgaagaaggacacaaggcgctggcagaagcggtactggaaaagatttcagagatattgtaatgtgagttaggagcacagagaaaaattatggctggggagactgtagacagaaaagaagtattaaaacaggcatttgtgaaggctttgccgatcaccggaagttatctttttgtcagtatggcatatggacttacgatgcaggaagcaggactttcatggttctggtcgttgtttaccagcctgacggtatataccggcgcatttcagtttgtgctggtaacattcttaagtagcggtgcatcgatcctcacgatcgcactgactgcattgttcatgaatagcagacagttcttttacggactgacatttgttgaagattttaagaaaatgggtaagcgttatccatatatggttcacacaatgacggatgagacatatgccgtgaattgttccatgctgtcttctgaggtgataagagatcgtaacgcagagaaggaaaatgaccggaagcgcagatttgatattatgttttatgtggcattattcagtcgtatatcctggatggtgggcgctgtgcttggcggcatactcggtcagatccttccggtgaaattagaggggatcgatttttgtatgacagcgttatttattacgatcgcgatcgatcaatggagaagtgtgaaagtgcatttgccggcacttgctgggtttatcggaggtgtgctgttgcttctgttaataggaaaagattatttccttcttccaactttgattctggtatcaggtctgttgctgatctgtgaaagaaaggtggaagcccatgaatgatcgatatgtattgatctgtatccttgtgtctgcagcggcgactttgtttatgcgggcgctcccatttaccattcttggaaagagaaaacaaatccccgaaaaaatccggtatctcggacgaatccttccggcagccatcatggctgtgctgatcgtatactgcctgaaggaagtaccgaccgaattcttaagcggtggctataagaagttgatcgcagccgcagtttgtgtcgcccttcatgtgtggaaaaagaatacatttgtcagcatcataggcagtacgattgtgtatatgttattatgagcaatgacaccgaaaaaaagggctgtcgcaccaatcacttagtgcggcagcccttttttgtagtatccgttgtaacgaaattactttgttttatttgatcatattgttgacagcccctctattttgtgatgaggctatctattctaagaatatgtcaatgaataagcattatagccgggggattattatgtaaaaataattatgttaatgaactgcacattagtgttctaacgcagcaagttttgcctgtaatgcagcaatttcggcatctttttcggacaaagcagcgtccttttcagacaaagcagcgtccttttcagacaaagcagcgtccttttcggacaaagcagcgtccttttcggacaaagcagcgtccttttcagacaaagcaacatctttttcttccaacgctttcttcatctgttcgatcataaaattaacagtattttcatccatcttttttaatgcttttgaaaacatactaataacctcctcagggcgatacagatattcagatatatcctggcatatagattccatccatggatagttggatatcagtgtggcaaggttgtctgtagagtcagcggttagcagagacaaccatgcatttagatcgttgatatctttagcatacttgctatttttaaatacgtcaaggttaacgacatagtattcctgtaaaagactcagatttacaccagtattaaaaatggttcttccatgatgcagatagatatttgcaaaacggtctttcagacattcgtttggactcttttcatacataacaattgtataaacagttctcatatccttatatgtgaaatctttcccaaggttgctttttacgcgtgtatattggcgaagtagtagatctgcggaatagcatgacattcgctcaccgggaaatgtgtatggatttttttgtatttctacatttgcgatagaaccgtcttctaactggacgataatatccagaagtaggagagatgttgatggaagcatgctgtcttcatttgacataatatatttaacagttacatttgtgccgataatactgctgatcagtcgtgataatcgttccgggtatatatctgggttgaagatttttttgaaaaatggatcataggttagtggcagactttttttgccttccataaattccataaaacgttttttccagtcatcaggccagttcttatatgtccaataaagttttgggtattgttttaattctgcaaggcattcatcttccgttcgttgtggaaaaagctgataaatattgaatgcggaatgtttggtgcttgagttttgtgaaatggtagttttgtccttgttatacataaaaattcctcttaatttccggtacctgatttgtcgacaaaaccaccataccagaaataatggtataaaaaccgttgatgtaataacttgtatggtttgatgtaacttttggtaagtggatgcttataaagacaatctgtaaatatttttccggtaaatatttttgaaaaatttcaaaattttacttatggttttcggtaaagtgccagtagaatatatattctaaaattaatataaaagagaaaacagatctatgagaaaatccggtatctcggacgaatcctctcggcagccatcatggcagtgctgaccgtatactgcctgaaggaagtgccaaccgaatttttaagcggcggctataagaagctgatcgcagccgtagcccgcgtcgttaataaaataacaacaccccggtcgcgagggatgcgtaccagggtggtattcaaaggacatactttattataaacatttgtattttggactgtcaattcgttgctggttaagaaatatataaatttatgtgcctatgcgttggtttgtaaggtgagtatacttatacttgacacaatgcattgttattaatcatttaatattataaataatgatttttactccaattttctccctatctcactttccccatttacggaatattaaaaccaaaagattacggtatttgattcgggctttaactttggtaaaaaaaaggcggaaagatatactctccgcccatcctataataggatcaaatgaatttattaacatatttattataaaatatccagatagtaatgtcaatgaacccaatctcctgatccatttttctttaccatatcttatcttgtgaagtcagactgtcaatgcgttattattaattatttaatattatttataataattttttataattattaatgatatattatcgcttatgaatcctgcaattcaaatttttctaatgattttattttccaatagtggaatatttacataaataggtaaagaacgaggcggaaattgaggattccgccccgtttgtttgattccttgctcttttctggattcttgaccaaggatttcgtatacttgtagcatacggattagggtatctttaggataataccttaattaagaatttgtcaagttagtttttctatttcttattatctagtaaatagtttactgaatattatggtctttaagcaactgcaggtaagtatctgggagaaggatattgtctgatttactttcttctccaagataacaaaatccgtattttgataatgattgttcgcttgttatctgttttccattatatatactagcaggataagccatatttgcagaaactctcattttcttttctccatacgcattgattatatatccactcttgctcggaatcaataatccattatattctccctttgtagggttccctcgtatatttctttctttcattttttctccacaaacccgacaggtataatcctgataatattcagaccaggctttctccgttacaacagtcgtattttcatattttggttcatctgcggttggatgatggatggtataaaggaggactttggcaggttcataatttccatgattggtatttccggagtgttcatcccattcatctaatgtatcgtaatacttcccacactttttgcaaatatatttttctttctctgaccacacttcttcgtcccactctttgaccgggatctgaacttcctttgtcttggctttatgatcaatctgttctgttacagaacccgccttccataaatgaacatgattcgccggctgtttagacaaagatccgtcactcacagtttcataagccttattcttgataaacacagtgctgtttttctggatctttcccttgttatcaatcggatatttttttccggctgcagcatagatcccggatgaaaccgccatactattatccggtcttacaatctgattattcttcactttaaaattctgtctgctaccatttttatctacaaaataattgcagccacctgatttaacgattgttgaccgctgtatcttgccattttttacatagacatcatcgttccagccatcttttaatgcctttgtgccaccattttttgtgatccggaaagaagtggttccatcatcataatactttacgcatccatcattgtcgatgaaataagatccctgccaccccattgctcttgaaatgtttccgttcgtattcacgaagaaagatttttcattataggtataaacttttcccttataattttttaaatctttcttattccatctgatgtccttcccgttccagactctaaatttaccatttgatatttttacagaaacagtaccgtttttttcaacatagtaagtatataatccgttattatttaatttccagcctttgtttaggttaataagaccgttagcccctacatagaaatttttcttatgtagccgaatgatggtatttttcttgtttttgaatacttttgaagatggttttttattgttagcagtatatgtgtagtatttaccgtctttgattttggcatacaaataaccatttttcccggtgcaataggcgatttttttcgatgaatcgaaactccagccattattcaatttggagccgttttttttacagataaatcgtcctttattgtcattccaggtcagtgtataacctgattctctgccggcaagttctgcttgttttttttctgctttttctccatgtgcagcaacagagaagtgcggaagtaaaatcaagatggacatgactataagaagactccatatgtttataaattttttcatttgtttaatacccctttcttaccataagtaccacaatgctataaaaacaatatcataaaatggatgagaaaacaagaaaggcgaaataaagagaaccccatggtaatttaaaacccaatctgtaaattctcactggggtgaaacaagaaaaccagaaaagtgggggaagacataaagaaaaaatttgggccagccgtcgcagttcccgccttgtgtggggactgcgaccgaaattaattcatgcaatacgcaccgcgaataacaaaaaggcggcaaggaagaagcattggcaaatgtactggcacatgcaaattattatggcagacgaggaatccttgttgtaaaaaagggaaagaaaccggaatttgatttctcagagcgcaatgacagggtaacattaaagctcgaagttggacaagtggtatatattcctgaggctgtggacctgcagacaaacagacaatcagattcaacagaagcagatgaaatacgcaatatgaataaagggcaacgagtaatgcattatcttaaaaaccatgatagtatttcaacacaacaggcaatggaaccggcagatgattatatgaccgcagatcaggttcgtatgatcgtagaaaatgcaaaacaggaaattaaatatataaacgatatttcattggatggtggctgtgataaccttgaatttaaccggtcagatgccactaaagcagcaggacttcagacacttgcggtgatgcttggtattcccatgaatgagactctgtcaaataatgaagacggcgttgctgttgtattagaacgcatcgcttcgctcatttgacagacctcccatttgtttgcggtaggcattcggtgtcagaccgtattcttttttaaaacaatttacaaaatgactgcaggacgcaaaatacagaaatgaactgatttctgtacagctcacctggctgtttaacagcatgtagcgagccatcctgcatttttcttttatgatatattgtgagagactgcagttcatatcttttttgaacagacgggtcatatagtccgggtggagcttcactgcatcggcgacatccgatacccggatcggttctgtgatatggttgttgatgtaggagacggcctgcatgacatgataagacagtccgggactgttatgaagctcgtgcatggcaagtacaaaatccttcacaacagctccttttcgcggattcagttgttccggtgtcagacatgcgtcaatttttcggatatgcatatcacttaaagtataggcctgttccggatccaacccggcttcgatacagaaacgtgtgatcatggcagtcagaatgaccagatggtattttttgttctgcagtggggatgaagacagctttcccatgccttccatggtatctgcattcatatttagcttcagtagctccatatccccatttgcgatccgccggtaaaatgaatactctgcctccatcggcaggtgataagactgttcctcctgctgcgctaataacagtttctgtaattctttattcatggaaatactcctttcatataatatacagctataaaaatatttgcatataggcattattttatcaaatgaacggattgcccatctctaaaaaaacaatcagaacaatgaaggtcagctatgcgatataaaaatcggatatattatattccctacatatgcatttatagtatcataaattcagaaaataacaattacaaatttattatttgctaaatgaaaaggagatcatgcatatgaagacatggaaagggtatcagaagggtgttaatctgggaggctggttttcccagtgtgattattccgaggacagattcaataattttattacggaagatgattttaaagagcttacaagctggggactggatcatctcagactgccggtggattataatctggtagagacagaagacggacagtataaggaagaaggttttgcacggattaaacgcgcgctggaactcggacataaatatggttttaatatgatccttgatctgcataagaccgccggttattcctttgatccgggagaaaaacagagtggattttttggaaacgaagctcttcaggaacgcttctacagattatgggaagaatttgcaaagcgctttggcggatatggagataaagttgcatttgaattattaaatgaggtagtagataaagaagatggtgccgtatgggcagagatagcaccaaagtgtgtcgaacgtatccgtgcatatgcaccgacaactgatattctgatcggtggttactggcataatagcgtgcaggcagtcagagatattccgatgccgatggatgaacatatcatatataatttccacagctatgaccctcttctttttacacatcagggcgcacagtgggtagatgatatgccggcggattatcatatggaattcaaaggcagcatggaagatttttgtgcatatgcaaaagcacacctgcctgcaaagcttgccggaacgctgtcgatccttgattataagggaaatcttgattcagcatattttgaagatctgtttgccgatgcgatcgctgttgcaaaggagcgaaacgtagcactttattgcggagaatatggcgtgatcgaaaacgcagacccggcaaacactgtattatggtataaagccatccatgaagtatttgcaaaatatggtatcggccgtgcggcatggtcatacaaggagatggacttcgaccttcgcgctgatcgtctgaaaccggtatttgctgaactcaagaaatatttttaaggctgtttatccatatacccgggtaaagcagatagagatggtggggtggttgagacatcaagtctcaaccaccccaccatctctatctgccttacccgggtatatggcattcttttaatcaagacgttaattctatttaagaaactttttccggcgcatgcttgcttattcttttcgtatggattataataacaaaagctgatttttgtagaaagaaaagaagtaggagaaaacaagatggtaaacgaagaaaaggtcagattgatgaccagacttgccatgtacgaacaatctacaggaaaagaagatctggaaaaaggcagatatttcaaatcagactatgtaaaatacaactgtctgaagactctggtgtcgacaacgatattatttgtgatcgtggtagcggcctatatttattacaatatgggtaaactgatcacggagcttgtagatatggatctgttcggtctggcatataaacttcttatagtatatgcggttgtttgcgtagtatttatggttcttgcatggtttctatactcctatagatacaccaaggcaaagcctcatatcataaagtacaatcaggatctgaagaagctgattgctttctatgagaaagaggacaaaaccaaagggaagaagaggaggaagtaa

SEQ ID NO: 357 - DNA, 16115 bp, unidentified
  source 1..16115: mol_type = unassigned DNA
  misc_difference 4992: note = a, c, g, or t
  misc_difference 4993: note = a, c, g, or t
  misc_difference 4994: note = a, c, g, or t
  misc_difference 4995: note = a, c, g, or t
  misc_difference 4996: note = a, c, g, or t
  misc_difference 4997: note = a, c, g, or t
  misc_difference 4998: note = a, c, g, or t
  misc_difference 4999: note = a, c, g, or t
  misc_difference 5000: note = a, c, g, or t
  misc_difference 5001: note = a, c, g, or t
  misc_difference 5002: note = a, c, g, or t
  misc_difference 5003: note = a, c, g, or t
  misc_difference 5004: note = a, c, g, or t
  misc_difference 5005: note = a, c, g, or t
  misc_difference 5006: note = a, c, g, or t
  misc_difference 5007: note = a, c, g, or t
  misc_difference 5008: note = a, c, g, or t
  misc_difference 5009: note = a, c, g, or t
  misc_difference 5010: note = a, c, g, or t
  misc_difference 5011: note = a, c, g, or t
  misc_difference 5012: note = a, c, g, or t
  misc_difference 5013: note = a, c, g, or t
  misc_difference 5014: note = a, c, g, or t
  misc_difference 5015: note = a, c, g, or t
  misc_difference 5016: note = a, c, g, or t
  misc_difference 5017: note = a, c, g, or t
  misc_difference 5018: note = a, c, g, or t
  misc_difference 5019: note = a, c, g, or t
  misc_difference 5020: note = a, c, g, or t
  misc_difference 5021: note = a, c, g, or t
  misc_difference 5022: note = a, c, g, or t
  misc_difference 5023: note = a, c, g, or t
  misc_difference 5024: note = a, c, g, or t
  misc_difference 5025: note = a, c, g, or t
  misc_difference 5026: note = a, c, g, or t
  misc_difference 5027: note = a, c, g, or t
  misc_difference 5028: note = a, c, g, or t
  misc_difference 5029: note = a, c, g, or t
  misc_difference 5030: note = a, c, g, or t
  misc_difference 5031: note = a, c, g, or t
  misc_difference 5032: note = a, c, g, or t
  misc_difference 5033: note = a, c, g, or t
  misc_difference 5034: note = a, c, g, or t
  misc_difference 5035: note = a, c, g, or t
  misc_difference 5036: note = a, c, g, or t
  misc_difference 5037: note = a, c, g, or t
  misc_difference 5038: note = a, c, g, or t
  misc_difference 5039: note = a, c, g, or t
  misc_difference 5040: note = a, c, g, or t
  misc_difference 5041: note = a, c, g, or t
  misc_difference 5042: note = a, c, g, or t
  misc_difference 5043: note = a, c, g, or t
  misc_difference 5044: note = a, c, g, or t
  misc_difference 5045: note = a, c, g, or t
  misc_difference 5046: note = a, c, g, or t
  misc_difference 5047: note = a, c, g, or t
  misc_difference 5048: note = a, c, g, or t
  misc_difference 5049: note = a, c, g, or t
  misc_difference 5050: note = a, c, g, or t
  misc_difference 5051: note = a, c, g, or t
  misc_difference 5052: note = a, c, g, or t
  misc_difference 5053: note = a, c, g, or t
  misc_difference 5054: note = a, c, g, or t
  misc_difference 5055: note = a, c, g, or t
  misc_difference 5056: note = a, c, g, or t
  misc_difference 5057: note = a, c, g, or t
  misc_difference 5058: note = a, c, g, or t
  misc_difference 5059: note = a, c, g, or t
  misc_difference 5060: note = a, c, g, or t
  misc_difference 5061: note = a, c, g, or t
  misc_difference 5062: note = a, c, g, or t
  misc_difference 5063: note = a, c, g, or t
  misc_difference 5064: note = a, c, g, or t
  misc_difference 5065: note = a, c, g, or t
  misc_difference 5066: note = a, c, g, or t
  misc_difference 5067: note = a, c, g, or t
  misc_difference 5068: note = a, c, g, or t
  misc_difference 5069: note = a, c, g, or t
  misc_difference 5070: note = a, c, g, or t
  misc_difference 5071: note = a, c, g, or t
  misc_difference 5072: note = a, c, g, or t
  misc_difference 5073: note = a, c, g, or t
  misc_difference 5074: note = a, c, g, or t
  misc_difference 5075: note = a, c, g, or t
  misc_difference 5076: note = a, c, g, or t
  misc_difference 5077: note = a, c, g, or t
  misc_difference 5078: note = a, c, g, or t
  misc_difference 5079: note = a, c, g, or t
  misc_difference 5080: note = a, c, g, or t
  misc_difference 5081: note = a, c, g, or t
  misc_difference 5082: note = a, c, g, or t
  misc_difference 5083: note = a, c, g, or t
  misc_difference 5084: note = a, c, g, or t
  misc_difference 5085: note = a, c, g, or t
  misc_difference 5086: note = a, c, g, or t
  misc_difference 5087: note = a, c, g, or t
  misc_difference 5088: note = a, c, g, or t
  misc_difference 5089: note = a, c, g, or t
  misc_difference 5090: note = a, c, g, or t
  misc_difference 5091: note = a, c, g, or t
atgaaactcaaacgtttggcggcacttgtgctcgcggttatgatgacattggccgcagcttccgcgacggggctttcgaagcttgcggcggaaggaacacaaaagcccgaaaagtccgttgttgatgcggcgggcgcaacatggtaccacgccgatgcaggcgaagaactgcgttttgatgacgactcaagctattgctttgaaagcgaaagctggattatgcgtcagaagagcgggaacacgattgacgaagctgttttcgacggcatcacgcccgacaatgttcagacattgaccgatgaaaacggcgagacctacaccgtttcaatgtattcccaggcaacggttgttgcagcactcaaccgcatgctcggcaaagaaacgaaaaaacccgaacgaacccttgttgaaaggtacaaaattgatgatgaaggcatgattgacgtcattatcaaactttccggcgatgccgtgctcgaaaacggcggcgcggttatcggcgaaggacttaccaaacaacagtccgccgcacgcgaaaagcttgcagcggaacacgaaatcattaaaaagcgcattgagtgcgccgcttcggcgatctcttttgaatatgatttcaccctgctctgcaacggctttgcggcaagcgtacctttcaacgaggtttcgcgcattgcggcggttgcgggcgttgaaagcgttgaatacatgcccgtgttcgaaattcccacggaaagctatgaaatcgttcgtcccggcgacacaaagatgacgattgcgaacgatgttattgaatcccgctacgcatgggatctcggcattgacggcagcggcatggttattgcaattatcgatacaggtatcgataccgataacgagtgctttgctcccgggcttgaaacagtcaaactgacgcaggaggacatcagccgcataatcgccgaaaatccggatatgaacatgcttgcgcttcgtcccggaacgactgcggaacaggtttatatcaacgataagatcccgttcgcatttgactatgcggataaggactgcgatgttaaccacggcggacaggcttccgcacacggcacgcatgttgccggcatcgcagcggggcaggcggtcgaaagcgcgggcacaagcttcgggctgacctcactcggcgttgcacccaaggcacagatcctgccgctcaaggtgttcagcaatcgcgatgcttccgcaactctcggcagcgttgcggccgcaatggaggatgcgatcgttctcggtgcggatgcgataaacctcagtctcggtgctgtcggcggtcccgtgtattacgaggactatacagaagtttttgatgcggcacttgccaacggcatcaatgttgttgcttctgcgggtaactccgcctcttccacttaccacagcctttgggaagcggatctcggccttacggacaatcccgatatcggcatggtcggcatgcccggaagcttcaattccgttttgacggttgcaagtcttaacaaccccgaatacttcgttgcgattcagactaaggatgcgctgctgttcgatgatgcatatcccgaatacggcggctcatggaaatcccgctacgacgacaaggcggattatgagtacaaagttgcaacccgcatcggcggacacagctacgagtacagcatttttcataccaccatcgacaatgcggatctttccgatgtttccggcaagcttctgtttgttgattataactccgaactgacgatcgatgaacacgcggcgtttgcacgcgaggcgggtgcggctgcactgtttatctttgactcttcaagagaaaccacctttgttgacacaacgagagaggattggacctatcccgttgcggcatacaaatacgattcgctgaccaaagctcttgaaccgtcccacccggcgacgattcatatcaacccctattgggatattgacgatcagggcggttacatgtcctcattctcaagctggggcacaaccggcggactgaccatcaagcccgagataacggccatcggcggcaatgttttctccgcatataacggcagcggcgcatacgcactttcaagcggcacgtcaatgtccgctccgatgacggcaggcagcgcactgcttgttcgtcagtatctgatgaacaatttcaatattcctgcggcggaacttccggaaattgtgaacaacctgctcatgagtgccgcaactccggtgctcaatcccgacggacttacctattccccccgttatcagggcgcgggctttgagaacatccgtgcagcaatgaccgccggtgcctatatcaccaccgaatgcggcagggcaaagcttgaactcggcgatgacccgcagaaaacaggtgtttacaacctcaatttcaccgttgtgaacatgaccgatgcggacaaaacctatactgttgatgcttccgttcagacggaaagtgcggagacgggccgaatcaatgcggacggcacccgccgttatctcatgacccagaccccgcacatgctgaattccgaaattgcgggcaacggcgcgattacggttcctgcgggcggttcaaccgaagtttccgtaacgattacgctcaccgaggaagatatcgcttatatcgaaaagtacttcccgaacggcatatatgtcgaaggtttcgtgactctcaccgcaggtgaggagaacggcgttgatctttccgctccgttccttgcattctacggcgactggcttgccctgcccgcaattgagcagagcagctactatgatttcaccgaaattgaaaccggtgaatgcgatgcaacccatgttgtcaacggcgtatacacctatgatgcaaattacgatgaatatatcggcctcggaacaagcatggcttggccgaacaacagcatttaccccacggaggaactcggcacgatgcgctatgttgcaaaccgcaacgcgatctctcccaacggggacagcatccgcgatgcgatcgatgcgatcgtaatcggattgaaccgcaatgttgagaatttttattacagcgttgcaaatgcagaaacgggcgttgaatactaccgcaaggatctcggttttgtgccgaagacgtattataatgacaatgcgggtcaggcactttacgtcggagcctatgataacgaggagtttgactgggattataccgaccttgaaggcaaccccttgcccaacaacacaaaacttactgttgcattctgtgcggaactggcttataatggcagggagcgcaccgaaaagtgggagatgccgctcacgattgacaccgaaagcccaatcaagaatgtttccatggtcagctatgaatgggaatatgaagaatggagcgatgaggaagacgactatgtcggcacgggtgaatactaccacgttcccactatcgtcattgactacagcgagaatcagtacatggactggaactgcggcagggctgcatatgtcagcggcgccagctcaagcaaagtgttccacaattccgttgaacccggtaccgtgaacggaacgacaaggctcggtctcggtccggacgatctgagcgacatcaacagtttcctcttccttgaatgcatgataagcgactatgcgggcaacggcttgtttattcgcatcgagcgcgatgatcgccccggaatctacaactccggcgagctttccgacagtgttgtaaatctccgccccggcgagacttacaccgtcagcgcacattccgatatctgggatttgttcacggatttcgactttacatggagcgttgaggatgagtccgttgcatcggttgccccgaacgagggtgatgttttctccgcaacgataaccgcaaacgaaatcggcagcaccacgctgaagcttacaaacggcttccttaaggagatgacctgcacgattaacgttgttgccgaaaactacgacatctccgcttcggcaggactcggcggaacaatatcgcccgacggaacaaccactgttgattctctcggttctgcatcgtacacgattactccgaatgagggctggcatgttgcggatatcattgttgacggcgaatcagtcggtgccgcaaatgaatacaccttcgactgcgttattgcaaaccacacgattgaagctgtgttcgcaagcgataactactttaatgtttatttcgttgactgggacggcacaacgatcaaagttcagacagtcggctacggcatggatgcggaagcacctgccgaccccgtgcgtgaaggctatgatttcatcggctggagcggaagcttcaccggaatcacggcaaacaccgtccttgttgcacaatatgaacccgcaagcggaatccttgtgggtgatgttgacggcgacggcattgtgaccgccgcagatgctctgctcgttatgcgttattgcagcgaccttgcggagctgacccccgaacagcttgaggctgccgattttaacggcaacggcgttgttgagcttatcgacgcgctgcttatcctccgcgctgttatctgatttgctgctgacggccgttatcatggtacgaacggtaacagcctttcagcaaccctgcatcgatttccgaacaaaagactgtcatcatcctttctgtcctttgcatcctgactccatttttgcaaagtcgttcggaaaatcggtgcagggcatagagcctgcattgccgcaatcgttgaccggttgcggcaatgtttttttacccctgcatcaatttaacggacgcacagccgccgcaggaaaacagtgaatcaaatttttaatataatgtgattctccctcttgaatccgtttaaaaaatgtgttaaactgatatatgtacaaaatttgaacatattcgccggtgtgatggaattggcagacgtgacggactcaaaatccgttggtagcaataccgtgtgggttcgagtcccaccaccggcaccaaacacagaggcacccgttgggtgcctctgtgtttgnnnnnnnnnnnnnnnnnnnnnnnnnnnnnnnnnnnnnnnnnnnnnnnnnnnnnnnnnnnnnnnnnnnnnnnnnnnnnnnnnnnnnnnnnnnnnnnnnnnnttttgcccggccggggagcgaaagcagtccgggcgcgcagcacggagtgcaagcaaaggatgatttgagcggagagtcccaccaccggcaccaaacacagaggcacccgttgggtgcctctgtgtttggttaagtcgaacgggactcgaagccggggaaacaaaacggtcctgtggagcgttttgcccggccggggagcgaaagcagtccgggcgcgcagcacggagtgcaagcagcggtatgcagctctttgttcaacacaccttatatgctgtatactaagacagtaaataagccgaaaactccttttttgccgttgtcggttgatcagctcatccgacaaagcccgaagtatgccatacaaatcacccccggcatttagggattccccccctgtttacctgttagactgcggaaaaggcggaaccttgcagaaaaaatgcgaaaaagaaaatatattttcgatgacgattgatttacctcctgtcgctgcccgtactgttgaacgaataagacttccccttacaacgaaagagtaacgaaagtctcacttgcaagcgaataatatataattaaaaccacataactattaatgcgcgtgtattgacttcgggcacccaaatcgtgtatagtatctacaagcagcgggaagatttatctgaatatcttgcattatgcttataacatgagctgtgtgcagactatccttattgcacgaacgcctcatgcagccgagcgaaataatatacgctctgcggccgcatatgagcctgccggtggttcttacaagaggaaagaagaagttcgttgcttgaaaacagccgattttacaaaaacaccggatttcttacatctgcggacagcgagagcttgcagcagagaagaaaatgcacaggataaagaagtgtagggtttaggtaatatctacggttcgtcagtattttttcaatgcgcagtgtctgcgggagaggagcacgctgttcttggaatcgcaccctcctccaatatccatagctctgatcccgttacgctgtccgtccctaacgtccgtttcgacaaagaactctttcgaacggtcgaagagcatatttgtcggaacgagggacggataacgctttgaaatacgcagctgcattccggtaaatgaatcctcttcttttcaaaatgcgaagaggttttggctgcaatatgtgcaatattaaggaagaacgactgccgctttcccgtcaggcgagaaacgggaaccctttgagaagaatccgttgaatcaaacgccctcgttaaattaagcggagaagtcaccgatatgtcgggactttgaagcattaggataaaaaagaataccccaggaggacgaccgatgaaaagaattatctcagtgattttggcagcgatgatgctgctcatgatcgccccaaccgccgcacacggcaaacgtgcggaaagccgtgcaccctacggatatgtggagcacgaatacgatcagctccttgcttttatggagcagaccaactcagccggcgtaaagaacggcacgcagctgagctccgcatacgatcccaacgacccggaaacatggggaggcatcttttggtacacagcaccaacgggattcatacatgccgaatacatcttcttcagcacttatgatttccccaacagaaatcttgtcggaaccttgaatctttccggcttctcaaagctgcgtgcgtttggctgcgcgggaaactccatcacagccgtcagcataagtgactgtccgctgctcgatgagttgaatgtcgcgcagaatctgctgacaaatttcagcgtaagcaactgtgcagagctgcgtcttgtctggtgtgaagaaaacatgctgccaagtgtttcaatgtctaatctcccgaaactgcgccagttccactgttatcaaaaccccattaccgaactggacgtttcaccctttgaaaatctctggtatcttttctgcggaaataccgggatatcgcagatcgatgtcagccgaaatccgcagctgcgggaacttcgctgtgaaaacacgcatctgacttcaattgacgtaagcaaatgcgagaaccttacggatctgttctgcaacaataccggcataagcgagctggatatttccaacaaccctgcattggcaaggttgttctgcaacaataccgacataagcgtattggatctttcacagaacacgaacatagacaagcttcgctgttatgatgcgaaactgacgtcgctcgaatggaagtgcattataccggggctctcccttgacataaccctcctttcagaaggcgacggctatgtgggcgtggactgggagcgtgtatatgtgagcgacaactattgggaaaacaggataaccgccgtggccacccccaacggaacgttcagaggctggtatatgggtgaatcccttgtttcttcgagtctgcggctccccctcggcgcggacatcgatatccccgctaccatgcttacggctaagtttgacggtacaactcccattccgcccacgcctacgccgccggtttctcccgaaccgcccacgcccacgccgccccctgcacaggaggacgagcctaccatatacggcttctgggtttcggagcgcataccgaacgatccggagttccatacgaactggtatacctggtcgagctttaacgccgattctccggaagaagtcactatgcactgcggtatgcccgccgaaacggggagcggatattcaagcctcgttgctgctgctgcctatcatgacgggtatatttacgggtatacggggcataataactttttcagggtgcgatttgacgatatggtcgccggggaaacaacgcagcagtactttctcgataccaatttcgcacagaacggtggattcaatgttctcgatatggaatatgactacagtcggaacaaaatgttcgccatcctgcaaaacagcagcgatgggacgcagtgcatatgcgaagtcgaccttgaaaccggcaatatgctgaatcttgagagcggaggaatcccgcttccttacatgaacaacgaggagggcatcccatacacaatgcagacacttgcaatagacctgcaaggcaacgcttactgcatggcgatgggcttctccgtatcggaactttgcagtcttgatctcgacacgggaatgtacgaaacaatcatgaccgttccggcaaagagctacgactatcagtccatgactatggatcattccaccggacatatatactgggcacagtatgcaacattttcggaaacatggaatccgtccaacctgcttttcaagattgatttgcagacgatgcaggcagaatccaagggaacgataggtcacggcagtcaatggacgggaatgttcatcccctacgacagcggtcagccccccgtaaccggcatcctcggagatgttgacggcaacggaatggtgcagattgcggatgctgtccttgccgcccgtcatgcgttgggtgtatatttgcttgaaggggaaagcctcattctcgcagacgtggacatgaacggagaaataacgatcgcagacgcagttctcataatgcgcattgcaatgggactgtatgaaccgtaaaaccccttgcctcgtaaaagctgcctttgaatcgtgaaaaacacggtgcgtttattcaaaggcggcttccgggaaaacaaaaagtgatttcgcttctcccatactcagccgggcaagggtgatcggttcttgccgaattgaccgttgcccggctgttcatataacgaaaaacaaagaaaggagaatcaagattatgacatggagcaaagatttaatcgaaaacattaccgacataggagagcttgaagcgaagctccggtttgatcgcagactgacacagcagatgcgggaactgtgtgaaaaattcccgatgtccgtcacaagatactatttgtcacttattgactggagcgacacggacgacccaatccgcagaatgagcatccccacgttccttgaaacggacatgagcggagagtttgatacgagcgatgaggagtctaacactgtgtgtcagggtgtccagcacaaatacaccgagagtgcccttatactgacaacaaatcgttgcttcatgtactgtcggcattgcttccgcaagcggcttgtagggcgttcggatgaggagatagccggaaatcttgaatccgttgtaaattatatccgcgagcacaccgagctgaccaacgttatcctcagcggcggcgatgcgtttacccttcccacatgtatcatcaagcactatcttgatgttctttcaaggatgaagcatctcgatctcatcagaatagcaacgagatcgccggcagtgtaccccatgcggatttatatggatgaagatctgcttgcctgtctgaaaaaatacagcggaaagaagcagctgtatgttgttacccaattcaatcatccgagagaaataacgccggaagccaccgctgccatacgcgcccttcttgattgcggggtcgttgtaaagaatcagacagtgcttttgaaaggcgtaaacgattctcccggcgtactgggcacgctgttgagaaaattgaccgcttgcggaacagtcccgtattacatattccagtgccgcccggtgagcggcgtcaagaacatcttccaggtgccgttttccgaaggatatgacatagttgagggagcaaaagcgatgcagagcggtcagggaaagtgcttcaagtactgcatgtcgcatccgaaaggaaagatagagattatcggaaaactgaacgatgagtcgatggtttttaagttccatcaggcgaaaaatgaccgggattgcggacgggcattcattaaaaaactctcaaaggatgctgcatggcttccggatgagttataaggggggtattcatatgtatgacaggaactccgttacaagctttcagaatgtgttcctcaatcggtcaatgaacggaatccgtatgtacgacaggtatctgattacaggtgcaaccggattcctcggcagagctgtatctcagaaactggcttcctgcagcatcccggttcgggcgttggttttatccaacgacccgtatgcggagcagcttccaaagggggttcaacgcgtcaccggagatgttctcgataaagaatcgcttgaggccttttttgacggcgcgggaatacacacctgcgtgattcattgtgccggtatcgtttccgttgcttccaatcccgatccgataatctatacggtcaatgtggaagggacaaacaacatcatttgcaagtgcagagaacacaatgtcggcagactgatttatgtcagctccgttcatgtaatgccggatattccgaaggatcatgttatcacggagggctggtgtttctcttccgatcttgttgacggggcatacgccaagagtaaagccattgccacaaacctggtttttgacgcagcacgtcacgggctgaacgcctgcgttgtattcccctccgggataatcggaccgggagatttccaaggcgggagtttcacagcaatggcgaaagcctttctcaagggaaagctgccctttgccgttcgcggcggatatgacttcgttgatgtaagagacgttgcaggcggcatccttggctgtgcaatgagcgggaagtccggagagggatatatcttgtccgggcgctatatcacgatcaaggaaatgcttgatataataggcaaagcagcggggctgcatcgccggcctctctgcttgccgctcggacttgccgaattagcagctccatattatgaaaagtggtgtattcgcaagaagaaaccgctgttctttacgccgtattcgattgccgttctcggatcaaacggatacttcagccataagaaagcatccggagtgctttcttacaaacctcgtcccatagaggaaaccctgcgggatatgaccgagtggctcaggcagcaggaagaaagctgatttcttccggaaacaagccaatctgatttttgaggagacagtctgaaaaataagatatatgtatgttgcgatgcttgtgcttgcagcctttatggcttttgcagcatacatactttagaccttcatgtcagacagcggctgttcggattcctgaaaaaatctttattatcagcgggcgatgaggcaaatataaacgaaactcaaacgagaggaggcgatatatgtgaaaaagaaaataactgcgggaatcctgttgctcctgctgctggcaggaggttgtgcacagccggcctatgccaattccgcccagcggcactggagcggcacggacgttacaggcgcggtcgtgacgggagaggattgccccatcgtggtggagagagaacttctgaccttcgatgtgcaggaattcccggagcagtattatccggatacggacagcttccttgcctacaccgggaaagtcacggcggaatacaccttccgtaatcccgccgactatacggtcacggccacgctggctttcccgttcggtaatcctccacattacggagaatacatctatgaccaagcaacgggtcggccgttcgatgtttccgatgccctgaaatacggcgtaacgctggatgggaagccgatagaggcggctgtccgacacacattgaaggcacggcacacttctttctcccttgatgaggatctgccgaagctggcagacagctatatctgcgacagttttttcgtccccgatatgccggttcgggtgcagaggtattccgtcacgggcatagatgaaaaatacggcgcggccaccgccgcatttgtcataaatgcggacagcgcaaaaacgcgggtattgtgtgagaagcaaaccggcggagcgcggctgaagaaggggagtcaagcctcctgttgggtacaaaacggcgatacgatcacggtatatatcttcggcgagctgccgaaggaggagcttatatggacactgtatgaaaacggcgcctgcgaaaaggttatcgaaggaacggtgtcgtctgagttttcggagatgacattcaaggactatgctctgcgcggctatgacgaaaactccggcattttggagtctgactggtacaatgctcaggtcgagcttctgcggctcggttccgaaatatgggggaatggtctggttcagattgaagccggggtattttcactgatgcggtggtatgagtacaccatcacgctggagccggggcagacgctgaaaaatgcggtgacagcgccgctgtatcccgccattgatgcggactatacaccgagcatctatgcgtatacctatctgctttccccggcaaaaacatggacacagttcggggaactggatatcacggtgaatacgccctattacatgacggaatgcggcattgacggctttacaaggacagacggcggatatgcgctgacactgccgggtctgccggagggcgaactgacatttacgctttcagaggcagagaggccgcagccgccgaagcggtcgatcttgcaccttgtgccgacagagcttatcattgtaccggcagcggtgcttgtcgccgtcgcagccgtgtttctgccggctcgcaggaaacgaagaacaaaaagatagagagaattggactttgaaaaaccgtatctcttcggttctgccgtcagcattgatgtcgtttttatcatattttcacctcgcagtcttattacgcgcagctattcggtgaaaatccggtgatttcaaaaaacagtgcgaaaactccactatcactttacgcacttcccgtggatgttacacactcgaacggacagttttcgtaaagagaaaagcagaccgcatctatttaaaatttcagcgggtacaagcatttttgcccgacagtgagacagtgcagacaagcgaagcatcaccgtctgtttcccaaaatcaatttttttcgattttgggaaacagaatcgcggaagcagccgaccttacagatatttaacctgtggttttattcgctgccatactgtatcggaaactctgccacaatgacagtgccgttttttgagctctcctccacgcggacggagccgccatggatgtcggcgatctcccacaccagtgagaggcccagccccgcgccgccgtattcccggctgcgagacttgtctacgcggaaaaaaggctggaagatgctttgctgatactcctctgggatgccgcagccgttgtcggagacgcggatcaggagcttttccggctcctgtgcgacggaaacccgcaccgagccgcccggtcggttgtacttgacggcgttctccgtcaggttgaagatcaggcggtagatcagcgcgtcgctgccggtcataatgccgtcgccctctgccgtcagcgtaacgccgcacttatccgagagcggtgcgagatccgtaaagatctcctcgatcattggagcaagccggatccgctcgttacgcgccacctgccgcagattactcatttccagcagggtcttggtcagccgggtaagccgctccgtctgctcccgcagaagggagagaaacttcgccgtctccggctgcatatcaggatgttccgctgaaaacagctccagctgcgcttgcagcagcgccagcggcgtgcgcagctcgtgggcggcgttgccggtgaactgccgctgggcggcaaaggcgtcgttcaaccgctcaagcatttgattgaaggactgactgagctgcttgaactccggcaaggcatcctcatcgatccgcatatccgccaaattgttcatctgcactctctccacctgagaagcaaagctgtgcaggggcttgagcgcgtgtccgctgacaaagtaggcaagaatgccgctcaataccgtaaccacagccgtgatgtaccagttggtggtgcgaaatcgtccctgcacaccatcgacaacgattgtcagttcctcgccgggttctgcgaactgcgggtcgaagctcgccgtgccttcatcagttataataacagtaccgccgccccgcagcgcgtccgcaatcctgtccatatagtacacgccggaggagcagagcatcaaattcatggcgatgcaggtcaaaccgatgagcagggcagtcatcagggtgatgcgccactgtaaggagaacttcttcatacgccgtcctcttccatcagataaccctcgccgatgcggttgcgaacggggtcataacccaatgcggcgcggagtttcttgcgcaatgcggaaatatgcacacgaatggagttgctgaaattgtccacgctgttgtcccagacatgctcaatcagttcttcctggctgacgggccgcccccgatgcaccatcagatattccagaattcccgtctcctttcgggtgagcgtcaaggctcgtccgttcacggaggcctttcgcgcacgggtatcaaaggtcaaggtaccgcaggtcaatatcacatcctgctgggtgaactgccgcagtgtcaggctgcggatgcgggcttccagctcagccaaatgaaaaggctttgcaagatagtcgttggcacctgcatccagtccctccaccttgtcctctacttcgctgcgggcggataaaatcagcacctttgtttcccggtctttctgccgcaaggtgcgcagcaccgtcattccgtccttccccggcaggttcagatccaacaatacaagatcatagcgttctatttccaacagttccagtgcttcttcgccgtcgcagcagtaatccacactgtatgcggcgcgccgcagactgcggacaatggtttcgcatagagcgcgttcatcctcgattactaaaaggtgcataaaaatctcctttatatacgtttatatgttgcgcttaacccgctgttctcattatacaggaaacggataaattttgtgtaaaaattttttcttaacaggaaccttatatcgacaatgatatgataacggcacaaaccggaaggagagctaagtatgaaatacggaataaaaactgctgcgcaggctgcactgctggcagttggaattgttatggtatgtctgggagtatgccgtaacgaggtggctacggtgctgagcaaagccatcaaattatgtctggagtgtgttggcattgggtaagaaggtttcggtaatctctcggtttctgtcccgtttccgaggctggatacaggcgggagcagctttgttgaccaacctgcacctgccgaacttcctcaagggaggactgtatcagggcgcagggaaagccgtctgcgtgcccggactcaattgctattcttgcccggcagcgtcgggagcctgtcccattggatcatttcaggcggtggttggttcgtcaaagttcagcttttcctattatatcaccggcttcctcatcctgttgggagttcttttgggacggtttatctgcggatttctgtgtcccttcgggtggtttcaggatctgctgcataaaattcccacgaagaagctctccacaaggaagctgaagcccctgacgtaccttaagtatgccattctgctggtgatggtctttctgctgccggcgttcctcgtgaacgatgtgggcatgggcgaccccttcttctgcaagtacctctgcccgcagggtgtgctggagggagccatcccgctgtcccttgccaattccggcatccgagcggcactggggagcctgtttacctggaaattcagcatcctgttggcggtgatcgtgctgagcgtggtattctatcgtcccttctgcaagtggctctgcccactgggtgcattctatgcgctgttcaaccgggtgtccctcttccaaattaaggtggataaaaacaagtgcgtctcctgtggaaaatgcgccaaagcctgcaagatggatgtggatgtgacgaaaacgcccaaccacactgagtgcatccgctgcggtatgtgcatacatgcctgtccgacgggcgcagtgtgcttccgctatggcttcggctccgataaaaaaacggaaaaaacggcggaaacatcaaaaaaagagtaa

SEQ ID NO: 358 - DNA, 15913 bp, unidentified
  source 1..15913: mol_type = unassigned DNA
  misc_difference 3432: note = a, c, g, or t
  misc_difference 3433: note = a, c, g, or t
  misc_difference 3434: note = a, c, g, or t
  misc_difference 3435: note = a, c, g, or t
  misc_difference 3436: note = a, c, g, or t
  misc_difference 3437: note = a, c, g, or t
  misc_difference 3438: note = a, c, g, or t
  misc_difference 3439: note = a, c, g, or t
  misc_difference 3440: note = a, c, g, or t
  misc_difference 3441: note = a, c, g, or t
  misc_difference 10838: note = a, c, g, or t
  misc_difference 10839: note = a, c, g, or t
  misc_difference 10840: note = a, c, g, or t
  misc_difference 10841: note = a, c, g, or t
  misc_difference 10842: note = a, c, g, or t
  misc_difference 10843: note = a, c, g, or t
  misc_difference 10844: note = a, c, g, or t
  misc_difference 10845: note = a, c, g, or t
  misc_difference 10846: note = a, c, g, or t
  misc_difference 10847: note = a, c, g, or t
  misc_difference 10848: note = a, c, g, or t
  misc_difference 10849: note = a, c, g, or t
  misc_difference 10850: note = a, c, g, or t
  misc_difference 10851: note = a, c, g, or t
  misc_difference 10852: note = a, c, g, or t
  misc_difference 10853: note = a, c, g, or t
  misc_difference 10854: note = a, c, g, or t
  misc_difference 10855: note = a, c, g, or t
  misc_difference 10856: note = a, c, g, or t
  misc_difference 10857: note = a, c, g, or t
  misc_difference 10858: note = a, c, g, or t
  misc_difference 10859: note = a, c, g, or t
  misc_difference 10860: note = a, c, g, or t
  misc_difference 10861: note = a, c, g, or t
  misc_difference 10862: note = a, c, g, or t
  misc_difference 10863: note = a, c, g, or t
  misc_difference 10864: note = a, c, g, or t
  misc_difference 10865: note = a, c, g, or t
  misc_difference 10866: note = a, c, g, or t
  misc_difference 10867: note = a, c, g, or t
  misc_difference 10868: note = a, c, g, or t
  misc_difference 10869: note = a, c, g, or t
  misc_difference 10870: note = a, c, g, or t
  misc_difference 10871: note = a, c, g, or t
  misc_difference 10872: note = a, c, g, or t
  misc_difference 10873: note = a, c, g, or t
  misc_difference 10874: note = a, c, g, or t
  misc_difference 10875: note = a, c, g, or t
  misc_difference 10876: note = a, c, g, or t
  misc_difference 10877: note = a, c, g, or t
  misc_difference 10878: note = a, c, g, or t
  misc_difference 10879: note = a, c, g, or t
  misc_difference 10880: note = a, c, g, or t
  misc_difference 10881: note = a, c, g, or t
  misc_difference 10882: note = a, c, g, or t
  misc_difference 10883: note = a, c, g, or t
  misc_difference 10884: note = a, c, g, or t
  misc_difference 10885: note = a, c, g, or t
  misc_difference 10886: note = a, c, g, or t
  misc_difference 10887: note = a, c, g, or t
  misc_difference 10888: note = a, c, g, or t
  misc_difference 10889: note = a, c, g, or t
  misc_difference 10890: note = a, c, g, or t
  misc_difference 10891: note = a, c, g, or t
  misc_difference 10892: note = a, c, g, or t
  misc_difference 10893: note = a, c, g, or t
  misc_difference 10894: note = a, c, g, or t
  misc_difference 10895: note = a, c, g, or t
  misc_difference 10896: note = a, c, g, or t
  misc_difference 10897: note = a, c, g, or t
  misc_difference 10898: note = a, c, g, or t
  misc_difference 10899: note = a, c, g, or t
  misc_difference 10900: note = a, c, g, or t
  misc_difference 10901: note = a, c, g, or t
  misc_difference 10902: note = a, c, g, or t
  misc_difference 10903: note = a, c, g, or t
  misc_difference 10904: note = a, c, g, or t
  misc_difference 10905: note = a, c, g, or t
  misc_difference 10906: note = a, c, g, or t
  misc_difference 10907: note = a, c, g, or t
  misc_difference 10908: note = a, c, g, or t
  misc_difference 10909: note = a, c, g, or t
  misc_difference 10910: note = a, c, g, or t
  misc_difference 10911: note = a, c, g, or t
  misc_difference 10912: note = a, c, g, or t
  misc_difference 10913: note = a, c, g, or t
  misc_difference 10914: note = a, c, g, or t
  misc_difference 10915: note = a, c, g, or t
  misc_difference 10916: note = a, c, g, or t
  misc_difference 10917: note = a, c, g, or t
  misc_difference 10918: note = a, c, g, or t
  misc_difference 10919: note = a, c, g, or t
  misc_difference 10920: note = a, c, g, or t
  misc_difference 10921: note = a, c, g, or t
  misc_difference 10922: note = a, c, g, or t
  misc_difference 10923: note = a, c, g, or t
  misc_difference 10924: note = a, c, g, or t
  misc_difference 10925: note = a, c, g, or t
  misc_difference 10926: note = a, c, g, or t
  misc_difference 10927: note = a, c, g, or t
  misc_difference 10928: note = a, c, g, or t
  misc_difference 10929: note = a, c, g, or t
  misc_difference 10930: note = a, c, g, or t
  misc_difference 10931: note = a, c, g, or t
  misc_difference 10932: note = a, c, g, or t
  misc_difference 10933: note = a, c, g, or t
  misc_difference 10934: note = a, c, g, or t
  misc_difference 10935: note = a, c, g, or t
  misc_difference 10936: note = a, c, g, or t
  misc_difference 10937: note = a, c, g, or t
tcagatcgccacatcctgccactgtccgccgatcagttcgcgggtggatttgaacccggcctttttcagcagttcgaatgcttccgcacgtccgtcgttcaccaggtcgggatagtggcagtctgagtttaccatcaccggaatatccagctcacgtaagcggtgcagatagtcggtatgcgggtagacctcctgtttcttcacgaggtttttcgtgttgacttcgaccatcagtcccttttcggcgatcaggtgcagacagtcgttgaatggtttttgataccagtccgcttgcaggtcgaagccttcgcatttgtgcccgttcatgtatatcttgtccatgtgcccgacaatgtcgattccgcctgcctcgatcattcgccgtgtggaactgaaatagtgggcgaccagcttgcggatatctccgtcgtagtaggcgtcgacagacttctggtactcccggaaaggaccgtcgatacacaccatattctcttccgcaagcggctgtgcgatcggaagaaagtggatggaaccgatacggtaatcgagcggcagattgcggaagtaggggatggacgcgttgtagctctcgtctaagaaatcgatttccagtcctacgtatatttccaaccggtcactgtatttctttttcagtcgttctatttctgtcagatattcgggcatatcgtctttagacatgttccagaatgtttcgaacggcagtggtgaatgggatgaaaaaccgtaggcgcggaacccgtgcgcaacagcgaatttaatgaagtcttccggcgtgctccgaccgtcacagaatgtacaatggctatggtagttactgagttgcataaatttttacttgtaaaagggcaaagataatttttttatcccgaaagacaacctgtttgataaaaaaaggcttgattgctgcctaagggttagcggcagaatcaagccttgaaaaacacgtgaataatgaaaaatcgtatgttttattttattacgttcagttcttttccaactttgataaatgcagcgattgctttatccagatgttccgtttcgtggcctgcggacaactgtacgcggatgcgggcctggcctttcggcactaccgggtagtagaagccggtaacataaatgccttcttcctgcatcttggctgcgaaatcctgggataatttagcatcatacagcataacggcgcagattgcggactgagtcggcttgatgtcgaaaccggctgctaacatcttttcacggaagtagctgacgttgttcatcagtttcgtatgcaaagcatcgctttctttcagcatcttgaacatttccaggctggcgcctacgatagcgggagcgacagagttagagaacagataaggacgggagcgctgacgcagcatgtcgatgatttctttctttccggttgtgaatccgcccatggcgccaccgaatgctttacctaacgtacctgtgaagatatcgactcttccgtatacattatattgttcagccacaccgtgtcctgtcgggcctactacaccggcagagtgggattcgtcaaccattaccaatgcgtcgtatttttctgccagttcacagattttgtccatcggggccacgtttccgtccatagagaacacaccgtctgttgcgatgatgcgatgacgttgtgcctgggcttcttgcaggcaacgttccaggtcggccatgtctgcattggcataacggtagcgttttgccttgcaaagacgtacgccgtcaataatggaggcatggtttaaagcatcggagatgatcgcatcttcttcagtgaacaacggttcgaacagaccgccgttggcatcgaaacatgcagcgtacaggatcgtatcttcggttttgaaatagtcggagatagcggcttccagttgtttgtgcagatcctgtgtcccacagatgaaacgtacggatgacatgccgtatccgtgtgtgtccatagcttctttggcagccttgatcagacgttggttgtcagacaggcccagatagttgtttgcgcagaagttcaaaacgtcgcttcctgcgtttactttgatgtcggctctttgaggagtggtgatgatacgctcgttcttatacaatccggcagctttgatgtttgccaattcctgagtaaggaaatctttcagtttaccgtacataactttgttttttgttagtatttttaattaagttgacaattatatctctattatcgcagacaagtggcaaaatattattcttgaaaccatttttttctttgtctctgatttgtctgccgatgcggcaaaggtcatattttttttgaatatataggctaaaaaatacaagaaattcataccggaatgtttttattctctatacctttgccatcgaaaaaacttaaaagaacatcaaacgcaatgaagaatgtattagtaattggttctaccggtcagattggatcagagttaaccatgaagttgagaggtatctacggtggaaacattgtagcaggttacatccccggacaggagcctaaaggcgaactgctggaatcaggaccttctgcaattgtcgacattacaaacgaacagcagattgctgagactgtgtccaaatataaggtagatacgatttataacttggctgcactgctgtcagccgttgcagaagcaaaaccgcagcttgcctggaaaatcggtatgggcggtttgtttaacgtattggaagttgcacgtgaaatgcattgtgctgtattcactccgagttcaatcggtgtgtttggcaataacacgccgaaagacaagactccgcaggatacgatccgtaacccgcgtactatgtacggtgttacgaaagtttcaggcgagttgttgagtgactactacaacatccgtttcggcgtcgacacccgttccgtacgttttccgggacttatctcctatgtgacacctccgggtggtggtacgaccgactacgcagttgatatctattattcggctgccaaaggtgagaagtttgtatgtccgatcaagcagggtacattcatggatatgatgtatatgccggacggtctgcgtgcagctattgaaattatggaagccgattcgacgaagttcgttcatcgtaattctttcaacattgcatccatgagctttgatcctgaaattatctacaacaacatcaaaaagtatgttcctgacttccagatggaatatgatgtggatccgttacgtcaggctatcgcagaatcatggcctaactctttggatgacacgtgtgcccgtgaggaatggggctggaaaccggaatatgatctggattccatgactcaggatatgttggctaaattgaaagaacgtttcaataagtaagaattaattttccgatcattagcagatcggtaggaaagagaatgagcaaacctgtagnnnnnnnnnncgaggatgaagcgaacgatatagtaggagttgttcaaagcagcctctttgtttggatcgtttttattcagtattgtaggctgtttcaatcataatgtgtctgttgcttgtgcagggaatgactaagtcaaaagtgtatgaaaaattatgttgtaaaacatgaaatggttaaatcaggttaagagaaagcttttttttgtggaaatattatgctgcataacataaactctctatatttgcactgtgtttttcatggtattagatttaaggttaacaatgaagattggctgtccgtgaggatagcctttttttatttatacccggttgatgttgtttcctccgagaagcgatcattttatccgaattgcccgttcttttggtattcttgattatatttgtatatctgaaaagattcattgtaataaaaatatctttatatggaaatgtacaaagcaaatgataaccggtatgccgatatggcttataggcgttgtgggcggagcggattgctattgccggtcatctctctgggattatggcataatttcggcagtgtagatgtgttcagtaactttattcagattgcgtatgccgctttcgacaatgggattacacattttgatcttgccaataattacggtcctgtgtatggatcggcagaggaaaatttcggccgtatcctgaagaaaggtctggggcaatatcgggatgaacttgttatttccacaaaagccggatatgacatgtggcctggtccgtatggcaactggggaagtcgcaagtatctgatggcaagccttgaccagagtttgaagcggatgggattagaatatgtggatattttctattcgcatcgtccggacccacagacgccgatcgaagaaacgatgggagcattggctgacatcgtccgccaaggaaaagccctgtatgtcgggatatcgaattacactgccggacagacggaaaaagcacttgccgtattgaaagaacatcgtgtgccttgcttgatccatcaagcgcgttattcgatgctggatcgcaggatcgaaccggacttgttgcctctgttgaagcaggaaggagtagggatgatcgccttctcgccattggcacagggcatgttgacggataagtatctgaacggtattcccgataattcgcgtgcggccaaatctacaggccatcttcaacgtgaacaggtgacggaagaaaaaataaataaagtaagacaactgaatgaccttgccaaacaacgcggacagacgttagcggaaatggcgattgcctggctgttgaaagacgaccgggtgacgagcgtcctggtgggagccagttcggttgcacagttgatagataacctgaaggcgttacaaaatacagccttttcagcggaagaaatacaaatgatagaaaatatattacagtaatatacactgataaatcatcatttattaatccaaacaattaatgaaaccattcttatatcaggttgcatcccttttttattctgaatacggggcggaagtgagccgtctggcctttgttttcccgaatcgccgtaccgggctgttcttccagaaatacttgtcggaagtatctgagaagcctcttttctcgccgacgatcctgacgatcaacgatctgtttgtacagttgagcggaaagcaggctgccgatcggatcagcatgctgtttaaactatatgatatttatttgagacatagcggttcttccgaaacgttcgacgagttcttgtattggggggaaatgctgctgaatgattttgacgatatcgataaatatatggcagatgcccgtatgctcttcaccaatgtgacggacctgcgtgagatagagaatgattttagttttctgagccctgaacaaattgcggctatccggactttttggtcttctttttacccgaaaggagatacgcccaaccaggaacaatttctggcggtctggcagattttatatgccctatataccgatttgcgggaagcgcttgccaccgaaggcaaaggatatgaaggtatgattttccgggaagttgtcgaacagatggagaaagacgaatgttgcgacctgccctatacaaaggttgtatttgtcggactgaatgccctctcggtggctgaagaacgtttcctttccggattgcaaaaacggggaatagctgatttttactgggattacgcctctccgaaagtgacggacccagataataaagcctcttacttcgtggagcgcaatttgcggcaattcccgtcgcaattaattgaaaatggacaattgactattgacaatgaagatgacgacaaaaagaagatcgaggtgatcggcatcccttccggaatcggacaggcaaagcaagtgtgcagcattctgaacgagctttgcaaggaagacgaaatgagtgcggaagaagcgttgcggacggctgtgattctgccggatgaacatttgttgattccggttctgaatgccattcccgaacagatcaaacggatcaatgtgacgatgggatatccgttggccggtacaccggttgcatctttgatggaatatattctggctttgcaaaagaatattcgttatgtggaccggaggccggtgttctatttccgggatgtcttgccaatcctgaaccatcggtatatctcgactacttctccagaggtggtttctaatctggtaaaaaatatttcagaaaacaacaagatttacatatcgtatgacgatctgaataagacgccattgttgtccatcctctttactccggtgactgcggtggaaactttctccgattatttgattaacgtgttgcaggaactgaataaagctgttgaaggtggaaagttgaaagttgaaagtgtaaatagtgacacggagccactttcaactttcaactctcaactttcaactattaacgacatcgaacaggagtttatcttccattatttcgctacggtcaaccggatgaaggaagtcatgcgggaggcgaatgtagaaatgaaaatcgacacctatttccgtttgctgaaacgtgtgacggacacaattacgattcctttccatggtgaacctctttccggtttgcagatcatgggtgttttggagactcgtgcgcttgactttgaccggttgattatcctttcgatgaatgaagggattttcccgttgaggaaagcggctaattcatttattccttataatcttcgtcgtggattcggtttgccgacatacgaacatcaggacagtgtttgggcgtatcatttctatcgtttgatttatcgtgccagccatgtcagtctgctttatgatacaagaagcaacggattgcagacaggcgaggttagccgtttcgtgcatcagttgcattatcattatgaggagccgatacagaataagttggttgtttacaatgtctcttcttccaagactcctgccttgcaggtagctaagacggaggaagtcatgaaccgtctggctgatttccggagtggcgggacgcgagcgatatcggcgagtgcagtcaatacctatctggattgtccgcttaaattctatttctccgttgtcgagggaatacgtgaagaagaggaggtaagcgagacgattgaaagtaatgtttttggaagtatcctgcataaggtgatggaagaattgtatcagccattctgcggaaagatggtgacggctgatctgctgaaagcgatccgaaaagatacgcctatgttgacgggagcagttgcccgtgcctttgccgaaattttctttaaaacggacattgttcgtccactcaccggacaaaatttcctgatcggcgagatgattcgcaaatatgtggagaaagtgttggaacgtgacgcaaagcagactcctttccgttatatcgaatcggaaaagaagataaaatgccttttcccattgacggataaaagcaatatccagttgaaaggatttatcgaccgtatagacgaagtacgcgatgtcgtccgcattattgactataagagtgggggcgggacgacgcagtttacctctgtagaagctcttttcgacaaagcagatacggatcgttccaaagcggttatgcaggtctttatgtatgcatggatgtataacaggtcagttcagctttcaactgctattcagccgggtatctattatatgaggaccctcttttcttcctctttcgatcctggaatttaccatcgtacagaccggttcaaaacagaacaggttttggacttcgccaactatcgcacggattttgaagacagcctgcgaaattgcttggatgaaatcttcgacacagaaaccccattcgtgcaaaccccgaacggcaaagcctgcatgtattgtccgtttaaggatatttgcgggaaatagtatttttacagatttcccatatattcatccacaatttcattcaggaagcggttgaatggaagaagctttcgaaaacaatcgatggtttcttccatccagtccggctggctgaaaaaactgtcgggcttaatacctataacgctgaagtctttgtgccttaatatatgaccgtaaggagaatcggaggggaaacctgccgggatacgttttagcatgtccccttcgagtgacgggtacagagctttgaaagaaggctcttcgatgatggaaacaaattcatctatgttattgtatatttcacgtcgaaggactttcaatatttccggtttgggataccagataccaccggacagtacgcagtattccggttcaagatgaaagtagtaagctccccggatactatgacgtcctccttgagcaatacaggctgacatataagtcttgtaaggcgacttgtcgaggctgaaacggatgtcgcgattaatacggaacagacatttccgtgcatccaatccccgtatatcaggatcaaatacactgattcgttcgattaactcttgtacttcgttgataaaagcgcagcgaagtttgtcatatcgttctctattttcatggaaccagacggtattattgtttcgtcgtaaatcgtctaagaatcggataatttctgcattcatattaggatattctttttttattgtattttgtatctccattgtttcggagtcatctgtttcatctttttgaaataacgattgaagtagggaatgtcggtgaagccgcattgccaggctatttcgttaatgtccttatccggaaagttgcggagtaaagtgccaacggcctctatccggtattcgttgatgaagtttgtaaacgttttgcctgtttcacgtttgaaaaacgagcagaacgccgttgtgctcatgctgattacgtttgcggcgtccgaaagagttattttctccttgtaatactcgatgacgtatttgaagatcagttgcatgcgttgcatgtttttggtaatgccgttgaatgccgtttcctgcaaaccgatagggattaaatcggttgtggttccgatttgttgcaggatgcggatcaacatcagcatcctttcgcttgcattcaggaggttcatttcttctaagcaggatttgatttttccggctgtttcgcctgtcagcaggatgccttgctggattgccgataaccggtgagcggcatattcccattcggtaaaaaaagacaggccggtttgtagcaagtcgggattgaattgcacaactatgcatctccgttttccatcaggctcgcaactttcggggttatacatccaacaatgtggttggttggtcgggaccagtacgacttctccctcctcgaacggctccagaaagtcgcctatcatccggtagcctgaacctttcacaacataacatatttctatttcgggatgaaaatgaagaggcatttcgtctttcgggtacaagctggaataatcgtagcgtaatgaggcacaactatcttttttgatttgttcgaattttagtttctcatgcatgtcggatgaactttctgataaaacacagtaaaattagacaataattgcataatctgcgacaattacacttaataattttgttgtttctttgcggccggaaaaacagaaagattgaattaggttatgaagaaaggtttgtatgcattgtcttttggcacatttgggttggggattgcagagtttattatgatgagtatcttgccggatgtggcggcaggatttgatatttccttatccgaagccggtcatcttatttcggcttatgcgttgggtgtatgtgtgggagcgccgttggtagtggtggtggccaggagttggccgctacgtacgatcttgcttgctttggttgggctttttgttgccgggaatctgcttatggctctgtcggccgattattggatggggttgtgtgcccggtttgtatcggggttgccgcatggggcttatttcggagtcggttcgattgttgccagccgtttggcggagaaagggaaaagcacttctgctgtagctattatgattatggggatgacgattgccaatttgttcggtgtcccggccgggaatttcctggggcactttctgtcctggcgtttggtttttgtgattgcagcgttgtggggtggcgtaacgatttggtttatccggaggtgggttcctgttttgcccgccctgccggcgacgaatctgaaagggcagtttcgttttttgagaaggccggaaccgtggatgctgattgctgctaccatgttaggaaacgggggagctttttgctggtatagctatgtcaatccgttaatgacggaggtgtccggtttcagtgtcgggacaatgcctgtattgatgttgctggcgggtgcgagcatgtgtgtcggtaactatttgggagggcatttgtctgatcgttttacacctggtatcgtagcgatgtccatgcagtttctgatgtttgcatcacttctgctgatttatttttttgcttcgtacggctttttgtccgctttgctgatgtgcgtttgtactggttgcctgtttgcagtttcttctccacagcaattgttgttgcttcaatattctcctggcggagagatgatgggcggggcgatggtccagcttgcttttaatttggggaatgccgtgggggcttattttggaggattgtcgatcgaacatggggcagggctggaaagtacggcattgatcggttcgttttttgccctgttaggaactgcggtgtttctggtattcaactatatggtgtttaaacctcagaggaaattacttttaaaggggggaatataatttccgaggatcaagacggcatttttggacatagaaacagccgtccgaaatcgggacggtgtttttggagataaaaaacagccgtccgaaatcgggacggtgtttttggagataaaaaacagccgtccgannnnnnnnnnnnnnnnnnnnnnnnnnnnnnnnnnnnnnnnnnnnnnnnnnnnnnnnnnnnnnnnnnnnnnnnnnnnnnnnnnnnnnnnnnnnnnnnnnnnaatcgggacggctgtttggatttataatgtctcttgtttcagttgttcgacgaaacgatcgattcgctgtagttctttcggaatatcgattccctgcggacagtgtggattacattggttgcaactagtacaatgatccgcttggcggagtttcggtacactgcggtcgtacccgatcagataagcccggcgagcttcgcgatagttttcatcctgtccgctctgagggacattcccctcgttcacacatttattataatgaagcaaaattcccggaatatcgataccgtaaggacaaggcatacagtatttgcagtcgttacacgggatggtcggatactgcatcatcaagtcggcggtgtcgaacaagaaacggttttcctcttccgtcaacggttgcaacggacagtaggagcggaggttgtcttgcaggtgctccatgtaagtcatgccgctcagcacggtgagcacgccgggaaacgagcctgcaaaccgaaaagcccaggaggcgacgctccgtcccggttcgcgttgcttcaggcgggcgacgatatggtcgtgcacgttcgaaagccgtcctccgaggagtggctccatgatgatggcgggaatcccccgtttctgtaattccccgtacagatattccgcgtcggtgtttcgcgggttgatctctttggcatgtttccagtccaggtaattcaactggatctggacgaaatcccattgatattcgtcgtgtttcgaaagcaaataatcgaacacctctatatctccgtgataggagaaacctaagtttcggatacgtcctgccttgcgttcttcgagcaggaagtcgagtatgccgttcttgacataccggttttcataggcttccataccacccatgccgatcccgtggagcagcatataatcgagataatcgacttgcagctccttgagcgaattgttatacatcgcgatagaggcttcgcggctccatgtgtcgggagagaagttcgaaagcttggtggcgatataatatttgtcgcgcggatagcggctgagggcgatccccatagcatgttccgaacgtcctttgcaataggcgggcgaggtgtcgaagtagttcacaccgtgctcgatggcatagtcagtcagccggttgaccatctcctggtcgatttcgtcatcgctgtctcttgcgctgtttttggcaatggtcggcaggcgcatgtatccataaccgaggatggaaactttgtcttttgtggacggcgtcgtgcggtatgtcatccggtccgtgggaataggggtggagcttcccgaacctgaggccatcccgctgtccgaactgcacccggagagcaacggggcggtagttgccgtgctgattcctacaatcttcaggaaatcgcgacggtttatcgcttgatgattgtcttttttcatatatgatgattcttttatttcttgatcaaatattccggtgttgttcgtgtccttccacatatatggcgctgaacggacgcgacgggcacaggttttcacaggctccgcagccgatgcatttttcctcgtttacgaccggcagttgaggcgaatccgggtcgttcgggtcttttgccaccatcaagatcgcctgggtagggcaatggcgggcacagttgccacaagtgacgccgtcccggttgacgatgcaattttcctgaatcagtacggcatgtccgatctggatagccgtcttgtccgctttcgtgatcggacggatcgctccggtcgggcaaacttccgaacatttgacgcattcgggacgacagtatcctcgctcgtacgatacttctggctgcataaatgtttgaaggttccccgaaggacgcagcacatggttcgtacaaaccgatacacaaagctggcacgcggtgcaatgctgggagaaattggcagcgctcagcgagcccggaggagtgatcggggttgtccggtccggtttctttttatcttcgatgatggccagtccgccgtcgactttcttgtccgggagttgtactttttcctgggctttcagtgtggctgaagtggcaagtaatgccgatacggtaaagaatttgcgacgatcgggcttgtctacgaccggttggttggtctgtgtttcagccttgtttgtttttctgcgtgtatatcggatggccccttgtcggcatttgtctatgcagtccatgcaatcgacacagcggctatagtcgatctcgtgtactttcgcattgatacaggctgctttgcaattacgggcacacaagccgcaaccattgcatttggacgtatcgataaccggtttgaaaacggaaaaacgggagatcaatcccaaaaacgttcctaccgggcagatcgtgttgcaataggttcgcccattccgccaggcaagtatgatcagtataatgaaggtaactgtggcaatgataaaggttgggaggctccgtagccagacttccgtttcgtagaaagcataattgtctgcccgttctgccaagtaggccagaaagttgtttccccattgccagaggggtgcgaataagttagaggcgatacgcccgtaagcgctgtaaggtgcgatcaatgccgcccatgctcctaacccgctgatcatggcaaggataaatatcaccatggctccgtatcttaaccaggacaaggcgggggaataacggaaacggtttttcttccgtttccccgccagccatgaaacaacatcctggaatatgccgagagggcagattacagagcagtaaacccgaccgaaaatccaggtcaatacaatgagaaacagtaccacgccgaggttgagtgccaataccgccggcaggaactgtactttcgccaaccacccgaaccatgcatgcaacgtccccgtgaaatcgagaaacagtagggttacaagcgtaaaacagataagtgcagttgtaagtctgatcgttcgcaacataataaactctttttagatagtctgttattttatgttgcaaacataataaaaggaaatggtttgcaacttacacgaattacggattgatgtaccaatattacggttttgtcaacttctgcaaaaagtctggctgacaaaccttagaacttcaggcaaggccgtccgccaataggtccagctatggccgccgtctcgtactcggaattcatgcctgatccctttctgcttcatgacctggtgcacctgcatgtttccgtccagcaggccgtcgtcatcaccgcaatcaatgtaataacgaattttgggcaagttgttttgattccagtcggaaaggatcttcaagacattgttttgcttccagtgttcgtctcccggcccgaacaggcggttgaataaatccttgtgcgatttgttttttcttgcctccatgactgtgtcgtcgaaaacggcggcactcaacggagcacatgcgcagaacatgtccggatgatgcaagctgtacaggaatgatccgtagccacccatcgacaatccggcaattgcccggctttctttgtcactgcgaatccggtatgttttttccatataggggataagttcttcaaaaaacatgtcttcataaggtacttttccatcatactggttgatataccaagtgtcccatgcgtccggcatgacgattatcatcggcacggcttcctcgtttgcgatggcacggtcggcaatcgttttcatttgtcccatctgtatccagttggtttcattgtccgtataaccatgcaagaggtagaggaccgggtaattccttttcgaggtgttgtagtcggaaggcaggtagatggagtaggaaactttcctacctaatttgttactttcgaaagagagcgattcgaaaactgtactttgcgaatatcctgcaacgttgaatagaaagcacaggatacaatagagataaaatttgtttttcatatactattaataattagatttgtttgtctggacagagtaagaataagagaagagagcttgccggaaaacccattaggtttcgacatactctctttcccttattgggaaattaatccgccaccggatagggaaattcggtcaaccctttgtacatgaattgataggtcggaacttcgattcccaattcttgggcagttcgtacgacatagcctgtcaatgtttccacttcggtgcgattgcctttttgaaaatcactgtgcatggaggttgtggagttgttaggcatgatcttctgggcgtcgatggcggagaatacttgaccgtccggcagacgaatccctttggcttctgccacgcttttgagttcataacctaatgtgatgaacagatcgatatggttatttaccacttcgccaatcgtttcattgaaataggaggtgatagtggcggcggtcgagatcatgaagaatttcttccagatttccaagtcaatgtcatccggtattgtggtaaggatacgggcgttggccaatatatcctgtaagtctttctgtcgtttcttgtttccttgtttacttccgaagaacatccggtcctttatggtgaacttttccactcttcccggtctgaccaagcgggaaccgatgtaaacgcatcctttccaaacctcattgttcggtaatagcttttgtatgcgttccgctatatccgctccgttcagcaggggaatgataaccgtattagggccgatgatcggagtcagctgaactatattctcctccaagtcgtagcttttggtacagcaaaacaggtaatcgactggtcctatttcagcaggattgtcggttgcgagggttggttttgctttgatcgtcaggaatgtatttttgacttcgatgccgttcttacgtatctcttccaggttttcaccccgggaaatgaaatagatgtcaatatcttcagagtctttgtaacgggcagctaatagtcctccgtagtagccgcctacagctcctataccggaaatcgctattttagttttattcat

SEQ ID NO: 359 - DNA, 26173 bp, unidentified
  source 1..26173: mol_type = unassigned DNA
tggcggcggcgggcaaggcgctgatgaatcgggccctgcgccgcgtcgtggtgcagggcggttgaacacagagaaaggagggttcggccatgcggctgtatctaaaatatttttccatccatctgcgatcggcgatgcagtataagacctcattctttctgaccgttctcgggcagttcctggtttccttctccatgtttctcggaatttattttatgttctcccgctttcacacggtggagggcttctcctatcaggaggtgctgctctgcttcgccatcgtcttgatggccttttccctggccgaatgctttgcgcggggctttgacgcctttccctccatgctcggcaacggccagttcgaccgtattctggtacggccccggggcgcggtgtttcaggtgctggcctccaagatggaactgacccgtctgggccgccttctccaggcggtgctggtgttcgcctatgtcatccccgccagcggcatcgtgtggcggtgggatcgcatcctgaccctgatgctgatgattgccgggggcgtggcggtcttttccgggctgttcatgatttacgcctccctctgtttttacaccaccgagggcctggaattcatgaacatctttaccgacggaggccgggaattcggtcggtatcccttccgcatctacggcgaaggcgtgctgaaatttttcacgtatatcattcccctggcgctgtttcagtattatccgctgctctttctccttggccggtcgagcaaccggctgttgatgctcgccccgttcgccgctctgccgtttctggccctgtgcctgctgttctggaaaatcggggtgcggcattataaatccaccggttcatgacgagggaggctgttctatgatactcagcgccagtcgccggacggatatcccggcgttttatggggattggctgatgaaccggctgcgggccgggttcctgctggtgcgcaacccccgcaatccccggcaggtcagccggattgacttgtcgccggagaacgtggactgcatcgtcttctggaccaagaatccggcccccttcctgtcccgcttgtcggaattggatgccagggggatcccctactattttcagtttactctgaccccctatggcccggagctggagcccggcctgccggataaatcggctgtcgcggacatctttcgccgtctggcggatcggctggggcctcaccgggtgctgtggcggttcgatcccatcctgctgaacacggattgggacgtgccgcgtatcctggacgcgttcgcccgcctgtgccggcacctggcgggatatacggagcaatgcaccatcagctttctggacgtttacgccaaggtgcgcccggcggtacgcagcggccgcatccgcccgccccagccggacgacatggcggcgctggcgaatacgatcggcgccatcggcggggaggcgggcttggacgtgcgggcctgctgtgaagaaatggactggcgccccttcggcatccgccccgccagctgcatcagccgggagcgggtggaacgggtctgcggctgtcccattcaggcgaagccgcacaacggccagcggccgcactgcggctgtgtggacagcgtggacatcggtgcctacgacacctgccgcaacggctgcgtctattgctatgccaacgcaggcggcggggcggtggccgccgcctgcgcgcggcatgatcccctgtccccccctgcttaccggccgccttctgccggacgatatcgtccggccccgtccggtcgaatccctgcggcagaatcaaaccaccctgtattaaaagagagccttcggcacgcgttcacgtgccgaaggctctcttttatatcacacattgaagcggaacagcacgacgtcgccgtcctgcatcacatactccttgccctcgctgcgcaccaggcccttctccttggcggcggtcatggaaccgcaggccatcaaatcctcatacgaaataatctccgcccggatgaaaccgcgctcgaaatcggtatggattttcccggccgcctggggggccttggtcccccgggtgatggtccaggcccgcacctcctggggcccggccgtcagataggagatgagccccagcaggtggtagctcttttgaatcagccgatccaggccggaatgctcgagacccagttcggagaggaacagagtcttttcctccccctccatgtccgcgatatcggcctccagctgggcgcagatgggaagcacttcggcgttttccccggcggccagctgttccaccttcgcaaaatgcgggttacgctccgggctgccgccggtgaaatctgcctcgctgaggttggcggcgtaaatcaccggtttggcagtcaacagggagacggtggagagcatggcggcctcctccggggtacattcgacggagcgggcgggcttgccctcctccaaaacggcataaacccgcttgaagaaatccagctcggtttgcagccccttatcccccttgagggctttggccgtccgatcgatccgcctctccagcatctccatgtcggagaagatgagctccaggttgatggtctcgatatcccgcagggggtcgatgctgccctccacgtgcacaatgtcgtcgttttcgaagcagcgcaccacgtggacgatggcgtccacctcacggatgttggcaaggaatttgttgcccaggccctcgcctttgctggcccccttgaccaggccggcaatgtccacgaattcgatgaccgccggcgtggttttggcggggttgtacatccgcgtcagctcgtccagccgtacgtccggcacagaaaccacgccgacattggggtcgatggtgcagaagggatagttggcgctctgggcgcccgcgttggtgatggcgttaaacaaagtggatttgcccacgttgggcaatccgacgattccgagtttcaagaaggatgacgtcctttccccgtggtatctccgggccaaagccctgaatggtcttgcgtttcgctcttaatcggcgctctgttcgcccgcgtcgccgcggccgcagcacttcttgtatttcttgccgctgccgcaggggcagggatcgttgcggcctaccttctggctggcggttttgcgtacggtgcgggccttgtcggtgccgtctgaggaggtggaggtgggcttggcaatctgctcccgcttgggctcctcctgggtgcggatctgcacggtaagcatcagacgggaggtgtcttcccggatggcgttaatcatctggtcgaacatgtcgaagccttccacccggtacatcaccaccggatccttctggccgtaggcgcgcaggtgaatgccccggcgcagctcatccatgttgtcgatgtgatccatccagtagcgatccactgttttcagcaggatcacccgttccagctcccgcatgatctcgccgccatactgggcttccttcttgtcgtaaatcgacatggcccggtcggtcagggtgtccaccaaatcctgccgctccagatcctccagcccctgggcgtcatattggaaatcgtcgtccccggccagccagccgcggtagtaatcccgcagcccgtccaggttccagtcgtcgtgggtttcatcgttggccgtataggtcttgacggtttccgcaatggattccttaatcatgttcacgatgctgtcccgtacgctttcgccgttgagcaccttgtcccgctggctatagatgatttcccgctggcggttcatcacgtcgtcatactggagcacgtcgcggcggatgccgaagttgcgctcctccaccttgcgctgggcgctctcgatggaattggtcagcatcttgttttcgatgggggtgtcctcgtcgatgccgagggcctccatcaggttgttgatccgatccccgccgaacagccgcatcagatcgtcctccagcgacagatagaagcgggtggcgccggggtcgccctgccggccggcacggccgcgcagctggttgtcgatccggcgggattcatgccgctcggtgcccaggatgaacaggccgccggcttccttcaccttttcggcctcgggcttgatttcagccttgtatttctcgttgagctccttgaaagtggcgcgggccgcgatgatttcctcgttgtccgtgtcgccgaagccggtggattccacgatcatttcctccgggaaccccatgcggcgcatttccgccttggccaggtattccgggttgccgcccagcataatatcggtgccgcggcccgccatgttggtggcgatggtcaccgcgccgattttgccggcctgggcgatgatctcggcttccttctcgtgatacttcgcgttgagcacctcatgggcgatgccctttttcttcagcagattggacaggtgctcggatttttcgatggaaatggtacccaccagcaccggctgctgccgctcgtggcattcctcgatctgccggataacggcgttgaatttgccggcctcggtcttgtaaacgctgtcgggcagatcggttcggatggtgggcttgttggtgggaatttccaccacgtccagcttgtaaatctgctggaattcggtctcttccgtcttggcggtaccggtcatgccggacagcttcttgtacaggcggaaatagttctggaaggtgatggtggccagggttttgctctcccgctccaccttgacgccttccttggcctcgatggcctgatggaggccctcgttataccggcggccgaacatcagacggccggtgaactcgtcgacgatgattacctgatcgtccttgaccacataatccacgtcccgggtcatgacgccccgggccttgatggcttggttgatatggtgcagcagcgtgacgttgtccgaatccatcagattttcgagatggaaatactgctcggcctttttcacgcccgcctgggtcagggtagcggtgcgggctttttcgtccacgatgtagtcgccgtccaccgtgtcctgctcctctttggcgtccatttctttgatgcgggtgattttcagggtcttggcaaagcggtcggcctgctcatacaggtcggtggacttgtcgccctggccggaaatgatcaacggggtgcgcgcctcgtcgatcaggatggagtccacctcgtcgacgatggcgtagttgtgggggcgctgcaccttgttttccttgtagatgaccatgttgtcccgcaggtaatcgaagcccagctcgttgttggtgccgtaggtgatatcggcgttataggcggcgcggcgttcgttgttgtccagcccgtggacgaccaagcccacctgcaggccgagataccgatataccttgcccatccattccgagtcgcggcgggccagatagtcgttgacggtgacgatgtgcacgcccttgccgctcagcgcgttcagataggcgggcagggtggccaccagcgttttgccttcaccggtgcgcatctcggcgatgcgtccctgatgcaggatgatgccgccgatgatctgcacggggaagtgacgcatgcccagcacccgatccgccgcctcgcggcaggtggcaaacgcttccggcagaatatcgtccagcgtctcgccggtttccagccggtttttcagcttatcggtctgggcccgcagcgtttcgtcggacatggcgcggtattcctcttccagcgcgagcaccttgtcgcacaggggctggatgcgcttgacctcccgcttgctgtaatcgccgaaaagagttttcagaagtcccatggttcctaaccgttcctttcgttatcaaactgggcgtgtctgccggcccggcaaccgccggccgccggccaatacccggatcgttataggaatcgtacgggctttctatggttcccaaggacagaaagcccggcacggtatcttatatatcataccatattcctggaagggatacaaccaaaaagtcggcggtattggccgaaaacctgaaatttcttcggacaggcgttgacccttttatcgttttgcggtataatagcggagaaaaatgcggacgatgggcgggcagcagcgccccgccgccgaattcggcataccattttggataaagaatggactttccgggcattcgttttcccggagggaaaggacacgattgcgcatgaagactgtgagcaaaaacgggctcagcggtatcattgaagcggcgctcatcgcgctgatgctggtggccctggggctgatgatttccctgccgtggagcatcaccggcgtaacggacagagagcccggcatggaaggctttttttatgaaaaatattttgtggtgctgatgttttccggcctgatggcggagctgattctctggcaggcccggggcattatgcacaacgtcaatgtgggccgccccttctgccgggacacggtgcgccgcctgcgcaccatcggcacggaatgcctggtgctggcggtagcctatttcgtcggcatgttctttgtgaccaagttttttatggtgctgattttcgtggctttttcggtcattgggctgatattgttcgtgttcgccgagctgttccggcaggccattatttataaggaagaaaacgagatgaccatttagcggcggcgtgacggccggtgtgaagatggatgatagaggttgggtaaacggatgggcatattggtaaacttggacgttatgatggcgaaacggaagatagggctgacggaactgtccgagaaggtgggcattacgttggccaatctgtcgatcctgaaaaataaccgcgcccgggctatccggttttccaccctggacgccatttgccaggcgctggactgtcagcccggcgacatcctcgagtttaccgatgacgataagtagtacccgtatggtataaaagaaggctgttccgtcaggaacagccttcttttataccatacggtgcgccgccagcctggcggcctccaaatacggggcgggctcaaaatccgggctgtcggctcccacggcgtggacgcgctcggccaggacagcatgaataacggtcagcggaggcgccagctgtttttccagcagcggcccgccctccggcgacccgctgccagacgcggtgagcagcaccagccttttccccttcgagatgggcggccgtttgccaagaatgaaccgggccgaccaataccgctgcagccgatcgataagggccttgagaggggcgggaaaggaaagatggtagaccggcgtggctatcaccaccaggtccgcctcctccagcgcggcgtaaaaatcgtccaaatcccgcttggagcatccttcccgatgatagcagtaccggcagtcgtcacacggaatggggcggcgatcgtagcaggaaatccgggtgacggccgttccctttggcagctccgtcaagaaagcgtccagcatccgggcggacagcccgtccgcccggggagagccgagaatggccagcacccgttcagccgaggagggtgcgttcttcgcaatagtcgcagacaagcatatcaccgcttttccggaaggtatgggggagatacggttccgcatgggtgatgcaccggggattggcgcaagcgtaactttccccggcggggacggtgtccaggtgcttgacatccccctccagcattttcatgatgagggccatgcgggcgtacaggccgtattcggtctgctcaaagtatttcgcgcggggatcgtcgtccacctcctgggtgatttcgtccacccgaggcaggggatgcagcaccaccaaatcggatttggcccgccgcattttgggcttgtccagcacgtagacgcctttctgccgttcgtattcctccgccgtttcaaagcgttcccgctggatacgggtcatatacagtacgtcgagcagaggcatggcctcggccaagttgtccatttcctgccacggacagcccgccgccgccaaataatccttgatgtaatggggaataccgagatgaggggtggagatcagcacgaaccggtttccagggaagcgggacatggccttgataagggaatgcaccgtccgtccgtttttcagatcgccgcacaggccgatgcacaaacccgaaaaggtgcccttttcgttgcgcagggtggtcaggtcggtgagggtttgcgtgggatggagatgcccgccgtctcccgcattgatgaccggcaccctggaatacagggcagcggccagcgccgcgccggcggtggggtgccgcatggcgatgatgtcggaatagccactgaccacgcggaccgtatccttgatggtttcccccttggccaccgaggaattgccggggttgtcgaagccgataatccggccgcccagacgcagcatggcggtctgaaaggacatctgggtacgggtggagggctcatagaacagcgtggcgagaatcttgccgcggcagacgccgtaatagtcgtccatatgccggcggatatcgctggccagggcagtaatttcctcccattcggccacggaaaggtcggataaatcgataagatgacggttctgcatagggacatgtctcctctgctgcggatttttttcagtatagcacgatccccggcggcgcgcaatgccccgtatgcgtaaaggggtgggagaatgccggagtttttaggggttattgataaacaatatgtacgaattgtgaatccctggagaaaagcgttgcaaaatagaaagggaactgctataatatcggtgtttgtaccaaaataccggggagaaaataccatgcagtgacgaataaactggggtttaaaggagatacggacttgaaaaaatacgactatctcatcgtgggctgcggcccctttggggcagtgtttgcccagcaggcgacagcgaagggaaagcgctgcctcattattgaaaagcgggatcatatcggtggcaacctctactgcgaggatgtcaacgggattcatgtgcataaatacggtgcccatattttccataccaacagccggaaaatctgggactatgtcaacagcttcgctgagttcaaccggtacaccaattcccccatcgccaactataagggcgagatttataatatgcccttcaatatgaacacgtttaataaaatgtggggcgtcgtgacgcccgagcaggcccgtgcgaaaattgcggaacagcaggccgccgtggaaggggagccccgcaacctggaggagcaggccatccgtctggtcggctccgatatttataccaagctggtcaaggggtataccgagaagcagtggggccgggactgcacccagctgcccgcctttatcatcaagcggctgcccgtgcgctacacctacgacaacaactatttcaacgaccggtatcaaggaatccccatcggcggctacaacgtcctcatcgagggcctgatcgcgggggtcgaggtgcagctgggcgtggattatgacagcgatcgggaagccttcaacgccatggcggacaaggtggtgtataccggtatgctcgacgccttttatcagtaccggttcggcaagctggaataccgcagcctacgctttgagagtgaagagctggacatggaaaactatcagggcgtggcggttgtcaactacaccgaccgcgagacacccttcacccgcattatcgagcataagcatttcgaattcggcacccagcccactaccgtcatcacccgggagtatcccgaaacctgggaagagggaatggagccctattatcctgtcaacgacgagaccaaccaggcgctgtatcagcagtacgcggagttgaccaagacggaaaccaacgtcctgtttggcggccgtctggcggaataccggtattacgatatggacaaggtgatcgcctcggcgctgaccctttgcagaaaagaattgggagaataacagccgccctggccttccggccagggattgctatttgccgggttcggcgttggaggtaacagaatggataacgcagtcaaagtcagtgtcattatgccggtgtacaaggtggaaaagttcgtcggaaaggccatcgaaagcatgctttcccagacgctttccgattttgagttcctgattgtggacgacggaacgccggacaacagcggcaagatctgcgacgagtacgcgcagaaggacagccgtatccgggtgttccatcgggaaaacggcggcgctcccagcgctcgcaacatggcgatggaggaggcacgggggaagtattactacttcatggattccgacgactgggcagagcccaccatgctgcaggatatggttgagctggcggaaaagcacgaggcccagctggtggtgaccggcttcttcatcgatacttactacaatgacaccgagtatttgtcccagaaccaggtgcagcccgacgccgtttatgaccagaaggcgttccgggagaatgcctacaagctgtttgataccaatctcctgtacaccccctggaacaagctctacctgcgcgcctatatcgatggcaaaggcctacgcttcccgcagaccatctgggatgatttcccctttaatcttagcgtcatccgcgacgtggagaaagtggtggtgtcctccaaacagtactatcatttcatgcgcgcccgggcggattcggaaaccgccaaatatgtgcccgccatgtaccagaagcgggaggatgagcacggctggatgctggatttgtatcggcattggggcatccaggacggccccagcatggaaatggtggcgcgccgctatgtggaacggctggttggctgcgtggaaaatgtgaccaatgagaaatgtcagcttcccaaagaggagaagaaaaagcaaatcgcggcgatgatccgtagcgacaatgcgaaaacctgcctgaagctggcccggccgcgatcgactatgatgaaaacgatgctggttcccattaaatgggggaacgtatccctgaccatgctggaaagccgcgtcatcaccaaaatcaaaaccaagcataccaaaaccttcgccaccctgaaggccaaacggtaaacccagagcgaaaggcggtcgccctatgtcacaaccatttatcagcgtcgtcatgccggtatataaggtggaaaactatttgaggcctgcggtggaaagtttgctgcgccagacgttttccgactatgagattattttggtggatgacgcttctcctgacgccagcggagccatagcggatgcgatagcgcgggaacatgcttgtatacgcgtgattcataaaccgcaaaatgagggcctaagcatggcccgtaactccggccttgagcaagtgaccggcaggtatgtcatgtttatggattccgacgatacggtggagcctaccttattcgccgatgttgtggcgtccctggaaaagaatccagcccaggtggtcgtgttcggtctggttgaggactattatgacgccgccggcaagcttcatcacagcgtcccggtgagttatggaaccgatcggctgctggaatcgcaagaggatttgcgtaaggaagttatccatttagaggaaaaaacgttgtacgggtactcctgtaataagttttacgacatggactttattcggagcaatcatttgcagtttgaagtcattccacttatcgaagacatccagtttaatgttaaattctttatggatgtccaacgtgtaaacatcctggactgtactccataccattacaataaacgattagacggaagtcttacgaatagatttgtgccagattattttaatctgcactatcagcgtgtacagatgctgtttgaccaatatgactattggggttgcctgaccgatgatgtcaaacagattctcagcggcatttacgtacggtatattttctcagccctgcagagaaactgcgatccgagagcatccatgtctcatgcggatcgcaaacgatttctaaaagagttgtttgcgcagccgttgttcaaagaactaattccttattcgagcgggaacagtcggctcgttcgttggatgtccgcttggctgaataaacgccgtgtcagctgctgccttttgggtggccgagggatttatatcgtaaagaaaaagctgccgatggtatttgctaaagccaaacaaaatcgttgaggtctacatgtggaaggatattgtcatgaaggataatctcgtattctgggtgaaaaaaatcctgtttgttcttttaaagatattttatatctgcccggttaagaaaaaccggattgtcttttttagctattacggaagacaatattcctgtaatcccaaatatttgacggagtacttggtctctcatcacctgggtgacttcgatctatggtggcagtttttacaaccggaaaagtttgaggagctgagggaaaaggggattcgcctgacgcggtatgacagccttcgcggcatggtgaatctaatgacggctaaggtcgtagtcaccaacgtggattatccaatttatattccttttcgtaaaaaccagtttttaatcaatacatggcatggcggcggcgcttacaaaaaggtggggacggatattcgttctctggcccccagccgcatgaaaaccgaggagaaaagcaaaaaggtggtcaacttgtatatttcctccagcaaaatgtttacggaaaaggttatacgaggtgcgttccggttttcaggcgaggtgctggaatgcggtatgccccgcaacgatatccttttgggagatactcaggatttatataggaaggtgcgacagtattatcacctatcaccggcgcaaaaaattgttttgtatgcaccgacatttcgagaggatcgcaccattcagaattacggtttggattttgaaggcctgcggactgctctggtcaagcgatttggcggagaatgggtctgctttttccgggcgcattccaatcttatccggcagtttcaaaatttgacgtttgataagacgatcatcaatgcatccgagtataatgagatgcaggatctcctgtgtgcggcggatgttctgattacagattattcttcgtccatgtgggatttttccttgacaaacaagccttgcttcctctatgcggtagataaggcgtcgtatcagcaggagcgggatttttatatgccgatggaacgctggccttttccctatgctgacagtaatgcgcttttacaggaacaaatcatcacctttgacgaaaaggcctatttacaggcggtcgaacgccatcatcaagagcttggctccacggaaagcggcagggcgtcccgaatcgtgatggacaggatattgaaagagtgcgtgggaggctaacaggaaagtctatgaatgttgcgattattttcgccggcggcactggccaacggatgaaatccgccgcctgccccaagcaatttttgaaactgtatggcaaacctattattatatatacgctggaggttttccagcagcatcccgacgtggatcaaataattgtcgcctgcgtctccggctgggaagataggctaaacaagatgtgcaccgattacgggatatccaagctgtataaaatcgtacccggcggaaaaaacacacaggaatctaagctgaacgcgctccacgggctggcggatttgtgccatgacgacgatatcgttctgatgcacgatgccgtccgccccatgattacatcccaattgattacggacaacatcgaggcggttaagaaatatggttctgccattaccgccgatccttttacagaaaccggtgtcgtgagcaccgacggcgtcacagtggaaagcaccattgaacgcagtaagctctatattgccaaagcgccccagagcttctattataaggatgtcctctcggcccatgaacaaggtcaatccatgccggacagtattacgatcgatacatgcaccttgatgacggcgctcgggaaacccctgcattttgttcaatgcgattttgccaatatcaaaattacgcgtccggatgattattatatttttaaagccctggtggatttacgtgagagcaaggagattctgggactgtaaaggagtacgccatgctggatttacatgcggttatcctggaagatttggaaaatattgtttcccggtcggttttctggggcaagctccaggggaaaacagtgctgattaccggcgccagcggactcattgcttcctatatgatgtttaccctgctgtatttgaatgatacccggcaattggggattcatgtagtagcgcttgtacgtaacggcgaaaaggcaagacaacagtttgcagatattctagataggtccgacgtaacgtttttagttcaagacgtgtcccagagggtggattattcgggccctatcgactatatcgtgcacgccgccagccaggcaagcccccgctattttacttccgatcctgtcggcaccattcaagccaataccgtggggactgaaaacatgctgcggacagcggcggagcgaaaaagcaacggctttctttatttatccacccgcgaaatttatggagagtttgctgctgataaaaactctatctgcgaagacgagtatggtattctggatcccacaataattcgctcctgctacccggaaagcaagcgtatggcagaggccatttgccgcgcatatgcacaccagtactgtgttcccgctagggtggcgcgtattgcgcatacgtatgggccagattgggttatggacaacggacgggtatggggcgattttatatccaatgttgtccgcggcgagaatattgttttgaagagtcagggaactatggaattggcctttacgtatctgagcgacatggtttctggcctctttttggttttattgaatgggaaagagtttgtctataatctttccactgacgtatctatcacggtgcgcggcttagccgaactgcttacccagctttacccagaaaaaaagttgcaagtagttattgatattcccaaggacaccagcgcttatctggctaatcccgtgccgaagctggattgttccagaattgccgcgttaggatggaaacctgctgtaagtctgagagcgggctttcaacgaactattgcatatcaggaatcgaagtacaaaggaggataggataaatgccagctatcagtgtaattatgccggtttacaactcggagaaatatttgcgcagtgccgttgacagcgttttaaaacagacatttcaggatttcgagttgattctcattgatgacggttccaaggatggcagcagtgccatttgtgatgaatatgggggaaaagattcacgcgttgtggtcattcaccaaaaaaatggcggaatctgtgcagcaaggaacaaaggtctggatgaggccaagggagaatatcttgcctttatagataacgacgatttttatgatcctgccttactggcggataactatgccttaagccagcagtatcaggcggatattgtaaagtttggagcaattaaaacgacgttatgggaaaacggccgtaaagaaattgtcgaaaaatctgtgccggaattaatggtgctcgattccaaccaactggcgagaaaatatgtctatttaagaaatcgcagaatgtttgacaatctatggaatggcttgtaccgaacagattttattcgaacaaatgggattcgttttgacgaatcctttttatgcggaggggatgatcagatttttacaatgagtctgcatctttgcaaccctgtgtccgtgtttaatccacgatgttattataattggttgcaacgggaaggtcacagtacgtctcttcattatcgtgagagtatgccacgtgaaaactatcttatttttgaaaaagaatgtcaagtgtttcaaaagttacaggttccagatatttctgtgttaacaatagatgcctatgggtatttaattggaggatattttaattatattttatataaaggatgtccattatctaaaaaagagattttaaaaaaaatggaagaagacatctggtatccgttatatcaaaaatatttttatgatgttaaggattatagaaaggaagcgtcctcctggcaaacaaggttaggaatgtggctgattcataatcgttggttctcattatggataacactacaaaaaatgaagcgaaaactataatttatagtttataagattaaccgggaggcaggatatgaataaattttttgatttaagagaattcttgatttttattcttaaaaaaataaaggtctttatagtttgcacgttgttgtttacccttctatggatgggtgcccgtacaataccgctagtcacgcagtatgtcacgtataatgagccgacaacgtcagagggaaacgaggagtttactgccagtgatttaccgtatcgttttgctgaaacaaggctgttatatgtggattccatctatgtgagtgaaaataatgtcaatgtggatcggacaagtaatttgttgaatctgtttgtttccttagccaataccaataccaatatgaatcaacaaaaagacttattttatgaagaggctaaaaagatagatgcagaggatcgtcagaagctatataaaatgaactatcgcaccaagcaggtgtttactcttccttttgattttcaagcctttagaaattattattccgtacaggttgagggcggtaatgtcattagcattacggtcactacgccggacaaagaattgtctgccaaaatgtgtgagtctctggaaaaaagtttagtacagggcgtgaaagaaacttggggggactacaaatataagcaaatcggtttgcgctcaaatcagaccctgccaactccggatacgggactaattccgcgcacggagcctacgtccacatctgtggttaccggaactcgccccagcgtgtccgaaattttgaaaaatatgatcaaaagtgctgtctggggatttctagctggcgcaatgatctcccttttgatcctgttctttatgcaggcgaccaacatcaaggtgctggaagtaatagatattaaagatatggatttgtctgtcttgggagtttgtgaagtgcctgaaaagaaacgcaagctaaaatggatcgatcgactcatcgatcgcttggaaggacgctgcgccgctgatatgactccggattgttgcgccgaaattgtagcggaaacaatcttctccttgaatttccaagcaaaaaaaattctcgtatccggtgttgcggatcaaaaagtatgggaatcggctgcccggcctttgaaaacctgtttggagaataaagaatacgcggttgaaatggtcaataggacttcgaaaaattcggatgcgatccgaaaaatcggggaggctgatggggtgattctgttggaagaagccggtgtttcaaccaaacaggagatccagcgtgagatagagcagtgttctcttttaaataagcccgtttttggagtggttttgttgaaataggagtggcgaaagcggattacgggttagatacgcctgcgggagaataaaaaatggtagtatatatcatcttgctggggctgaccatgctgtttgcatggttttggagatgtgcggaatgccagctgctccaggaaaaagcgggcgaggcctgcaaagcatctaagggatacagaactggtttgcttaggagaaatttatgggttgccatgacatttttcccaatgtatattatcaatgccggtatgtattatgttggcaatgattatagtaactatgtaaaggagtttgaaaagatacgcagtggcggtgaatccacgatggacatcgcttatgtgtggctgaataaactaatcattcggcttgggttggatttccaatttgtattggtaattctatgtctggtagcctatattcttttctttgtctgtatccataaatattcagaaaattatcccatcagttttttgttgtactttgttatcggatattttttcttactgaatttaaaccaaattcggcaatggatggccctcatgctggtgatgctgtcttatcagtatattgaaagaagaaaaatcgtcccatttttggttttagtcgtattggcaaccctattccattttaccgctgttatttttatcccattttattttattcttagcgttcgctataaagcaagtatatatgttgttttaatgctcatattgattcccttcaattttttttataaccggctacttcagtttttgtttgcgacttttcggccttcctacgtcggttcagcgtatatggacaaaacattgcagtttgatatgtttttgatcgtggcgatgttttccgtattgatgatgattttgttctattacgaggccatcattgacagcagaatccatacgatatttatgaatgcgttttttattgcgttcttgttgattgtgttttgcggatggataccagaagtgtcccgattttcctattatttctatatgccgatgatttttttagtccctaataccctattgaaggaaaagagacaaagtcagcgctttatttggctggtcgcaatagttggactgcatattttgcgcttgttgcgttcagcgggcggctggggattggttccatacgatcacatctggctgcattaacaggaggcttgttttatatgaaaggcattattttagccggcggtgccggtacgcggctgtacccgtccaccatcgcctgttccaagcagattctgaccgtctatgacaagccgatgatttattacccgctgtccaccctgatgctcgcgggcatccgggaggtgctaatcatctccacgccccgggatcttcccggctttcgggagctgttcggggatggttctcagctgggcatgcagttctcctatgccgtgcaggaaacgccccgcggcctggcggacgctttcatcgtgggggaatccttcatcggccgggataacgtctgcctgattttgggagataacattttctatggctacggcttcagcgaacggctgaaaaacgccgccgatcgtaaaaccggcgccaccatcttcggctaccatgtcagcaaccccaccgaattcggcgtggtggaattcgacaaggactggaatgtgctgtccattgaggaaaaaccgcagaagccgaaatccagctatgcggttcccggcctgtatttttatgacaatcaggtggtcgagatcgccaagcaggtgcagccctccgctcgcggcgaaattgaaatcacagccgtcaataacgagtatctccgccgcggtcagctgaaggtggagctgttcggccgcggaatggcctggctggataccggcaatcatagggccatgctggccgccgccaactttgtggaagccattcagacacggcagggcttgttcgtctcctgcatcgaagaaatcgcctaccgccagggattcatcagccgggagcagctcctcacccaggccgcgcggtttaaatcctctgagtacggccactatctgtttaaaattgcggaagccgagcaggcatgaagggagctgacaccatgaacatccttattaccggtgcgaatggccagctaggcaacgaactgacctccatgctgtcctccggccaggcggaaatcggtcccattccggccgcctatcggggcagccgggtgacggcggtggacgtggatcgcctggatatcaccgacagcgctgccgttcaggcttttatcgaggcggaaaaaccggaacttattatcaactgcgccgccatgaccaatgttaacggctgcgaatccgcgccggacacagccatgaagatcaacgccatagcgccaagatttctggccgccgccgcccagaaaatcggggccaaattggtgtatgtgtccaccgactatgtgtttgacggcgacggcgcccgcaccagcgacgactcgatcatcccctataccgagtgggacgtctgcgccccctgcagcgtctacggaaaatccaaatggctgggagagcagtatgtccgggaggtctgtccccgtacctttgtggtgcggacagcctggctgtatgggtatgtgggcggcaactttgttaagaccatctggaaaaacggcgcgcaaaagggcgagctgaaagtggttgatgatcagatgggcaatcccaccaacgccaacgatctcgcgtatcatatcctgaagctggccctgaccgatacctatggcgtgtatcattgcaccggtaccggcgtctgttcctggtacgattttgcctgcgaaatcatccgcctggcgggtgttccctgccgggtgacgccctgcaccaccgaggaatatcccaccccggccaaacgccccgcctattccgcgttggataacgccatgctgcgctgcacggtgggggatgagatgcgggaatggaaagcggccctggccgtctatgtggagaagctgaaaaaagcgggaggccctcaatgaaaacgtatttagtcaccggcggcgccggattcatcggctccaatttcgtgcagtatatgctgcaaaaatatcaggacgtccgtatcctgaacctggacaagctcacctatgcgggcaatctggagaacctggcctcggtcaaggacgatccccggtatacctttatccacgcggatatctgcgacaaagccgcggtggaaaaaatctttgccgaaaacgccatcgactatgtggtcaatttcgcggcggaaagccacgtggatcgcagcatccgggagcccgaggtgttcgtcaaaaccaacgtggaagggacagtgtgcctgctgaacgccgcccggaacgcctggaaccttggcggcgacgcctataaggaaggctgcaagtatctgcaggtgtccaccgacgaggtatacggttcgctgggtgccgagggcttctttaccgagaccacgcccctgtgcccccacagcccctattccgccagcaaggccgcggcggatatgctggtgcaggcctacttcgataccttccgcttccccgtgaacatcacccgctgctccaacaattacggcccctatcagttccccgaaaagctgattccgctcattatccacaacaccctgcagcataaaagcctgccggtgtacggcgacgggatgaacgtccgggattggctgtatgtggaggatcactgcaaggccatcgatatggtgctgcgggacggcgtggtcggcgaggtgtacaacgtaggcggccataacgagcgccccaacatcaccattgtcaaaaccatcctggcctatgtccatgatcatgtggatgaggcggtgaacgaaaccctcatcacctatgtggaagatcgcaagggtcacgaccgccgttatggcatcgatccccagaaaatcaaggacgccctgggctggtatcccgagaccaccttcgaggtgggcatcgagaagaccattcggtggtatctggacaaccccggctggatggcccatgtgaccagtggccagtatcaggaatactacgcccggatgtacggcggcaaataatcgcccgggtcggagataggaagcgcattatgggaaaattcacctttacccccaccggcatcgccggcatgatggtcgtggagcccaccctgttcggagacgcccgcggctattttatggaaacctataactacaacgaatttgcggccgccggcctggatatgacctttgtgcaggacaaccagtccaaatcaaagcggggcgtgctgcggggcctgcattttcaaacgaaaaactctcagggcaagctggttcgcgtcatccgcggcgaggtgttcgacgtgggggtggacttgcgggaaggcagcgccacctttggccaatggtacggcctccttctgagcgaggagaaccacaagcagctctatattcccgagggctttgcccatggcttcctggtcaccagcgaggaagcggaattcgtctataaatgcacccgcttctacgacccctccggcgagggcggcctgctgtggaacgataaggatatcggcattgattggccggtgacggaggatatggacatcctgctgtcggataaggacaagattcagcccaccttccaggagtatctggcgcggcggggctgaggcaagcgtaacagtaaaaggggaaaggggcgcggcggatgaattccaaggccaaaagctttatcaagaatttttcctacacctttatggccaacgcggtgtcctttctcatttccgccgtgctggtgtttttcgttcccaaacggctgggcgtggaacagtatggctattggcagctgtataccctgtatacctcctatgtgggctttttccatctcggctggtgcgacggggtctatctccgatacggcgggcaggattatcacgagctggagaagccggtgttcgtcacccaattctggatgctgacggcctttgaattcctcattacggccggcctcggcatttatggcttttgtatcgttccagaagcggagaagggcttcatcctggccatgatgggcgtgtgcgccctgctgctgattccccgcacctatctaggttttgtcctccagtttaccaaccgcattaaggaatacgccgccatcaccatgctggagcgcgtcatttactttgtgctggtaacggctctggtgctgggcggcatccaggattaccgcctgctgctggcggcggatttgatcggcaaagccgtggggctggtggtggcggtctgccgctgccgggacattgtgttcggccgcatggttccatttcgttcgggcttaagcgaagcggggaaaaacataaacgtcggcttcaagctgatgatcgccaacatcgcgagcctgctcatcgtgggcatcgtgcgcatgaccatcgaaaacaaatggggcgttgccacctttggcaaggtttccctgaccatgagcgtgtccaacctgctgatggtgtttatcagcgccgtcagcatcattctgtttcccaccctccgccgcaccagcgacgataagctggccggtatgtatgatttcatgcgcacctcgattatgacggtgctgctgggtctgctgattttttactatcccgccaagctgctcctcaccgcctggctgccgaaatacgccgaagccttgacctacatggcgctgatgttccccgtgtgcgtgttcgagagcaagacctccatgctggtcaatacctatatgaaaattctccgccgggaaaagtggatccttctcatcaacgcctgcaccgtggcgctgagcattcttatctccgggctgacggtcttcctgctagagaatttgaccctggcggtgctgtccatcgtcgtgctgcagaccttccgctgtattttcggcgagcttctgctctcccgcgatttggacatccgtgtgcgcaaggacatcgtcctggaggtcctgatgaccgcgaccttcatcgccaccgcctggttcctgcgctcctggctgtgcaccattctgtatggggcggcgtatctggtgtatgtgctgatcaaacgccaggatatcgcccgcatgctgggccaggtaaaatccctgataaaacgctgatgacaggccgccttccgtggaatggcggcctgttttcatcgaaaggaggtgcggcgcattggaacgcgtcaagctgtcggttcatcgggtagtggactgggtgctgcgctgcggcgatatcgatagccgctatgtggacgcctccaccatgcagcagggggcggccgcccaccggaaaatccaaaaagccatgaccggcgactaccgcaaggaggtctccctctccctggaaaccgaggccggcggctttccgctccttttgcaggggcgggccgatggcgtgttcaccgctgaggacggactgctgactatcgacgagatcaaatccaccaccctgcccctggaaaagctggctgtccagcaggctcagcacctgggtcaggcgcaatgctacgcctatatgctccttcaaacgctggatgccccgccggaaacggtgggcgtccaactgacctattatcagctggaaaccgaggagctgcagcgccggcggtttgtcttcagccgggaggagatcaccgcctttttcgcggatctcctcctgcgctatggcgattggctgcgctttgagcatgagtggaaagtcctgcgggatgcctcgattgccgccgccgcctttcccttcccggcctaccgccggggccagcgggacttggccgccgcggcctaccgcaccatcgtcaaccgcaaaaagctgtatgttcaggcccccaccggcatcgggaagactctttccaccctgtttcccgccgtcaaagccgtgggggagggccggctggaaaagctcttttacctcaccgctaaaaccgtcacccgcaccgtggcggaggaggccgtcaccctcatggaaagccagggcctgcgcttcaaatccgtcaccctgcgggccaaggataaaatctgcttttgcgaggaaaccatctgtaaccccgacagctgcccctacgccaagggccactacgaccgggtcaacgacgcgctgatggacatgctcactcatcacgaccgcatcacccccgccgtggtggaggcctattgccggcagtaccgcctctgcccgcacgaaaccgccctggacgcggccttgtgggcggacttggttatcggggattataaccacgtgtttgatcccgccgcctatctccgccgctttttcgacggggacgaggagcataactacggctttctcatcgacgaagcccataacctggccgaccgggtgcgggatatgtattccgccgtcctgcgccgttccgccttttcccgcctggcgagacagctgccggataaaaccaaaaccgccgccgccctgcgcaaatccctgcgggccgtggccaaatacctagccgacgccggtaaggccttgggcgatgccgatgaagccgccaatcccgaaaaggacgcggcgataggggcgttggtgacgctgttttgctccgccgccgaggactggctggctgaggagcagaacaacagccacgaacggctgcgggacgtgctggagctctactttgaagccgccgccttccagggtatcgccgagctgtacgacgagcatttcaccaccctgacggaaaccggggagggggatgtcatccggacgctcttctgtctggatccctccgccatcattgccgagcggctgaagctggccaaggcgtccgtcctcttttccgccaccctcaccccgctgccctattaccgggagctgctgggcggggacgagaccgatcccctgctgtccctgccctctccctttgaggaggagcgcctgctcctggtggcccatggcggcatttccaccaaatacaaggatcgcgccgccagctatgcccccatcgcggaggccatcgctgcggttatcgcccggaaaacgggcaactatctgatcttcttcccttcctatgactatatgcggcaggtgcacgagcgctttacggccctgtgccccggggtggccgctcccatgcaggacagccatatggaggaggaggaacgggccgcctttctcgcccggttcgacgcggagaatgccgataccctggccgggttctgcgtgctgggcggcctgttctccgagggtatcgacctgaagggcgaccggctgatcggcaccgtcatcgtgggggtgggcctgcccggcctgtctctgaggcagaatgagatccgggaatattttaatcgaaaaaacggtcggggctacgattacgcctacgtctaccccggcatgaataaggtgctgcaagccgccggccgggtcatccggtcggcggacgacgcgggggtggccgtcctcatcgacagccggtttcacaccgccgcctaccgggccctgttcccgccccattggtcgcagatgcggcgcgtccgggacacggcatccctgcgccggctcctcgccgcctttccctacttttcggcagagcccgaacagcccccctcaggcgaatagcggggcgcgatcacacagcttttcattcggaaagaaggagatgacttatgagcagaaccgtgcaggccgaactgaccactatggtgatggtgcgccgccgcgataccggcgaggtgctggtgcagcagcgggccaaaagttggaaggggatcgccttc

SEQ ID NO: 360 - DNA, 13775 bp, unidentified
  source 1..13775: mol_type = unassigned DNA
tcagattttggcgagtgcctgttccagatcggctatcaggtcattgatatgttccgttccgatggatagacgtacagtgcccggataaatctcctgttctgcaagttcctgcgcattaagttgagagtgtgtggtacttgccggatggatgaccagtgatttcacgtcagctacattagccagcaacgagaaaatctccagactgtcgatgaagcggtgtgcttcttcctgtcctccttttacttcaaacgtaaagatggagcctgcaccattcgggaaatagcgttgatagagtgcatgatccggatgatcggagagtgacggatgattgactttcttcaccttcggatgattattcaggaagttcaccacttttagcgcattttctacatgacgttctacacgcaaagaaagcgtttccagcccttgcagcaggatgaaggcattgaacggactgatcgttgctcccgtatcccgtagcaaagtggcacgaatgcggatgacgtaagcagccggaccggcagcgtctacaaagcgtactccgtggtaactcggatcgggctctgtcaactgtgggaatttgcccgaagctacccagtcaaatttaccggagtcaacgattactcctcccaaggaactgccatgaccaccaatgaatttggtggcggagtgtaccacaatgtctgctccgtgttcgatggggcggattaagtagggagtgccgaacgtattgtctataatcaaaggtattttgtggcggtgagcaatttcggataccgcttctatgtcgataatattggaattcgggtttccgagtgtttcgataaatacggctttggtgttctcctgaatcgctttttcaaagttggaaaggtcgctcggatcgacgaaagtggtggtaacgccataattgggcaaagtatgcgccagtaagttatagcttcctccgtaaatcgttttggcagctacgatgtggtcgcctgcacgagtaatgttttcgaaagcataagtaatggcggcagcaccggaggcaactgccagacctgctatacctccttcgaggacggctacacgttcttcaaaaactccttgggtggagttggtcaggcggccgtagatattgcccggatcttgcaagccgaaacgtgcggctgcatgagcagaattgtggaatacataagaagtggtctgataaataggtactgcgcgtgcgtctgttgccggatctgcttgttcctgtcctacatgaacctgtaatgtctcaaagtgtaaattctttctttccataatcgtatgctttttaagtttaatattctctctttattttcttgcaaagttatgggatgtagatatatcgaacaatatatagtagaaatatagaaaataatgctatttttgtatcgttatacagaataaggcaactgctttattcttaaaaatcacctgttagaagaatatttttcttatggatacttttgagaaattggataaagtggatttgcagatactccgtactttgcaagagaatgcgcggttgacgaccaaagagttggctgcgcgggtcagtctttcatcgactcctgttttcgagcggcttaaacgtttggagagtgggggatatataaagaagtatatcgctgtgctggatgccgaaaagctgaatcagggttttgtggtcttttgtagtgtcaagttaaggcggctgaacagggacattgcggctgagtttacccgaatcatacaggatattcccgaagtgaccgaatgctataatatatcgggcagctacgattacttgctgaagatccatgctcctaatatgaaatattatcaggagttcattctgaatgtattgggaaccatcgatagcctgggttcgctggaaagtacgtttgtgatggcggaagtgaagcaccgatatggaatacatatttagtgggaggattgatgtatttcctattttggctactctttgttttcggctcaggtttccggtggattgccgataatgtctctgtataagctgccgtcatggtccttgtattttgcgtattggtagaggcggaccagtatatcactgtaatcaagaatggctgtatttgatttctgtgataaattggtgcccaggataccactgcctatgataccgggattgtataatacggtgtcttgtctgatagagttcattatcagttctgcacaaatatagtctttaatccttgcctcttctagtcgggtcgtgatgtatgagttcagatggcttttgtcatgttgagtcataaagccgtaccatagtaaacacttcatccctaattgggtagcttctattaatatatccagataggttagtcccgatgttcctttcttatctatctcataaggatcgatatgaatgaaagaatctttggggagtgatggcagtaatctcataactccttcaagagaatcggtattatataggcggacggatgtctgtagttccgcttgcttcgcatagcgttctacattatccaaagcactcttttctatatcgaagaatagaaatttttgggcctgtcttcctaatacttccattgctaaagccggggaacctaaatagtatcctctttgcatttctgcactttctatcttatagtaaatggaatcctttaaaacttgattgtcttcctctgctgctttttctaagaaatagtaaatgccatattgttgttccgaagtctgctgcatcggatagaaagcgcaggctgaatttgtttctacatagatttgtggatgctcgttccgaagaacttcgcaaagtatcagatgtttcagtacatcaggctgtttgccgtaatgagtataagttgccatgatactaaaggtttatagtgatgatataaatggtatacagcaaatatacgggataattcttagattcttgcatctgatttccaaaattatcctgtacatttgttatgtgatatgaaccttattctttgaacgcaatgaaatggcaacattgtaaatagcttcgctctatatggatgatgaacaatggtgaaatctgttgttcaggtcttttgtggctaaacaggtcacctgatattttattatattattttagaaactatataaagaagcaattacaatgaatacaaatatttatccgcgcaccaatgaccttcagaccgtctatctgaatgcagttatcaataatcctcatataaaggttggtgactacaccatatacaatgattttgtgaatgatcctgttcagtttgaaaagaacaatgttttatatcattatcctgtcaatggagaccgactgatcatagggaaattctgttcgatagcctgtggagctaagtttcttttcaatagtgcgaatcatacgttgaattctttatcgaattatccgtttcctatattttttgaggagtggcagttggataagggaaatatcacttcggcatgggataataaaggggatatagtgattggaaacgatgtatggattggttatgaggctgttgtcatggcgggcgtacatatcggcgatggagcgattattgcatcgagggcagtagtcaccaaagatgtacctccttatacgatagtaggcgggacgcctgcgaagaaaatccggatgcgttttgacgaagatacgattgtgcaattgcaggaattgaaatggtgggattggagtactgataagatagcccattatttgcctcatatcatgaatggggatatggaggaacttatgaaataaaaagtatctttgtcctcaaacaatatatgtatgaaatttataattgaatccggttccctgaccgatattgacgaactggagaaactatacgatgaattgaatgaccatttatcggctactaccaattatcccggatggataaaggggatttatccggttcgtgaaaatgccgttgctggtgtgaacaatcagagtctgtttgttgccagatgtggcgggaggatacccggttctgtcattttagaccatcagccggaagaggcttatgagaatatccgatggaaagtagaggcagattacagtcgtatttttgtagtacgtacttttgttgttcatccatctttcctgcaaatgggagttggtcgggcattgatggatttttcactggaactggctgtaaattcaggaatgaaatccatccggctggacgtctatgagaagaactttcctgctatctcattatacgaaaaatgtggattcgaatatattgataccgtagatttggggttggggcattacggactggattggttcaagttgtatgagaaggttatttgaactgtaataatgacatagaatggaagctccgatagaatctatgaagcatagattttgttggagcttcctttttataatgaatatggcatttattccgaagatttaaataatactctttttcatttcaaaaacaatgtccttgatacatacattttctgatagattcagtagatatcggatcgtatttagtaaatcatcgggttgtaccatttcttcatctttaaaaggagttcctgcttttttcgccatttcagtattcacccatccggggcaaagggtcgtaacacggatgcccaatggcgctaactcacggtacagagattctgccaatccgagaaatgcaaatttggtggagccataaatacctccatcagcaaaaccatatttagcggcacgggatgcaatattaaatatgtatccgtctttctgcgctttcattatctccgtcaccgtttttagtattccatattgagcgatgacatttatttccatgatcttcctgaagttatccacagattcgcttagagagccgtccataaacatggcggctgcattcaccaagatatcgacggtgccatatttttgatggatgtttttgatttcagtatctacctttgtacagtctgtgatgtccaacggcaatacaataggttcttgtacatttttgtccgacagcatgatttcatcatgcactttctctaagttctgcctgtttcgggctatcaataccacccgataaccatcctttgccaaacctgctgcaatgacagcaccaataccttgacttgctcctgtaataatagctaatcctttttgcttttccataacctgaaatttaagtgagtttataaattatgatgtaagaaatactgtgacggtatagggacaaaaaaagaagcctcggaatattccaaggcttcttactaattatatgttttagcacattctgtttgatttcttcggcgcaaccgtagcagacaaggctaattcctttgaattttgccctttccctatgaatgcgttgtaatatagggaaatcaaaaatgtctgtgtgtttagactgttccattagttgcgatttcatttgcaaaagtaggcatatcttgttgaataagaaagtatttcgccccgaaaataatgatggttatctacttaaatacttattgatacatctccggtcccaatttatccctcgcttgacaattttggccggtatacctgcaatgattacattcggctcattaaattcttttgttacgatgcttccccaaccaacgatactgttgtccgctatcttcacattcttgccaatcttgctatctttccctatccatacatgcttgccgatttctatgcacttggcaaaattgatcggttcaccctttaaatctgttattgtatgtgcatcagtacaccatatatcaattccccagcttaactgactgtcatctccaatactaacatatgagtcatcttcctgcaaatacaatgtaaccccattgataacaacacggtttccgatatctatccggcaattgttggctgttcttgaaacaccgacacccagtcccggcagctgtccgatgattagctttaatcccgtcatgcctaatatggtagaatatcgtaagatgatcgttcctatatttacgatattattatccccttttacgatcagaagaaatccgttgctgagtagcaaatcctctgcactctcttcagtgtcgaaatacattgagatatgattgttatttcctgtgattgtaatgttagcctgattaataatcttattgaatttatcattcggagaagaaatgcaatcaattctgttgtgtgggaatattaatgtaaattcattgttctgtccggtaatctgttccatatcattaatacttgtgggttatatccgtatctttttgatacgacttttatttcattcctcaaatgtacgaaaaagaataaactaaaactcatccgatagtcctttttcttagcttgtgttctcatggcgatttctaaagactttctgtactatatttattaacttcgttgcctgatatttattcgtgccactatagtggtacgcaagaagaactatagttccctttgcgttctactatagtagtccgcaagggaaactgtagtggtacgaactaattataggactaaaaatataaatatcagggaaggaaccggttagttattcgggcttttttcataatgcttttaaccggttatcggattctgataatgagcgttataaaacaagtttttcggtttaaattctgttttttcattcgaatgataatacatgatcaacttgttcccgatagtgtatattatgcaggatgatgatataaaggtaattattagaattgatttcttatttattatatatagctttgtaacttaaaaaaacagagaaggtatatttgaaataaaagttttacaacaaataatggtgtatacaaaataaatatcgggcgaatcactatgtacagaataatcatcttattaatttcattgatactatcagtacaatgtttttcacaaacggagtttactacttatctgtttgacatatccagaaacagagtgataccgatagcggtttatcagccgaagaaagtaaattcaaaaacgaaagttatcatattcagccacggctatgatgggaataaaaacagtaagtcgaaccaaacctattcctacctgacacgttttctttcacaaaaaggtttttatgtgattagtatacaacatgaattgtccgatgatcctcttttagcgatggaaggcgatctcatgcagacccgtatgccgaattgggaacgaggaaccgacaatatactttttacaattcaggaatttaaaaacttgaaaccacaattgaattggagagaactcatcttgatagggcattctaatggaggggatatgacaatgctgtttgccactaagtacccgcagttgatcagtaaggctatatctatggatcatcgtagaatgatcatgcccagaacgttgaagcctcgtctgtatacattaagaggatgtgactatgaggcagatgcgggagttctgcctaccggacaggagcaggaacaattcagaatgaaagtagtgaaactggatggagttacacatagcaatatgggtgagaatggaacggcggaacagcatgacctcatcaatcagcatatccgcaaatttctgacggaaagataactgaagcatcatttctattttatccggcagttttaaaccgaaagcctgtttttcttgtaactttgctgccgattttagaaaaagaagtttggaatgaacaataaatacgaagaacggctgggaacagaacgtatgttaccgcttgttttcaaaatggcacttccggcagtggctgcacaattcgtcaatctgctttatagcattgtcgaccgtatatacatcgggcatattccgggaattggcaccgatgcgctggcgggtgtaggggtgactacctctctcattatactgatttcttctttttcggcaatagtcggcggcggtggtgctccgctggctgccattgcactcggacagggagaccgtgtacgagccggaaagatattgggaaacgggtttgttttgctgatattgtttactttgctgacttctgtcatcgcatatacttttatggaacctattctcctctttacaggagcttcggaaaacaccttggaatatgcggttgactatctttccatttatctcttgggaacgatatttgtcgaaatatccacagggttgaatagctttatcaacgcacagggacgtcctgccattgccatgttttcagttctgatcggagccttattgaacatcattcttgatcctatttttattttctggtttgacatgggcgtgaaaggtgctgctttggctacggtactttcccaagcgtgcagtgcggtgtgggtggtaagtttccttttttcccgacgtgcctctctgcctttggagaaacgatatatgggactggaccggaaaattatcctttccatattagctttaggagtatcccctttcattatggcaagtacggagagtttggttgggtttgtcctcaatagcagtctgaaggagttcggagatatgtacatcagcgcattgacgattctgcaaagttcgatgcagtttgccagtgtaccgttgaccggatttgcgcaaggattcgttccgatcataagttataacttcgggcatggtgacaagcagcgtgtgaaagattgcttccgtattgtattggtaactatgttttccttcaacttgatattgatgcttttcatgattcttttcccttcgacggttgcgtctgctttcaccagtgatgcaagactgatagaaaccgtacgttggacaatgcccgttttcttgggtggcatgaccatcttcggcttgcaacgtgcctgtcagaatatgttcgttgcattggggcaggcccgaatctctatcttcattgctctgttgcgtaaagctatcctgttgattccgctggcgttaattttgccgaactttatgggagtaaccggagtgtatgcagctgaggctatatctgatgcgactgcggccatctgctgtacgctgttgttcttttggcagttccctaaaattttgggaaagattaaagagaatactttgcgtgtggagtaatcgtttctttataatttgttttttacttcacagatatgcccagcattacggttgtattctgactgttattccagaccgaatgaggtatttctccttttaccagaaaagcttcgttttcattaataatcttttcttccttgtcaagcagaattttggcttgcccgctgatcactataaataaatgattgtgtgggtgagtatgcagcttgacaggtccgccgccgtccggttctaaataggctattgcgccgtctattatttcaccacagttgccaaaaagttttttggctaagaacttcaagtgttccggtggggtgataaatccatctgattcattcatgactattttatttatgctatagtactgcaaatgtagttatttgatttgaatttatgcattttcattcgtaatgattgtgtgttgttgaagtctgaatggaataaaaatgcgtaaccgattacgtgttttttgaaaaatacttgcttgtattattgaaatccgatatatttgcgtaatcaattacgtatttaataacgcaagtagtaaagacatggacttttttaatcagacggggaaattagctatcggaagcagactacgtatgctgaccgataaaatcaccgtagatgcggctgcaatctacaaaatgttcggtgtggacttgaaacccaagtggtttcctgtcttctttgttttatcacgtggagaggcaaagacaattacgtctattgctaaagagataggacactcgcatccttcggtgagcaatatcataaaagaaatggtagctaagggattggtgaaagagacgaaagataaatccgacgggagaaggaatatggtaatgttgtctgccaaaggaaaaagaatgtccgactcttttgcggagcaatgtatagatgttacgtccgctatcgagcaaataacgcagcaaacccggaacgatctttggaaggcgattgaagaatgggagaaccttctgtcggataagtctttgctggagcgggtgaaggatgcgaagcaggagcgtgaagctaaggatatccaaatagtatcttatgaaccatgctatcaatctgctttccggacacttaacgaggagtggattactgcttattttcgaatggaagaggctgactacaaggctttggatcatccgcaagaatacattttggataagggcggagacattttggtagccctttacaagggtgaaccggtcggagtatgtgctttgtgtaagatggatcatccggtctacgattatgagttggccaaactcgccgtcagtcccaaagtacagggcaaaggtatcggagtgttgctttgtgaagctgtcgtgaataaggcaaaagagttgggcggcaaaagaatctttatagagagcaatacacgtttgaaacctgctatccatatctatcacaagctgggattcagggaacttcccgaataccacacgacttatgaaagaggagatatacaaatggaattaacgatagaagagtgaaaaatgaaaaaggccgatagtgaatttatcaaggggcgtattgccccttgcggactgcattgcggaaagtgctttgctttttctgacggagagatctcttatcatagcaacgaacttaaaaggtcactgggcaattttgatgtgtacgcacagcgttttgtggacttgcttgacgaacccgtctttgcaaagtatccggactttaaggagtttttgaatcacctgtccgtagcgacttgtcagggatgcagaaaggagaagtgcaagttgtttaaaacctgcaatgtacgtgtatgcagcgaggagaaacaagttgattattgtttccagtgcagccgcttcccctgtgaaaacactggtttcgacgagcatttatacaaaagatttgtaactatcaacaagcggatgcaggagatcggagtggaaaagtattacgaggaaatcaaagatattcctcgttactaggtcgtcggttcctctctttatctcatttcctgtgcgtaaatgttgatggctcgcagtgcctttgaaatctcagtcggggtgatgtcctgacattctattcttaatactttctcccagtcctccatatctacattccatttgtagatttggggacatagggtgaaaagagccgcgatatgttttatatcccgtgcattccttattgaggttcggaaaatgagtatttgcccttccatagttgctatcaattacttttgtttacctcgcaaaggtaggcttaaaaaggcttcgatatagaattattcgacgaatgccgtgattactcatgacgaattaagtaatttgggagactaacaatagggcacttgtatagttgtccttctccatttcaaatctttatccggatatggcgataccccatacatcgtcttttagtgcttgaccccttcaaataaatcgcggttgtctcgtgaactctgtgaattgcgcttgaagtcattgaatgtataactgatagtcaacgtaattacagggaatttcggttgaatccgtgtgattgattgtaaattggctgtctcaatgtcacttttgtaacgggcagaattgaatatatcccgaaaggagagggtcgattgcagatgaggactgaacaactgctgacgaatagccagattgacaaaccaaaaagaatccgacctcccttgtgtagtaaccgaaggccccacgaaattcccgtccagctgaatacgggtattcttatgaacccgaaaaaggttattgactgtaaagtcataattggtactcgtttccttttttcctcccgaatttatattattcattaccttataatagtaaatatttccgttgacgtccagattccaccatttagtgactttcaactgggtacttagctccacgcctaacgaatagtcattgcccacgttagccatggagtctaatgtaactcctgcctcgtacggaacacgcaagcgttcaatcttgtctttacgttttctgtagaacaggctggattgcaaagtgtgctctcccatagtctttttgtaattcagctcgaaagaatgtatgtattcgggccggatatccggattgccaatttcagctgtgtaataatcgcgataagtaatgtaaggctccataaaaaagagttccggacggttggtgcggtacgaataggcgaatgtcagcttctgttcgtgcggcagcgtgtatcccaaatgtacggatgggaacacctcaaaacgattcaccgtgcggtccgaaccttcaatagaacttctcagcacctggtgtgtatgttcacctctcacccctatctgtacgtcaaatgctttatagctgtcacttcccatgacataaacggaatgaataccccgctgaaaatagaaagtgttatagatatcctcccgccaataaaactcctttttctccggattccagaattgcatcgtgtaatcgccgtcttccagatacgaatgatattgatacccgctttccagcagaccggtcttgctataaggatagctgtaggacagattgccttggactgtccagcgtttttcgtcttcccacgcacggtgtccctgctggcgttgttcgttcttgtcgaaaaggtcactttggaaatattcaaggggattgtcttcataacccagcataaagctgccggttagggtatgcccgttgtcgttaaacttatgggagaatcctgcttttccaatattgaccgtcgagtgcaggtcatatttgtcgcggctaaaatagttggatggggcggatgctgcggcggaattggaatgtgtctctgtataatcgaggtccccttcgcgggtaaacttgtcatatactacctgcaactctgcattgacggaggttttgggagtaaaagcgtaatcaatgcctccccgtagtccatagtgataattctttccgattcgcggaccatcggacagggaagtggtggtcttgtcgctaacaacagtcgtcttcctctgttcgaaatcgctcttacggatgggattgttccagtgcccggcaaggtgccactgtaacttcttgtgttgctgggacaacaggaaatccagaccgttggagagagctgtgctgccatatgcattgactataccgttgatacccgcttgtttgtttttcttggtgatgatgttaatcattcctacttctccgtccgtatcatagcgtgccgaaggcgtagtaatgatttctatgttctctatctgggtggaaggaatctgttgcagggcctgtgaaccggaataaaagctgggcttcccgtcgatatataccttaaatccgctgcttccgcgaaaggtaacttcaccatccacatcgacccggacggagggagtattttccagaatatcgaccgccgttccgccgctgctcatgagattgttcgaagcgtctataatctttttgtccagcttgtagatgacttgccttttggctgcctgcaccactacttcggctatacctacctccaaaggttgcagttcgataatacctaagtccgtcactgattcggaagaggtgatactaatggcgccttgtgtgtagatgtcatagccgatcagtctcaccattaacgagtattctcctttggcaatacccgataagtggaagtcgccgctctctttagtatgggtaaatgaagcgggatcggtttcgcctttcttcgttagtacgacatcggcaaactctatcgggttgcctgtacctttttcctgtacttttcctttgatctgtacgggaaccgccat

SEQ ID NO: 361 - DNA, 7422 bp, unidentified
  source 1..7422: mol_type = unassigned DNA
atgaataataaaatcactaataccgatattaatagttttgaagaattccttataaatgagaataagagcagaacaactcttgataaatatatgcgggatatacgaagatttcaaatctttctttctgataactgttacccaatatctcaggatactgcagataaatatattgagattcttaaaaatgctgattccagtataagcagcataaatacaattatatcatgtataaacacattttgtaattttataggaagaaatgatattcactgcgttaatcttaagaaatctaagaccgaatcaacagattctaacttacttacagttgatgaatataaccaactccttaaaaccgctataaacaataacgattatagaatagctatgttaattcaagtccttggaaatacagatataagattaaacgaattgcaataccttactacacactctttagaaatgggaaaaattactgttatacgttacagcaaagaatataacatcagaattccagatgatttattggatggcttatacgaatatatagaccatgaagcaataataaatggggtgattttctgtactagaaaaggcacccctcttgaaagatctaatatatggagattgattaagaaactggctgttgatgctgggattaatccggataaagtttatccgcagaatctgaagcagcagcttgggaagaaatattatagtataaaatactaatctacttcatactcttctcttaatctatcaatcaactcaaatgtaaaaaactctgtacctatgtcaggtatcagttccagtcttgcaatggtttcttcttaatatggctttatcattcaaatcaatcggcacaaatatgcgtatattatcctgttcattctcacagtctttatattcaggataatcaagcaatgatttatctgctagttatggttcattatataaatcaactttgtatcattaggtattggatacggatctattctatgatgctccatctatattctccttgtcaaatatttctacaataattacagtcacaagccatgtaaatttttccaagcctctatcaattcatctctgttatctttataccattcttcaatttcttaaatcattgatgttgaccattttttattaccatctttatataactttccgtcgcttaatcggaaaacagcctcatattcattatgtaacacatgaatttctatgaaatctatttaatatatctaacaatctatatttattatgttctgatatattattttctacaatatatattaatctcttatacttgaacattgttttcacataatgattctatttatactcctcacatctcagaaaagaaatcactactataataaactacattcattcaaatctccttcttgcaccattctactgtctctgcaattccctctgaaaacttataatccggtgcaaatcctgtatctttaactaaatcctgtatatctgcacacaagtacataacctggcgtggaccataggcaacttctccaaaaccaatctctgcttccggattaaccgcatttcttatatcctcgatataatccttaagcggtcttgcctctcccccaccaatacagtaaaccttgccattaatacctttttctcctagtaaataaaatgccttccccgcgtccttggagtacagataatcccacatctgctctccctttgtacatgatggcttctctcctattaacagctttcctattgtagacataaccatcgtagcacttccgtcatatggaccatatacactaagtattcttgtccatatatgtctgattcccaacttttcacactggattcttgtcatctgtcctgcacacagctttgccattccatagccattttctggaaatgcaggaacctgcgaattgagctttccttccactcttccgtattctgcctgtgaaccagcccctataaatgcactgcaccccataacagccgctgcatttacagcgtccagtgcatatttcacattcatattctgtatatacatatcattgcggcagtcaccaaatgttccatcccacccaaagtgatagaacacatcaggcttaattcctgtcgcctgcacaagctgtggcagtttatcaagctcactaagatcacattcaactttcttaagtgaatctgattccttaattctgtaagaacgctttgagttctttcttacaaccgctataactttaacattattcttcataagagcatctataagacctaagcctactgctcctgtacatcctgtaacaactgccgcctgcattgtgcctcctgttgttttactacttctcttcgtccattaatggaataaacatctgtttctttaattcttcccttggaaggaacggtgcgagatcctccaatggagggcttacaagtgtaccatcctctaatctcttggtactgctcttaggctcccatacctgcttagtatctgtaaatatctcacagaatacaggtccgtcttcctttaatacctcatctacagtcttcttcatctcttcattagatgatgcactgtaatacttatatccaaaggcctctgcaatcttcttgaattcagggaatgagaggtctcctgattctggtccgattccaatcttgcaatgctccttaaacagattattctgtgtaagtcttattgaatgatatccattattgttgataaggaatatcttgattggaagcttattagtaagtattgtctgcaattcctgaaggttcatcataatacttccatcaccttcaagacatattgtatttcttcttccgccaccaatacatgttccaattgctgccgggagtccatatcccatgcttgctatagcactgttattagccatgcggcttcccttctgtattacatatgcctgattacctacaacacagcatgctccgttggatactgccgtaagactgttctctggaagtctgctgcttaagtatcttacaaatgcatatacatttgcagtgcttccattctcctcccactgtcttggctgtactgccggatattccttcttccatctctgtgttgttgcgagccattcaccacctgctgatacaggagcaatagctgccgcctgcttatcaagctttgtgaggaaatccttagcgtcagcccataccggcatctcaacatggatagtaggcttctttaactcagccttatcaacatcaaccattatgacctctgctgctcttgcccatgttttccagttatatccagtctgtctgatagatattcttgtacctacagcaagtattaaatcggcattctgaatagcccagttacctggtctgtcgcccatattgcctgctcttccacaatacagaggattatcatcttctattaaatccactgcattccagtatgtaacaataggtatattaagcttttcggcaactgacctgaacacatcataagcgcctgaaagtcttattccataacctgcatggaatacaggtcttttggcattcttaatcttctcaagtacagtctttacaacatcttcacttacctgtggtggaagctttgcgtcatcctctgccggatcatatccttcaagctcatcagtctcaatatatccaccctggaaattaacaggaatatcaatccatacaggacctggtcttcctgttgttgccaagtgccatgccttttcaagtgcatatcggatattcttaggatcttctatcatagttgcgtactttgtcatattagacacggatttaactatgtcgtattcctggtctcccattgcacgaagtggtgtctctgtaaactgaagtgcatatcttgaggttgtgtcgtaacgaacctgtccacttataataaacataggaatggaatccagccatccacctactacacctgtaagtgcattcgttccacccggtccagttgtaacacatactgctgcaattctgttatcaattcttgcatacgcttcggcagctatggcacacgcctgctcatgatgattgtatgttaccttaagcttttcattatgtcccaatgcatcattaagatgcattgctccacctccaactacagaaaacacatctgtaacgccatgttccacaaggaaattggcaacataatctgctaaacgaattctcataaactgccctccacatatactggttaattactgattaacggcttccttaatagtcttagccatataatcaatcatctcatctgtcattcctggatatacacctacccagaatgtatctctcataattctgtctgttgtttcaagtccgcctactactctgtagccttctcctgttgctctcatctcatcaaagcatgggtgctttataagatttcctgcaaaaagatttcttgtctgtactccgtggctctctacatactcaactactgcctttctgtcaattccttcctttactgttataaggaatccgaaccagcttggtcttgagttctcacatggtacaggaagaattaccttatcctctatatctgcaagtgctgctcttaatctgtcaaagttatgtcttcttctctcaacaaatgatgggaacttctcaagctgtgcacagcctaccgctgcctgcatatctgttgctttaagattatatccaaaatgtgaatatacatacttgtggtcatatcctaatggaagttctccatactgcttgtcaaatctgtgtccacagaggttgtcctttcctgatgggcatacacagtcacgtccccagtctctgaatgaacggatacacttattaagaagtgcattattagtatatactgctcctccttcacccattgtcatatgatgtggtgggtagaagctgcttgttccaatatctccgatagttcctgtgaacttttcttctccattgattgtgtacttagaaccaagtgcgtcacagttatcttctacaagccagagattgtgcttgtcacaaaatgcctttactgctgaaagatcaaatggattaccaagtgtatgtgcaatcataacagccttagttttgtctgaaagtgcatcttcaagctttgtaacatcaatgttgtactgtggaatagtaacatcaacaaatacaggtactgcaccatactggatagccggtgttattgttgtagggaaacctgctgctactgtgataatctcatcacctctcttgattcttctgtctccgagaagtggtgatgtaagtgccataaatgcattaaggttggcagatgaaccagagtttactactgatacatactttactccgagatattctccaagcttcttctcaaattcatctgtataacggcctgctgtaagccagaattcaagtgctgaatcaacaagattcatcatttccttgctgtcatatactctgctcgcataagaaattctgtcaccttccttatactgcttctggttatggtacttcttgcagtattcatctacaataccaagaatctcctgtcttgcttctaattcattcttattgtcaaacatatcatatcctctttcttattttattaactctgccctactcagtaaagaattcttcaatctctttatccatacatgcaacggcatctccgcctgctgcatatacctttgaccattcaacactcttctcaattgctgtatcaaagttccatctgggcttccagccaaatgttgtctttaactttgagcagtctaactttaagaagttggcttcgtgaggtcctccgtcatatttattaatccatgaaagaccttctccccacttgttacagaaagtatcaacaagtgttcctgttgtaatgcagtcactttcatcaggtcctacattatagaaacctgcatacttcttatcactgtactgctcctttgcaatcataagataagctgcaagcggctcaagtacatgctggtatggtcttgttgaatgtggattacgcacaattatatcttccttcttaactgcagctcttacacagtcaggaacgattctgtcattggcgaaatctcctccgcctataacattaccggctcttgctgttgaaactgcaacctccatatcattgaaaaatgaattgatatagctgtgtgttacaagctctgaacatgacttgctgttagagtatgggtcatatccgtcaagaggctcattctctctgtatccccatgcccactcattattatggtaaaccttgtctgttgttacatttaaaaatgattttacacacgggttaagtcttacacattcacagatattaactgttcccataacattagtttcataagtatatacagggtctttgtatgattcccttacgataggctgtgctgcaagatgaagcactatctcaggctgtgtctcttcaaacaccttcttaagatgctcaagatctcttatatcacctattacagaattcatcttatcctctacatctatcattgaaaaaaggttaggctcagtaggtggaacaagtgaataacctgtcacttctgctcctgctttaaaaaggattctgcaaagccatgagcctttgaatcctgtatgtcctgtaacaagaaccttctttcctttataaaaacttaaatccatcttaatcctcccggcttagtcccatttcttccaaggagctgttccagttgcaagatacttctcgagcatatccatctctctcttggtatccatgcactgccagaagcccttatgcatataggacattaactgaccttcctttgcaagtttttctagtggttctctctcaaatacagtgtcatcaccatcaatatagtcaaatatttcaggattaagcaccatataacctgcattgataggtgcaccgtctgtatggctcttctctctgaatgacttaacagcgttgtctcctccgatatcaagtacacccttctgctgttcaagcattacggctgtaagagtagcaatcttgccatgctccttatggaactcaacaagcttgttcatgtctacatcacagacaccgtctccatatgtcataaggaatggctcgtcccctacatatttctggatacgcttgattcgtcctccagtcattgtattaagacctgtatcaactacagtaaccttccatggctcacaatgctgctcgtgaataatcatatcgttagagccttttgtgaagtcaaatgtaatatcactgttatgaagaaaataatccgcaaaccattctttaattacatactgcttatatcctgcacatataataaactcatcaaaaccataataagcatattccttcataatatgccagagaattggctttcctcctatctctatcattggctttggcttaaactgactttcttcacttattcttgttccgaaacctccagccagtaaaacaactttcat

SEQ ID NO: 362 - DNA, 8413 bp, unidentified
  source 1..8413: mol_type = unassigned DNA
atgcccccaattttgatgtgggtgctggttgtcgttgccgctgccgtgtgcggggcgcttggttattattttggcggggaaaaccggaagcgtaccgccgaagccaagatcggctctgccgaagaggaagccaaacgcatcgtgaacgatgccatcaaggctgccgagcagaagcgcaaggaaaccatcatcgaggccaaagacgaggcgttcaagctgaaagctgacgccgacaaggaaatcaaggaccgccgcgcggagatcagccgccaggaacgccgcatggaccaaaaggaggaagcgctggataagcgcaccgccgccatggagcgcaaggaagaggacctgaaaaagcgcggcgaactggtggaagcccgcttggatgagctggaacagctcaagctgcgccagaccgaaaagctggaaaccatcgccgccatgacccaggaagatgcccgcgccgtgttgttgaagaacattgacgatgagctgacccacgaaaaggccatgaagatcagcgcctatcaggctaacatgaaggacgaatgtgatgccatcgcccgtgagctggtcggccaggccattgcccgctgcgcagccgatgccaccagtgaagccaccgtcagcgtggtgccgctgccctctgacgagatgaagggccgcatcattggccgcgagggccgcaacatccgcgctctggaaactgccactggctgtgacctcattattgacgatacgccggaagccatcaccctttccagctttgaccagacccgccgtgaagtggcccgcatggccctggagcgcctgatcgccgatggccgtatccacccggcccgcattgaggagaccgtggataagtgccgccgcgaactggaaattcagatgaagcgcgagggcgaaaaggctgtgatggaccttggtatccacagcctgcatcccgatttggtcaagctgatcggccgcctgaagtatcgcaccagctatggccagaatgtgctgagccattctctggaagtggcatggctggccggcctgatggctggcgagcttggcgtgaacgttcagctggcacgccgcgcaggcttgctgcatgatatcggcaaggcccttgaccatgagatcgagggcagccatgtgcagatcggtgtggatatctgcaagaagtaccgcgagaacccgcagattattcatgcaatcgaagcccaccacggcgatgtggagcccaagacggtgcttgccttcattattatggcagcggatgccatcagcgcagcccgccccggtgcccgccgtgaaaacatggaaagctatatcaagcgtttggaaacgctggaagccctgtgcaacggctttgagggcgttgaaagctcttacgccgtgcaggcaggccgcgaggtccgcatcctggtccagccggataaggttggtgatgatcaggtcatcctgctggcccgccaggttgccaaaaagatcgaggacgagctggattaccccggccagatcaaggtcagcgtgatccgcgaaagccgcgccaccgagtacgcaaaataaccaaagcgaataaaacagatgccgcacctggtatgggtgcggcattttgtataagcattgatttatcccgtggatgctgccatatgtttaacccctacaaatggggttcggcttgctgcggaaatgtaaatgcgtatagagcaaagccacggcgggatgaggtcattcatctccggcctaagagccggggcactgccccggttgcagggttgcgagccagaaggtcacatttgagtttaggcaataccgcataattctaagtgccgatacggcgagcgaggtgcggcagatgccaagccaaaagcgcagataatactggatgtcttatcgagcattttggcaacgcagatgccgtgctgcagccgccggagcggtgcttaagccgtcaggcgggaattgtgcggtgttgcctttacgaaaatgtgatggtgagcaatgcaaagcccagtgggttttgcaactgcacgagcgggtttgctttgcaaactgacgggcattgcccgtcaagcgggcctccgaaacgcgcctgcgggcgcagcgccctacgaatgcttataatgtttgttgcacgttataaaatgttttgcagggaacggtcttgaccgttccggggccttgcggcaaatgtgttttacgttttccctcgcaaatcttgttggctctgctccctcaattttccctcttgccaaggggcatagaatacgatataataaaaaataattgtgcggatttatgcccctgtgggatgggcggtgacgcacggcaaatcaggcggcgcggtataggcgctgcctatagttcgccgcaactgcggtcactgaaaaggagcgtcatcatgaaaggtatcatcctcgccggcggtgctggtacccgcctgtacccgctgaccatggtcacatccaagcagcttctgcctgtgtatgataagcccatgatctattacccgctgtctaccctgatgctggcaggcatccaggatatcctgatcatttccaccccaaccgatacgccgcgctttgaagcgctgctgggggatggcagccagtacggcctgcacctgcaatataaagtgcagccctccccggacggtctggcacaggcctttatcctgggtgaagagtttattaacggtgagccctgtgctatggtactgggcgataatattttctacggcgcaggtttctccaagcggctcaagtccgctgccgccaacgccgaagccggccgcagcactgtgttcggctactatgtcaccgatcccgaacgcttcggtgtggtggcatttgacgaaaacggccaggcaacttccattgaagaaaagcccgcacagcccaagagcaactatgcggttaccggcctgtatttttacagcaaagatgtgtgcgaaaaggcaaaacaggtaaagcccagcgcccgcggcgaactggaaattaccaccctgaatgagatgtacctgcaggaaggcaagctggatgtgcagctgctgggccgcggctatgcctggctggataccggcacgatggacagcctggtggaagccgccgactttgtgcgcatgatcgaacagcgccagggcatcaagatctccgccccggaagagatcgcctataaatacggctggatcaaccgcggcaaactgttggaaagcgccgagcgctatggcaaaagcccctatggccagcatctgcgcaatgttgccgatgaccgcctgaaatattgatgcggtataaagaaagaggcacaagatgaaaattctgattaccggctgccatggacagcttggaaccgagctgcaaaaacagctggctgatgaagaatgcgcccttggcccgctgccggagcgcctgcgcaaagcaacggtgatcgccgttgatgtggatgagctggatattaccgaccgcgaagccactgtgacctatatccgccgcatccagccggataccgtcatcaactgcgctgcttttaccaacgtggatggctgcgaaaccaaccgcgatgccgcttaccgcgtcaacgcccttggcccgcgcaacctggcattggcatgcgaaaagatcaatgcccgcctgatccatatttctaccgactatgtattctccggtacagccaacggcggtgtggcgttggatgaaagtgccctgcccgcccccatttcggcctacggccagaccaagctgctgggcgaaacctatgtgcagcagttctgccgccgccactttattgtgcgcacggcttggctgtacagctattacggcaaaaactttgtcaaaactatggtcaacctggccaaaacgcatgacaccctgaatgttgtcaacgaccagctgggcaaccccaccaatgcggtggatctggcctaccatatcttaaagctggcagtcagccatgattacggcatttaccactgcaccggcagcggcatttgcagctggtatgatttcgcatccgagatcatccgcctgtccggcctgccgtgcaccgtaaagcccgttaccagcgcacaatataaagagatgaaccccaaatccgcagaccgcccggcatggagcgcactggaaaaccgcgctctgcggtgcagtgtcggcgatgacatgcgcgactggaaagatgcaattcaggactttttcaataattgggatggtaaataaatgaaaacttatcttgttaccggctgcgccggttttattggctccaactttgtccactatatgctggaaaaataccaggatatccgtctggtcaacctggataagctgacctatgccggcaacctggaaaacctggaagatatcaaggacgatgcccgccatatctttgttaagggcgatatctgcgataaggctcttgtcactgacctgatcgccaaatatgacccggattacgtcatcaactttgctgccgaaagccatgttgaccgcagcatccgcaacccggaaatttttgttgagtccaatgttctgggcaccgttaacctgctgcagtgctgcaaggatgcctggtacgatgccgacgccaagacctggaaggaaggcaaaaagtacctgcaggtttccaccgatgaagtatacggtgccctgggcgccgaaggctactttatggaaacgaccccgctgtgcccgcacagcccgtactccgcttccaaagccagcgccgatatgttcgtgaaagcattccatgatacctatggcatgcccatcaacatcacccgctgctccaacaactatggtccgtatcagttccccgaaaagctgatcccgctgctcatcaacaacgccaagcaccacaagaccctgccggtttacggcgatggcatgcagatccgtgactggctgtatgtcatggaccactgcaaagccattgatatggttgccaacggcggcaaggacggcgaagtttacaatgtcggcggccataacgagcgccccaacatcttcatcgtcaagactgtcatcgagcagctgcatgaccgcctgaaggatgagggcatcagcgaagagctgatcaagcacgtggcggaccgcctgggccatgaccgccgttacggcattgaccccaccaagatcaagaacgatctgggctggtaccccgaaaccccgttcgagaaaggcattgtgctgaccattgactggtacctggcccacgaagagtggatggaccacgtgaccagcggcaactaccagaagtattacgagcagatgtacaaaaacaagtaatgctgccgcacatttgttaaattctgcaaaacaccccgccgccgctttgcaaagcggcggcgtttgtggtatactagttctgctgtttgtgacagcagaacaaagaatagtgaataaagaataaataataatgaaggtgaatcgccgtgcctgcggcacagcttataaaaattgggcgctgcttttggtaagcaatcaagcctaacccggcgtgcggagcctattttaatcatgcgcgcacggcgcgcatgccaccattattctttattattttttaattattattttacttgattgatcttgaggtttttttgaatggcaatttccagagaagaacaactgcgcaataaccgccgcctttcacgccagatcgtgggtgcagtggcaatcgtattgattatcattggtctgtttaccgtattaagctgggtggttggcgtgctgcgcagcgcgttggatgataccgaacgccgccagagctatgccgaccgtctgtacggtcttgtcatgtttgacactatgccgtttgacgatgtgagcaaggtggatcagtcggagtttttacaggctgccatctggggcgccgtgtaccagatccaaaagcgggataacggcttgagcgactatgagcgcgacagcgaaaccggctccatcattctgcccaaactggaagttgacacctacctgaccaacctgcttggcccggactacaagatcaccgatggctctttccagaccgaagagttcaattatacctatgacgaggaaaagcagggctatctggttcctgttaccagcatggtggctatgtataccccggaagtggaaaagatttccacccagagcggcaagacctatgtgacggttggctatatccccaccatcaacaatagctccagcggcgagatcaacctgaccgcccccacggagccgaccaagtatatggactatgtgttcacccgcggcgagggccgtaagtggtatctgagtgcattgcaggaaagcgatatgcagcccgaagtgtctgcttcgaccgcagccccgactaccgattccggtgacccgcaggagttggtgcagaacaacctggattccaccgtggccgataccggcaatcccacaggtgataccgccgacggcaccgctgaaccggacagcacggcggacgaccagaccgatgcccagagcgaacctgaagctgataccggggataccggtggggatgtgcaggatagttcaggtacggaataagctcctgctgacaaaacgataattttgatgaagctgcacagcccaaacgctgtgcagttttttgtatggtagggcggggtcacccgccccccattgaaggcggcccgaccgtacaataaaaatgtgtgatataccttgccccaaagtaggggagcagcgtccccgacaccgcagacaaaccttgcggcaaatctcattatggcagatgtgccaaagctccggaatggtcaagacagctccctacagagcaaggtatcatgtgtaccaaacagaaaaacgaccggtggaacagccagccctctggccgccgcagagaaacgctgccaatgcataaaacatgccgccgcgcagttatactacccctccacaacatcagctcaacaacaaaaatgacaaaacagactgcagaagaccgtgcttttttgcttgacaaaacaagcgcggcgtgataatatgatagctgtacattgctctatgtttttaacgttgaacagatgttaaatacttgtgcaatggcaacacggaaaagtaggagaacatagcatgagacggactttggcagcgccgggccttgcagctgtgctgggtatggcattgctgctgaccgcctgcggtaaaacaaacgcacataacaatacggcaggcgaaacggtcagcacggcactgtttgacttttccattacggatgtcagcctggtggaaagctaccccggcattgatatcccggatggcgaatgcctggtgcgcatgcgcctgaacatcaagaacaccagcagccagacctacacgatgttcctgcaggatttccaaatccagtggggcgagggcgacagcgattacggcacctgcctgaacgcagtggatgataccatgatgccgtatgcttatgagctgacccccggccaggagcgcagcgactggctgatggctgaaatccccgatggcagcaccagctgcaccattgcgtatcaggaatacaagaccgatggcagcaaaggcgatgcctactttgtggaggcagccctgtgagccagcagtcgcgcattcttgcaggggtgttttgctccggtatggcggcggcgttgattgctatggcggcactgcaactgcccaactggctgcagcagcgcaagatggtgagcgagagcccgccggtggtgcagactgcagaaccagagcagacgccggagccgcaggttaccgtggcccccaccgtgcagcccgccgttaccccggaaccgcgggattttaccgcactgctggagcgtaaccccgaagtgatcggctggatcaagatcgatgataccgatgttgacctgccggtgatgcaaagagaaggggacaacagctactacttaaagcacgacctggatggcaactgggatgacctgggcctgccgtacctggattatgagtgcgatatccagcaaagccgccatttgatcctgtacggccacaacatgggcgtgggggatacggtgcggttttccagcctgcaaaattaccgcgagccggaatattatcaggaacacccggtcattgagctggacagcctgaatggtggccagtactacaagatcgtggcagtttatgcaattaccacgcgcgaaagcgatggcgatgtgttccactttaaccagtatgtgaactttgccgatgatgcggcagagcaggaatacctggatgaagtggccaagcgcgcgttttataccacgggcgattatgcccgcgcagacgaacggcttttgacattgtgtacctgtacctatgaaatgtcggatgcccgcctgctgattatggcacgcccgctgcgggacggggaaacgctgacggcggatgaagttatcatcaatccggacccgctgcttccagcccgctggccgactggggcgtaa

SEQ ID NO: 363 - DNA, 5730 bp, unidentified
  source 1..5730: mol_type = unassigned DNA
atgaagaaaatcgttatcgcatccgcatgccgtactgctatcggcaagttcggcggcaccctggccaatgttcctgctgcagagctgggctccatcgtcatcaaggaagccctgaaccgcgccaatgtcaagccggagcaggttgaccacgtttacatgggctgtgttatccaggctggtctgggccagaacgttgcacgccaggcttctctgaaagccggcctgcccatcgagacccccgctgtcaccgtcaacgttgtctgcggctctggcctgaactgtgtgaacatggctgcccagatgatcgaagcaggcgatgctgacatcgttgttgcaggtggtatggaaaacatggatatggctccgttcgctatgatgaagggccgttacggctaccgcatgggctaccccatgggcaagagcgagctggtggacaccatggtcaacgatgctctgtgggatgcaaccggctgcaacatgcacatgggcatgaccgccgagaatgtctgcaccaacgaaacctaccagaagaagtacggctacagccccatcacccgtgagatgctggatgagttctcttaccattctcaggagaaggcagccaaggctatcgctgatggcgctttcaaggatgagatcgttcccgttgtcatcaagggcaagaagggtgacaccgtgtttgataccgatgaaggcccccgcatgagctccatggaagttctgggcaagctgaagccctgcttcaagaaggatggtatcgttaccgctgcaaactcctccgccatcaacgatggcgcagctgctctggttatcatgagcgaagaaaaggccaaggagctgggtgttgagcctctggctacctgggttgccggtgcactggctggtgttgagccggaagtcatgggtctgggccccatcgccgcaaccaagaaggttatggcaaagaccggcctgactgttgatgatatggacctcatcgaagccaacgaagcattcgctgcacagtctgttgcagtcggccaggctctgcactttgaccaggcaaagctgaacgtcaacggcggcgccattgctctgggccatcccgttggtgcttccggcgctcgtatccttgtcaccctgctgtacgccatgaagcatcgcggcgcacacaagggcctggctaccctgtgcatcggcggcggcatgggctgcgccaccatcgtggaaatgtaatttacggaggaattgacaatgtcctttgttacgactgaaattcagggcgctgttgcgatcgtcaccattgaccgtcccaaagccctgaatgcactgaaccccgaagttctggctgacctgaaggccgcttttgaagccatcgaccagaacaccgtgcgctgcgttgttctgaccggtgcaggcgacaagagctttgttgccggtgctgatatcggatccatgtccaccatgaccaaggcagaaggcgaggccttcggtaagctgggcaatgatgtgttcctggagatcgaaagcttcccgctgcccgttatcgcagctgtcaacggctttgcccttggcggcggcaatgagctggccatgagctgcgatatccgcatctgctctgataacgccgtcttcggccagcccgaagttggcctgggcatcacccctggcttcggcggcacccagcgtctggcccgcctggttggcatgggcatggcaaagcagctggtttactctgccctgaacatcaaggcagacgaagccctgcgtatcggcctggtcaacgctgtttacccgcaggctgaattgatggagaacgtgatgaagctggcaaataagattgccaagaatgctcccatcgcagtccgccactgcaagaaggccatcaacgagggtatctccaagcccatcaacgaggctgttgcggttgaagaaaaactgtttggcgattgcttcgaaacccacgaccaggtggaaggcatgcagtgcttcctgagccgtgaaaagccgaaacccaaggcagtgtttaccaacaactgattttgaaagaaaaatgaacaaagagtaatgaataatggtggtggatcacagcgctgcgcgctgttcaaaaaggccgggcgctgtggctgcaccaaagttcattattaaaatcgtaccgcttgcggcataccttcattcttcttttttctctattcattattatttttaacaggaggcacaactatgaaagttggcgttattggcgctggcactatgggccagggtattgctaaggcatttgcacagactgagggcttcactgttgccctgtgtgatatcaagcaggaatgggccgataaaggcaaggataagatcgcagctggctatgcaaagctggttgccaagggcaagctggatcaggctgaagttgaccgccgtatggctgctatcaccgctggcctgaaagaagatctgtgcgctgactgcgacctgatcgttgaggctgcttttgaggatatgaaggtcaagcagaccacctttggcgagctggacaagatctgcaagccggagtgcgtctttgcttccaacacctcttctctgtccatcactgagatcggcaagggcctgacccgtcccctggttggtatgcacttcttcaaccccgctgaccgtatgaagctcatcgaggtcattgcaggcgtgaacacccccgctgagactgttgagaccatcaaaaagatcagcgttgagatcggcaagacccccgttcaggtcaacgaggctgctggctttgttgtcaaccgcatcctgatccccatgatcaacgaagctgctttcatcaagatggaaggcgtttctgacattgccggcatcgacaccgctatgaagttgggtgccaaccatccgatgggccccctggagttgggtgacttcattggtctggatatctgcctggccatcatggacgttctgtacaaggagaccggcgacagcaagtaccgcgcctgcccgctcatccgtaagatggttcgcggcggcaacctgggctgcaagaccggcaagggcttctacgtttacaacgcagaccgcaccaagaccgctgttgatgccctgtaaaatttgaaacaatctctcctgacggagtgcaaaatctccgtcaggattgatttgttcagtcgcctgtaaacctgcccttgcggctttggctgcggggcggcgggcgcactgttagataaggaggataccgttatggattttactctgtccaagcagcaggctatggtacagaaaatgtacaaagaatttgctgagaacgaagtcaaaccccttgccaaaaaggttgacgcggaggaatatttccccaaagagaccgttgaaaagatggcaaagctgggcatgatgggcatttacttccccaaagaggtcggcggcgcaggcggcgatgtgctctcctacgtgatggctgttgaggaaatgagcaaggtttgcggcaccacaggtgttatcctgtccgcccatacctccctgtgtgctgctcctatctatgagaacggcactgcagaccagaaggcaaagtacctgcccaagctgtgcagcggcgaatggctgggtgctttcggcctgactgagcccggcgccggcaccgatgcacagggccagcagaccttcgctgtggatgagggcgaccattggaagctgaacggctccaagatcttcatcaccaacgctggctatgctgatgtcttcattatcattgctgttaccggttttgtgaccgacaagcgcggccgcaagcagaaggaaatctccgcgttcatcgtggagcgcaccgaccccggcttcaaggtcggcaagcccgaagataagatgggcattcgaggttcttccacctgcgagctgatcatggaagactgcatcatccccaaggatcgtctgcttggcgttaagggcaagggcttccagctggctatggctaccctggatggcggtcgtatcggcattgccgcacaggctctgggcatcgcagagggcgcaatcgacgagactgttgcctatgtcaaggagcgcaagcagtttggccgttccatcgctcagttccagaacacccagttcgagctggctgagatgaaagcccgcgttgacgctgccaagtacctggtttacaaggctggcctgaaaaagcagcaggccatgaacggcgctaaggttcgttacagcgttgaggctgccgaggctaagctgattgcagcccgcaccgccagcgatgttacccgccgctgcctgcagctgttcggcggttacggctacacccgtgactaccccatcgagcgcatgatgcgcgatgccaagatcaccgagatctacgaaggcaccagcgaagtgcagatgatggtcatctccggcgcgctgctgaagtaaggaggcaagacgtacaatgaaagctattgtttgtgtcaaacaggttcccgatacacagggcaaggttgctgtcaaggctgacggcaccatggaccgtgctgcgatggcaaccatcaccaaccccgacgacctgaacgccgttgaggctgccctgcagctgaaagatgagaccggctgcgaagttgttgttgttaccatgggcccgccgccggcagaaggcatgcttcgtgagctgatcgcccgcggtgctgaccgcggcgtgctggtatctgcccgtgagttcggcggttccgatacctttgcaacttcccagatcctggcagctgccgttaacaagatcggcgttggcccggaggatatcgttttctgcggccgtcaggctatcgacggcgacactgcacaggttggcccgcagattgctgaaaagctgcacctgccccaggtcacctatgttaccgatatcaagaaggacggcaactccctgatcgtcaagcgccagcttgaagatggctacatggagctgaaggtgaacaccccctgcctgctgacctgcatcaaggagctgaacaccccacgttacatgagcgtttccggtatttttgagtgctatgacaagcccgttgaagtgttcgactacaatgctctgaaggatgatcccctcattgagaccgacaccatcggcctgaagggctccccgacgaacgtttacaagtcttttgctcccccggtcaagggcgccggcatgatggttgaggatgctgcccagctggttggcatcctgaacgacaagcacctgatttgagagaggagagaagtacaatggctgaattcaatgcaatggacaccgccgccttcaagggcgtgtgggtattctgcgaacagcgcgaaggccaggtacaggccatcagctatcagctgctgagtgaaggccgcaagctggccaacgaccttggcgttgagctgtgcggcgttgtgatgggcagcgaggtcaacgaggactacctcaaggctctcggcggctacggcgcagaccgcgtttactatatcgacagccccctgctgaaggactacaccaccgatggctatgccaaggttctgtgtgacctcatcatggagaaaaagccggaaattatgctgattggcgctaccaacctgggccgtgaccttggcccccgctgcgcagcccgcctgcacaccggcctgactgctgactgcacccacttggatgtggatgtcgccaagtataaggacttcctgcgcaccacctccaccattgatgtggacaacaccaagtttgaagaaaacaccaacctgaagatgacccgtcccgcattcggcggccacctgatggcc

SEQ ID NO: 364 - DNA, 7306 bp, unidentified
  source 1..7306: mol_type = unassigned DNA
tgctttgctctaggcatttttcttcctccattattcagaatttggtaccttttgcacggggcaatatgccccacatgggaccggagaaccccataaaggcactattgcttgtatactataatagcaaattccgcccataaagtaaacgcaaaccgctcaacaaacgcaccaaaaataaagaaatttttttagcgcttttgtacgtctttagttcgttaaagtgagcactggcgcggattttccggttttggcctgcctgcttcgccagatcctgtaatttttttcgcaaaaaggggagggaaccctctcagtcacggcttgcgcagcgccgcgctttctcagaaagcggcgctgcaaatgctgctttccgttacgacccctcctgtgaaaaggcaattctggaaaatccgcgtttgtgtagcaatgaaagccccagtggggctttcaagcggcagagcggtctgcgttagcagatggaggggctttgccccgacaagctccgcagattttccagaattgcgaaattataaatattctttccgctgattatgcgcaaagcaaacgcggcgcgcatttcaaatcgtcccatcctcttatatttatcatctctttattgacaacaaacctcattttgccgtaaactgaagccatagaaaaccggtgctgtgccgggcaaagagggtaataaaatggagaagaccgtgcattacgaaaaaacactcaccagtgaggtgctcttcgagggccgggtgatcaccctgacaaaagacactgctctgctggaaaacggcaagaccgccgaacgcgaagtggtgcatcaccacggcggtgcgtgcatcctgccctattttgaggacggcaccatctgcatggtgcgtcagttccgctacgccatgcagcaggagctgtgggagctgcctgccggcaagctggaaaagggtgaggacccctttgaagccgccaagcgggagctgggcgaggagtgcggcctgaccgcggacaattatatctctctgggccagtttttccccaccgtgggctatgacaccgaagtgatctatacatgggtcgctaccggcctgcacaagacccagatgcatctggatgccgatgaattcctgacccctgaccgtgtgccgctggataaagcttatgagatggtcatgagcggcgagatccgggacggcaagaccattgccggtatcctgaagctcaaggccctgatcgccgagggcaggctgtgaacatcctgtacgaagatgccgcccttgtggtgctggacaagcccgccggactttccagcgaagagggcgtgcccgcagccctgcggcagctgtggagccagccggatgcctttgtaggcgtggtgcaccggttggacacgggtgtgtccggcctgatggtgtttgccagaacacccggggctgcggccgcactcagccgtcagatcacccagagtcagaacgcctacgctgtgcaggatggcagggccgaagggaagccggaagtgccgcagttcatcaagcggtatcgggccgtcattgcaggcgggccggacgaagcactgcccgccgaaggcaccctgcgggactggctgttcaaggacagccgccggggccgggtgttcccggtcagccgcccgcgcagaggtgtacgggaagccgtgctggaataccgcatcgtgaaaacggcaggagagatgagccttgctgagatcacgctgcacaccggccgcacccatcagatccgggtgcagtttgcatcccggaagcatccgctggccggagacggcaaatacggaagccgcgtaaaaggcagcattgccctgcagagctgcggcctgcagtttttgcacccggagaccggaaagcccatggcattcacgctgccgctgccggagggtgcgttctggaaaccgtttgaaggataatgcatttccattaggtgagaggtatggaacaatacaaaactgatgctgagatctatgctgtgctggagcgggaaatcattgacctgaccatccgccccggctcttcgctgagcgaaaatccgctctgtgcccgctttggcgcaccgcgcaccctgatccgggtggtgctgcagaagctgcaggaaaacgggctggtaaagatcgtgccttacaagggcaccaccgttacccggctgaaccgccgcatcgtggacgagctgatctacgagcgcaccgccgtggaagcccgcgtattgcgggatttttcgccccggtgcaccccggagcagcgggcgttgatccgcaggcgggtggaagcctacgaggcccttgcggccatggagagcccggattacaacaagctgtacgaagccgaccgtgccctgcacgggacatggtttgccgccatggataaaatgtacctgtggagcaccctgcagaacgcccacgccgactacagccgcttccggatgctggacaccatgaccaccggcggccttgccgaggtgatcgcagaccaccgcaacctgatgaacgccatcgagcggtgcgacctttccgcctttgaaccgttggtggaacggcacctgtacggcggcatccggcggcttggctccaagctgaccgaggaatatgccgattattttgagccggaaaagtaattgttctatgtggaacattttataaaacgaaagggcacagcgcattgcagcgccgtgcccttttgttttatgctgtctgaatttcagaacaccccggaaataaaaatttccagaccaatgccaatgaggatgatgccgcccagaatggatgccttgccggagagcttggtgccaaactttttgccgatgcgcaggcccgccatgcagataaagaaggtgaccaccgcaatgatgagcgatgccgcaagtgccatcagccagccgtattccgaaatggtgaagcccaccgaaagcgcatcaatgctggtagccacgccctgcatgagcagtgcacccgcactcagctctgctgcttcttcggcctcttcgcccttgatgccatccaccagcattttgccgccaatatagcccagcagagccagcgcgatccacgggatgaacttttcaaacgaagagaacagctccacaatggtgtgcacgcacacccagcctgtcatgggcatcacggcctgaaaaagggcaaaggtgcccgcgatcctgcacatggttttcctgctcatgcgggggtcgtgcaggccgtttgccatggacaccgagaacgcatccattgcaaggcccacgcccagcagggcactgttgaggaaaaatacaaagctccattccatattgtctgcctcctgaatctgaccagaatatcgggcaatacaaaacccggtctcgggcgcacatgtacgtccgggaccgggtgattttttgaaaccaactccatgtgcacgggcgctgttctatgcgccaaaaacacatgagtctcgcaaatgaaagcaagccagaccggaaccaacggtcatcatgttgacttgctgcgctctgcaaaagcgcctgctactcccccacggatatttgtgattgttttgccattgtagcatatctttgcagggaagtccagacaaacctgcgcggttacacggtatttttccatcggcgggcaaaataccagtcctgtgaaataataaaacacagggtgttgcccagtgctctcagggtaacagcatgttcctgacgcaaggcccggcgggcgcagcgctcgtactcccgcgcctgctgcatccgggcactccggcgctcttcggcggtcaggtgcattcccacatcgatcagggagtgcagcagtgcccagtacagctcacacagcgagcccgtgatgccatggcggcgtacgcactcaaacacggtatagtttgcttccacacgatcgagattgcgcagggtgactttgctgttgacgatgctgcccgccaccttgcggtaaaggtacagcgcatccgggatattcgcgattctgtccgctttttcgtaggcgtaggcgatcagcagggtgtcctcgttcagcttgccctctgcaaagcgcagctgcgcaaaaatgctgcggtggtacagcttgttccacaccaccatgtagggcagaagggtgctgtgctccaacgcctgctccggggtcagcacctcccgccgcacatgcaaatactgctcccggatgggggtcagggcttcgtccacctgccggtaattgcacacggccatctgtgcaccggcctcctgcgccgcatggtaaagctttgcgcagaagtccggcatgatggtgtcgtctgaatccacaaaggcgatccattcgccctctgccgcgtccagcccggcattgcgtgccacgctcaggccacgattcttctggtggatgacccggatgcggctgtcctttgccgctgcggcatcacacaaagcagggcagctgtccggagagccatcgtccaccaggatcagctcaaaatccgtgaaggtctgggcaaggatggaagagatgcaggcgctcagaaaacgctctgtcttatataccggcacgatgatgctgatctccggctgttttttatgttgttcctgcacaataaactcctcattgcttcaggtcgttttctgccgtctttccgcccttttgcggcatagatccagataactgcaggccgatgcagcgcagaccactgccgcccacaaattttttagtgttacgccgcgggcttgcatcagccgatggcgggctgtacgctcatacgcaaaggcttccttcatccgggggcttttgcgctcttccggtgtcaggtgcagccagatgtcccacacggcagtcaaaatcgggcgataggctgcacacaaagcatctcggatgccgttttggtacagcacatcaaacaggcggtaccatgcttccacccagtccagtgttttcaaggtagtcttgcggtgcatggcactgccggtaacgatgcggtaattgtataaaaaatcccatacaccgcaggcagaagccgctcttgcgtaaatgaccggcatgagacaggtatcttcaaacgccttgttttctggatagcgcagattttccagcagttttcggcgataaagcttattccacggaacctgaaaatccgacaccaccatccggcgcagaacttcctcctgcggcaaaaactcgttcaaaaggcgatgttctccgcctgcaagcgttttgcccgtttcatcaatgcactgactgctgcagattgcaaaatctgcacccgtttccagcactgccttatgcattttttccagatattctggtgctgctgtatcatccgaatccacaaatgcgatccaatttccctgtgctgcatccagacccgcattgcgggctgtgcttacaccgccgttttgcttatggatcacccgcacgcggctgtccctttttgctgctgcatcgcacagggcagggcagttgtccggtgagccatcgtccacaaggatcagttcaaaatccgtaaaggtctgagcgaggatggaatcaatgcactcattcagatatttttccacctgatacactggcacgatgatgctgatctccggttttccactttctgttctttcactcacagtattttccttccgctgtcatgccccatatttatacgcaaagaaccattttggattcaggatgcacaaagcagtttccagttgattacgcagcgtgaaaccgcctgcgcggctcaactcgtcctttgcttttgccacacaggcggcagcctgctgcacctgttcgcttttgcgttcttcctgtgacagttttctcttgagtttacggaagatgcgctttgtaactgtatactgcaggcaggcttcatcatattttcggtatttcattgtatactgaaacagcgcatagtttgcatggacttcttccagatttttcagggttacagccgcgtgcataatgcttcccgaacgcagccgatattgataaagaggctccgccacacaagctgctttatttacccgttccaaaatttccggtgcagtgaatgcatcttcataattttttccttctggaaaacgaattttctcaaatacttcgcggcggcacagtcgtgtcattaccatatagaacggtgacagctggatacggtgaacgatttcttctcttgagagaacttcgtcttttaaacaatgttcctgataactgtccagtgctttattttctttcatgcgcagaatattgcacacagccatttccgccccagcctgcactgcagcatgaagcattttttcacagaaggtagggtcgatcatatcatctgaatccacaaagccaagccaatttccccgtgcaacattgattccggcatttcttgccccgctcagccccttattctgctggtggatcacccgcacgcggctgtctttttctgccgcagcatcacacagggcagggcagttgtccggggagccatcgtccacaaggatcagctcaaaatccgtaaaggtctgtgccagaatggaatcaatgcattcgttcaggtatttttccaccttatacaccggcacgatgatgctgatctccggggattttttttgctctgtcatgttccttaaaccactttctgtgtttatttttattcctcacacgctatttctattatacatggtttggatggatttgaaaagaagccgccgtgcagaaatccttgcgcggcggcttctttcaaatcttattgtgttttcaaggtttactcttcgcccttatcgtctgcttccggggcttctgcagcggcggcagcatctgcagcttccatggcggcaagctgctcggcagtcggctctgcatcagcatcggaggtgtcgatctgctcggtctgggcctcgtcgtcgtggtcggtgcgggcaagtaccatcaccttgtcgttctcacccaagcgcatcacccgcacgccggaaccgtagcggctctgcagcgggatctcgttggcgtgcaggcggatgatgatgccctcctgactgctcagcagcacatcgtccacgtcgtccacgatcttgaccgcagccaccttatccttggcggcatcgtagttgcggatgcccttgccgccgcgggcggtgatgcggtaggtgtcgatatccgaccggcggcccttgccgttctcggtgacggtgagcaccgtgccgccctcgcggcagatgcacacacccacaacttcatcgccctcggccagacggatggcgcgcacgccgtggccgctgcggcccatgggacgtgcatcggcttcgttgaagcggatggcctgaccgttgcgggtggcaacgatgagcatatcgtggc

SEQ ID NO: 365 - DNA, 13289 bp, unidentified
  source 1..13289: mol_type = unassigned DNA
agaagccaatttggtttcaacaacgcggttcaccaaaccttccacactttctttcttcttcagcatttcctttgcatagttttccagaagatcttcgggaacgctcatcataccatattgtgcaaactgagcacgagtagcttccttagccatattgaccacatcttcctgttcaactttaatattatttgccttcaccaactgttccttgatcaggtgccatgtcagttcttcaatgctcttatcatagttgtcatcaacgaacttttcgtctttatcctggttgttcatgcgcatgatgcgtttcagcaatgcatccgggaattccagtttaccaaccttttccatcaacatcttacgaacatcaatcaggaatttataatcgctgtctgctacgaactgattggcaattacttcttttattttagcgcggaattcttcttcagtcttcactacgtctttaccacatacctggtcaaagatttcctgagtcagttctccttctacgaaacgagtaacctcttctacctgatagctgaagttagacttcatttcagcagcctcttccttgtcaatcttcaacagagaagacagttcggcagcattaccttcccatgcagtgtgaggattgaatacaagtacatcgtttacctttgcattggcgaaaatagctttttgctcatcgttcttcatataagacggcatcattacagcaccttctacttggataccaccttctttggtattgccgttttcgtccaactcagccaacagacctttcagcatatccttatcttcgtaaacgtctactttctcgtacttaccgttacgttgtgtataagctttcacctgattgtttaccatatcttcggtaacgtcaatcaaatagtagtctactttatctttagcgtctacttcagccttgaattcaggtgccaaagcaatatcaaacaggaattcgaattcttccatagtatcgaagtcgatctccggttgcttgtcttcgtttggcaacggttcgccgaggatagatacattattatcttgaatatacttatatacagcttctgaaagtgccttgttcacttcttcggcaataacagatttaccatacattttcttcaccaagctcatcggaaccatacccggacggaaccccggaacttgagctttctgacgaagacttttcaatgatttatcaactttttcctgataatcggctttctcaagctttacagtaagcagagcgcttactttgtcaatgttttgtaatgaaacgttcattctgacaattatttatttgatttatactttattccaatctcaaatgagggtgcaaaattagcgttattctttcaattatcaaaaaaacatagctgaattatttctttataacaaaaggagagaatacttaccattgaatgatacctctatcattaaaaagaaaagtctgcgccccataaacaacaaattgttatttcataaggcatttatctatagattcgaaagaaaaagcaaaaaaaatagaagagaaatattgttaattcgaaatatttcagtttctttgttgcggaatggtaatgcgttagtttttagattttcagtacatggtttttacttccgtttttatttaaacgcttttgtaaactctctgttgttgtgatcattttattatagttactgttccaagagagttttattcatttatttattttacattttcattatgaacatttacgtaggaaaccttaactacaaagttagggaatcagatctgcaaaaggtcatggaagattacggtgctgtaaccgcagtcaaatttatcaaagatcgcgaaaccggtcgtttcagaggcattgcatttgtagaaatggaagatgcagcagctgcagctaaagcgattgaagaactcgacggagctgaatatttcggccgcaacatggtagttaaagaagcaagacctccgaaatactaatataaaggagaaagaaaacaagaccgcctgctcactcttggaaaagagagcaggcggtctttgttttaccactatcattatttcataaaatccttgcgacgaagcacaaagctattactcagatacttttcacgtacaattttgttttccgccaactcttccggcgttccctggaacaagattttcccttcgaacaacagataagcacggtcggtaatacttaatgtttcctgcacgttatggtcagtaatcaggataccgatattcttatcctttaatttccatacgatttgctgaatatcttctacagcaatcgggtcaactcctgcaaaaggttcgtcgagcatgataaacttagggtcgatagcaagacaacgggcaatctctgtacgacggcgctcaccacccgaaagttggttacctttatttttacgcaccttctgcaaacggaattccgcaatcaggttttccagtttttccttctgatattccagaggtttatccgtcatttccagtacagaagcaatattatcttccacactcatctggcgaaatacagatgcttcctgcgccaaatatccgataccggtttgcgcacgcttatacaccggatatttcgtaatatccaggtcatccagaaaaatacgtccctcattcggcgtaatcagtcccacggtcatatagaatgaagtcgtcttaccggcaccgttcggtcccagtaaaccaacaatttctccctgcttcacatctatggaaacatggcttactactgtacgtttaccgtactttttcaccaggtcctcagtgcgaagcaccattttgctttcttccatacttgcgttattttgccgcaaatgtagcaattatcagctgaaaatgggctatatttgcagacaaaatagttaagagtcatgataaaagcacttaaaactgtcggaagatacatcatgttgatggggcgtacttttgcccgcccggagcgtatgcgcatgttcttccgccaatacctcaatgagatggggcaactcggcgtgaactctatcggcattgtcttgctgatttcgttcttcatcggcgctgttatcaccatacaaatcaaactgaacatcgagagcccttttatgccacgttggacagtaggttatgtgacacgtgaaattatgttgctggaattctcttcctccatcatgtgtctgatattagcaggaaaagtaggttccaatattgcctctgagctgggaaccatgcgagtaacccagcaaatcgatgcattggaaatcatgggagtcaattcagctaattacctgatccttcccaagatttgcgccatggtgactaccattcctttcttggtaacgttcagtatctttgccggcatcatcggagcctttgccacgtgttggttcggtggcatcatgtcggcggtagacttggaatacggtttgcaatatatgtttgtagaatggtttatctggtgtggcatcatcaaatcattgttcttcgctttcatcatcgccagtgtatcggcctttttcggttataccgtcgagggcggttctatagaggtgggcaaggcctctacagactccgtggtatgcagcagcgtacttatcttatttgccgacttaatattaactaaactcttaatgggatgatcgaactgaaaggactttggaaatcatttgaaggcagagatgtattaaaggatatcaatgccacttttgaaaatgggaaaactaatctcatcatcggacagagtggttcgggaaaaaccgtattgatgaagtgtatcgttggattgctcacaccggaacggggtgaattattatacgacaaccgtaatttccttgccatgggcaagaatgaaaagaaagcattgcgccgcgaaatgggaatgatattccaaagtgcggcattgtttgactccatgacggtgctggacaatgtaatgtttcctttgaacatgttcagcaacgatacattccgcgaccgtacccgccgtgccatgttctgtctggatcgcgtaaacctggcagaagcaaaagataaatttccaggtgaaatcagtggtggtatgcaaaaacgtgttgccatagcccgcgccattgccttaaatccgcaatacttgttctgtgacgaaccgaactccggattagacccaaagacctcattggtaatcgacgaactggtacacgatatcacccatgaatacaatatgaccaccctcatcaacacccacgacatgaactctgtaatgggtatcggtgaaaaaattatctatatctacgacggatacaaggagtgggaaggcagtaaagacgacatcttcacttccagcaacaagaaactcaacgattttatttttgcatccgacctcttccggaaggtaaaggaagtggaagtgcagaatatagaaggataagattaaaaaaattagcaatctcctataaatagggcgtccggaaaaacatccggacgcccttttcctcataaaaccagttaatagaattgacatatatcctcacgatatactttgattgcccttatatcttcatgagaaaacatgaagaacaacttcaattacggcaacaaagataaccaaaagatactaataaaaaatcacggaaaaccgttacactctgaattttccgcaaatcatttcagcgcaatccatccttgcgcaacagccttgactaccatatctatagcattctttgctccaaacttgctaataagccttttacgaaatgtttccacagtgttctctgaaattttcaataaatcagcaatttcatgggtattcattcctttagccacagcctccaacacatcacgctcccgacgggtaggcgcatccttaggctgcaaacctgctgatgcagaattcagtttctgcgagatagcagcaaaccgtggacaagcatgcgcttctcctctcaacacacaacgaatagctgtcattaactccgcagaggccgaagatttcagaataacagcattcactccgcactgtaccaacctgttaactatccatatttcttcgtgcattgtattcacaataatctttgcctggtcattcatttcacggattttagcaatcaactcaaatccggacatatcaggaatactgacatccaggatatatatatcataatctcgtctttcaatcaattctgcagcttgcaatccggaagttacagcatccaccacaactacttccggcatcttattcaccactttacaaataccttccagaatcagattatgatcatccactaccaataattctgccttcacattcttttccattgttcgattagattaatacgttaattttcaaacgggttcccttaccaggagaagagaccagttcaacttcagcacctacggtttccgctcgctgccagatagtccgtaagccgatacccttagttttcttgctcatatcaaacccttttccgtcgtctgctacaagtatggaaaggtcattattttccagaactaactctacctgtatacaggttgagccggcatattttactgcattgctcactgcttcctgaacaatgcgataacattcaaaactgattgatttaggcactacattccaatctacacctaccgtagaatgatattccgcatgcgtaccttctggcaatgataagtgcaaaacatagtcagcaagcagttcatcgagtgtagcatactggaaaaccggtggcatcagttcatgggaaagttttctcaacctttccctggtattattcaataaatccagctgcttatccagatcagctccttcttcagtagaaatagtacgaatattcatttcaagtgcaagcaaattattacatacatcatcatgcaattcagttgccatacgctcccgttcactctccaaaccatcaatgtattttcgtgttaagcgctgttctgtttctttctggagctccaggaattcacgctctttttcacaagctgcatttgccagcaaagcaatccttgcccgctgacgttggcgtgcataaagtgagcccagcaacaaaattcccagtaaagagatcaccgaacctacaataatacggtgacgtaacatatacgtctcctgttccaactgttcacgcctcagacttacaatctccaactccttctctttggtccggtacttcacagaatattcggacaactggtcagtctcttccgtctggaacacagaatcacgaagtgcataagcctgcgtcatataattataagccaaagacagattattcacagccagataacattccgataatttcctgtaatgctcataatcacgtgcatctttatatccactacggagcatatcaactatcttgcgataataaacaatagcatccgcatagttcttactttcctgcaacaatgcagcttttgcctggtaatacttgaaacgctctatatcagtctgcatctcatgcgccaatttatccaacttctgcaagtactgcattgccatatccagatttccatccaaccggtaggcatttaccaaataattataagcattacatagctgccttctgtcattcacctgctccaaaaaaggaatagctttcagtaacgtgtcaatgccctctgtacgcattttctccattcgtaccaagatggcacccaaattaacatagcacgtacctatcctccgtttattatctgtcttcaaagcatatttcaaagctttttcggagaaggaaatagcatcttccggtcgatcccagtcacaataagccgtcgctatatttccatatataaaagcgaccgtgttgtaatttccacacaattcacacaaatggagcgcttcttcaaagttagcgatacaatcctccagattctttttccgacgatagatagtgcccaactgattcaggttttcaatcaacatagctgtatctttatcggcagcagagcgctcactggcacgaatggtataaactaaagccgaatcggtctgtccctcaaaaagaaaagaactggcataattcgtcaatatggtgcggcatgcctcctcagcacccggcaaaccttcaccggctaccaaccctttatgaaaataataacgtgcagagtcatagcaggcatccgcattacaataatatcccatatcacagcaagcctgggctattgtaaacctcaatccagccttttcagccaagtcaatggctttccgtttcaaagcgtacccctgctcgaagtcgcctttaatgaagtaaccttcacttagccagatgtagtattcgataaatatttccggctttccactgtctatggccagttgatgaatggaatcagcgtatgaaagaagtaaatcaggatcttcttctgtctgataaaggagtttacagaccttgacatagctatccaggtttctgttttgggctgcctcttgttgtaatgcgcgtaaatccgacttgtcctctgcccacagcacacctatggagaggagcaagcagcatcccaatacccacctgtaacgtttcatctaatccttttttatgttgtcagagcaaaaataaatattatatttatattaacctattttttatttacattttcctaataagcaacaaaaaaaccgcctgatttataactaaatcgggcggtttcataccaatatctcagtaatcgatttatctacttctgacggatataaatatttatcggagttcctgtcaggttccacttttcacgcatcttgttttccaggaaacgtttatatggctctttcacgtactgcggcagattagcgaagtaaacaaaagaaggcacctgtgtattcggcaactgcgtaatatatttaatcttgatatacttgcctttggttgcaggaggcggatatgcctcaatcagcggcagcatttcctcgtttaagcgggcagtcggaatacgcgtcatacggttgtcatatacactgcgtgcttcctccagcaccttcaggatacgttgtttggtcaatgccgaaccgaagatgatagggaagtcaacgaatggagcaaagcggctacggatcgcatcttcaaaagtcttcatcactttcacagtcttatcctgtaccaaatcccacttattcactactaccaccagacctttggcattcttctgtatcagtgagaatatattcaagtcctggctttcaacaccacgtgtagcatccaacatcagaatacacacatccgcattctcaatggaacggatggaacgaatcacagaataatattccagatcctcattcaccttattctttttacggataccagcagtatctaccagatagaaatcaaatccaaacttattataacgggtatagatagagtcacgtgttgtaccggcaatctccgttacaatgttccgttcttctccgataaaggcattcacgatagaagatttaccagcattcgggcgtcccaccacagcaaagcggggaatatcctcatctagaatctcatccgtatcctttttaaatgtacccacaatcaagtccatcatatcccccgtaccgctacccgtcatagccgagatgcagtaaggatcacccagacccaacttataaaattcgggagcattgtattgtaattccccgttatcagtcttattggcaatcagcaacaccggcttttgagtccggcgcaaaatggctgctacctgcatatcgagatcagttaccccattcatcacatctactacaaacaatataacgtctgcttcatccacagccatcagtacctgcttgcgtatttcctcttcaaagatatcgtcagagttcaccacccatcctccggtatctaccacggagaattctttccccaaccattcggacttaccatactggcgatctcgtgttgttcctgcttcttcgttcacaatagcttgacgtgttttggtcaagcggttaaataaagtagactttcccacattagggcgtcctacgattgcaactaaatttcccatagttcactcttcttgtttttgcgactatcacagtcgtatgaatactctaatccagttgataaccaaaattgcgcaactctttatccgaactacgccaatccttatccaccttcacaaatgtctccaggaaaattgtttttccgaagaacctctctaaatcacggcgtgcttcagtggctacctttttcagcgctttaccttgcttgccgataataattcctttctgcgaatcgcgctccacataaatcacagcactgatatgtatcttcttcgcatcctccttaaactgttccaccactacctctaccgaataaggtatctccttgtcgtagtacaacaaaattttctcccggataatctcgtttacaaagaaacgggccggcttgtccgtccactggtccttatcgaagtaaggcggtgaatcgggcaacagttctttcacccgcttcatcacatagtctacattgaactttgtcgttgcagaaatcggaataatctccgcattgggcaataatgctttccaagcttccacaagttccacaagtttctcctggttcgacaaatcaatcttgttgataaggagcaacactggtatttccatgtgtgccaccttctccacaaactcattatgcttatcgggtgtctcaaccacatctgttacatatagcaaaacatccgcatctgtcagagccgaagtagagaaattcagcatagactcctgcaacttatactgcggcttcagcactcccggagtatccgagaatacaatctgcatatcatccgtattatagattcccataatgcggtgacgggtcgtctgcgccttgaaagtagcaatcgaaatccgctcgcccaccaaggcgttcatcaatgtagatttacccacattcggatttcccacgatgtttacaaaaccagctttatgcatcacattcctgtattttagttgagacaaaaaaacgcatcgaatcgaagtaggatgcgtttttttttagtttatatgtttagtaaccgtaattcgtaatccatgtgattatacagttaccctttctttccgtcgtatccccacttcacgtaaacggctccccaggtaaaccctgcaccgaatgctgtaaagatcaggttatcgccttttttaagtttatcctcaaagtcccacagacagagcggaagcgtaccggcacttgtattaccataatgctcgatattaatcattactttctcatggggaagttccaagcgatgagctactgcatcgataatacgcagattggcctggtgaggaataatccagtcgatattctctttggtgagattgtttcgttctgcaatggcagcgcaagcatccgacatgttcgatacggcatatttgaatactgtacggccttcctgatagatgaagtgcatatggttatccactgtaaaataagaaggagggcatacagaaccacctgctttcatatgcaagaaaggtaatcccttaccatcagttctcaagatagcatccatgacgcctacatcttccgtagtaggttccatcataaccgcagctgcaccatcaccgaaaatcgggcaagtagcacgttctgtgtaatctaccatagacgacattttatcggcgcccactaaaatgatcttcttatatcttcccgaacggataaagttagctccagtttccaacagaaacagaaaaccgctgcaagcagcctgcaagtcaaaagcaaaagcatgttttaatccaagcttatcacataagatagaagctgtagaagggaagtgataatcaggagtagtagtagctacaatcaccagatcgatatcatcaggatcagaaccagtacgctgcatcaactgctttgcagccttgcgagccatgtacgaagtacccagtccttcttcgttcaggatatgtctttcctttactccgatacgggtcataatccattcgtcattggtatccaccattcttgatatctcttcattcgtcaagacataatcgggtacatatccgccgactcctgtaattactgcatttattttttccattaatcctgcttaaagttaatgaatacctaaacaacggtagtctaaaaaggtttgtgtgttacaaatctttttagacatccggcattcaagtatattcttcatcaggctgcaaattaaacagcagcttctttctcgatagcaagcttgcctctgtaatatccgcaagcaccacacacagtgtgatatacatgccattcgccacagttcgggcaaatagccaatgtaggagctactgctttatcatgagttcttctctttgcagttcttgttttagactgtcttctcttaggatgtgccatttttcttaatctttaattgttatctaatattttctttaattcattccaacgcggatcaatctgtgtttcctccgcatcactctccggcattgcgtcttcaccttcgataaagatttcatcttccgcatcatcttcatctgcttttgtacgcagatgcttatgcaatttgctgctgacggccttattgcattttccgggagcatgtacatgcttcatcgggattgccaacgcaacaaattcatacatgaaccatgccacattgatttccccttcttcttcagggatcacaatgaggttatcaccttcttcagcatactcatgtccaaactttaccatcagtttatctgtagaactaaccggctgttccatatcgtccaggcagcggtcacatggcacccacaccataccctccgtctggaagttgaattcgaaagcacgagatgttttctttacaaccaatgtaacattaactttgcccttctgtacttccgggccatcaatgttagcgaaaaaaaggttatccagtacaaactcatacttacaagagtctgcctgcatgcctttcaaatctattttgtatttatcaaactttcccaaagcttcttttatttattcgggcgacaaagatacaaataattatcctcataatgtataaattagccacgaaatattcattttttaagctctattctgaatatcgtccctttattgatctccgattgctttacaaaaatacgccccgaatgatattccaccacaatccggcgtgccaatgacaagcccagtccccaccctctttttttggtggtataaccgggagcaaacactgtttcaaaattccgtttgtcaattccctttcccgtatcagccacatcaatatgccaaaatcttgacgtttcctgtactgaaatagtcagagttccaactcctcccattgcatcaatcgcattcttacacaggttctctatcacccattcaaacaaagcaacattcagccttacaggcggaagtaaatcaggcaaatgggtaatgatcttcaccttgtccgaagtacgatgggcaatataatccgtcacccgttccaacagagctttcaagtccgcctcttccaactccggaacagaacctatcttcgagaaacgattggcaatcatctgcaagcgctccacatcttccgccatggcaggaatcagatcatcctgaggatattgcgtcttcaacagttctgtccatgccattaatgaagaaataggggttcccaactgatgggctgtttctttagataatcccacccataccttattttgttctgcttttttagagctcaacagagcaaaaatagcaatcaaaacaaagataagtaccactgccaactgtacataaggataaacagccagccgggttagcatcagggaagggccataatacacattcagatagtcaccaccaccattcaagtcaatacggatgcagttcccttcatggctgaagtgattcagtttttctttcagcgaagcaattgtatcggttggagatagttcaatattcctgtaagtctgtacatcttcattctgatccactacaattaccggaatcgtatgattggcattcaggactttcagtaccatagtcaaatccgtatttccatcagcggtttggagattcttcattgcttcggcccacacttccatacgtacccgttcttcagcagataaatcgcttatcagagaatgggaaacatacagggaagagatagctataatcacagcaatcaatatcaaccagaactttataggacggatttgctttagcatatataaataaggtgtaaacttacagcatataaacgaaaaaacaaagagaatattatctggacagggggtataaatacaaaaagcccccatatcactcgatatggaggctttcctctaaaaacggcaactacctactctcccacttgacgcagtaccatcggcgtgatcagg

SEQ ID NO: 366 - DNA, 9120 bp, unidentified
  source 1..9120: mol_type = unassigned DNA
ctaattcttatattctttgcttatgactttgcagataacataaagtctctgatctgaaagacccatatagccattgttccagcaagtgtagagtatcagatcatctacaggcggatctgcggtcacatcataatacaaaagggaagtatctgtatctggaagtaccttagtttctgtgacctcataagtgaatttgccataatccgtttttagtataactcgatcacccactagaacattaggtaaatatctgaaataagtgtggttatgtgccgcaaggacaactctgcctgtagcacctatatatgcagaatagttagattgcacaactccttttgctaggagatcatcagagtctccccagtaaacaggctctttgtcaatgcctgccctatcattctttacggtcagctcggcatatttgtcaccgtaatacggatagattatctcatgctgttccgtctttttttcagaatcaggcactgtgacctctgtcaattctttcataggcagtgcgtctgtatttctgtatttgttatcctcagagggatttttcaaatgtgcattttcattgaatgctatcgatgcgtatccttgcagttctatgaattttttatagcttgccagcgtcatgatagacaaacaaagagccaaaactaaaagaggcgtcaagaccattacagccactgacgtcctcttattttttttcagtttgtttgcgtcagccgaggaagctttatcctcttttctgaccatatcttagcactctttgttcttcttaacagctactgtaataccaaatgcactaagagcaagtgtaagaacagcagcaacctgaacagctgtcatgctgtttgcaccagtattaagtgaaccgctgcctgtgtttgttccaatgtttgtattgccatctgaatcaacgacctgaacgttccaatccttgcttgtaagctcatctaccttgatagtaacaccaaagtgtttacctgtagctacgcaagcatcagcaatagcctttctgctatcctcgcccatttccttaaacacctgtctaagctgatcgtttgttagtgaagcaagatctgttcctgcaccaaaaagcttgtcagcaacaggctgaacatatgtagcaccacaatcagagagagcctttaccatgtaatcatagtcagcagagctgaactttgaagcgtgagaatcaaggtagttcttaagctctgatacatggttagaaggaacacctgctgatttagctgcagaaacaacatcagcagaagaagctgctgatgcgctcacaaccattgttgaagcaatgatgaacgcagtaacagaagccgaaattgacttaaatatctttttcataacacctatcacctttcgtaataatttcgtataacaatattatacactattaaaattcgattgtcaatatttttattggtatttttttcagaaaaaagcaaatgtttttacgataatttgaaatagttatgtataagtgcgtatatgcgctatttcatgtaattgtatattgctggaaaatacaaaagattttcagcattctcaaataaaagacttataacattactgtattggtgcttttatgatttttgtcaaagctgatctcaaagcatttagatataatttctacattatttattataattatacgccttgacacgatatcatgccatggtgtataattcttgtgtatgatataattgatataatgtgcaaggaggatatatgaaaaattatctcaatgaaagcctttcggctcaggaaagagctgaagcacttgtaaatgaaatgaccgtagaggaggcggcttcacagcttagatatgacgctcctgctgttgagcggctcggcattcctgcctataactggtggaatgagggtatccatgggcttgcacgaagcggtgttgccaccatgtttccacaggcaataggtcttgcggctatgtttgacaccgaccttgtgttcaaagtggcagatataacctctacagaagctcgtgccaagtataatgagtattcaaagcgtgatgacagggatatatacaaaggtcttaccctttgggcacctaatataaatatattcagagatccacgctggggcagaggtcatgagacttacggtgaagacccttatcttaccgcagagtgcggcaaggcatatgtaaaaggcttgcagggcagtggcaaggtactgaaaactgccgcttgtgcaaagcactttgcagtacatagcggacctgaggctgttcgccatgaatttaatgcagaggttaattggaaagaccttgaagagacctatctttatgcctttgaggagcttgtgaaaaaagcaaaggtcgagggtgtaatgggtgcgtataatcgtgtgaatggcgagccgtcatgtgctagtgagtttctaatgggcaagctcgacaaatggggttttgatggctattttgtttctgattgctgggcaataagggatttccacgaacaccatatggtgacgtcttctcctgtagagtcggccgcaatggcacttaaagcaggctgtaatgtgaactgcggttgtacgtatgtacacctgctttctgctcttgacaaggggcttgtgacagaagatgaaatccgagcttcctgtgttgctcttatgagaactcgcataagacttggcatgtttgacaagtcaacggaatatgacaacataccatacagcgttgtttcctgccctgagcataaagctgtatcttaccagtgtgcagtgaagtccatggtgttgctcaagaacaagggtattcttccgcttgacaaaaaatcaatatcaactattgctgtaataggaccaaatgcggacagcagagcggctctcgagggcaattataacggcacagccgacaggtatgttactttccttgagggtatcgaggacgcatttgatggcagggtgctttatgctgaaggctgtcacttgtataaggacagagtatcgggtcttgcacaggcaggagatagatacgccgaagctgaggcggcagcggcaaattctgatgttgtgatactttgcgttggtcttgatgccactattgagggcgaggagggcgacacaggtaatgagttttcatcaggtgacaagaacgatctaagacttcctgaaagtcagcgtgagcttataaagcgtgtcgcaaagatcggcaagcctatgatagtggtatgtgcggcaggaagctcaataaatatcgagcatgattgtgacgctcttatccacgcatggtatccgggttcagagggcggcaaggctattgcggatattatttttggtaaagtgtcgccatcaggaaaactgcctgttacattctataatagtgccgacaagctaccttgctttactgattatgctatgtctgatagaacatataggtacactagagataacattctttatccattcggctatggtcttacttatggagatgttgttgttacatcgcttagttatgacgatggcaaagtcaatgtagaggtagaaaataacggtgccgatacatgtgatgttatcgaactttacattaaatcacattgtgataatgctccggcttatcctgtgctgtgcggcttcaagaggatttttgtcaaaaaaggtgaaaagcttgatgttgaaatcgaaatacctgacaaagctttcacaacagtgtcagatatcggcgagagaaaacagtttgcaaaggaattcaccctctatgttggtacgcatcagcctgatgaacttagttgtcagcttagtggtacaaactgtatgagtatcgagatagaacgataatgaaaagagatcttacaaacggcagtatcataagcttgcttcttgctttttcaagcccgatgatactgtgaaatctgctccagcaggtgtataaaattgccgacacatttattgttggcagatctcttggcgaaaatgcccttgcggctgtgggcggcacatacaccctcacgacttttctttattcgatcataataggtctgtgcatgggctgtggctcgcttgtttcttattgtttcggtgaaagaaacgaacaccgtctgaaaggctgtctgaacatatcatttctgatgataggctctgttactttggtggcagagcctatcacattgtgcttttccgatgagattttgaaacttttgcatactccaatgaaaataatgttgttgacatctgatcatgttagaattatcctggcaggtgtgggactttgtttttacactctcgccaaagaacctcttttgcgactatccttcaagaaaaaatcttggaaggattgcagttttggtgaagtggtgcgaatgccgaccgctgcctcagttcagcaatctgtcatgaatttcggcatacttatgatacaaggactggtaaatagttttggaacggctgtaatggcggcttttacagtagccgttcataattgttaaattaagctgtcagcttatatgattttccaacaaatacttggctgattttgtttatcttattgtatgttataacaaaaaaccaaatttttgttgaaatacaaaaaaacgtatcgtttaaagttgactttttgaatagaatgtgataaaattattattgtacagtttattttttggaaaaataacgaaattatcaacaatagggtgaataatacaaatgaaaaaaaattacactatcaaggatcttctggtacttcttctcggaaaggtttggtatatcgttgccgcttcaatagtgtgtgcgatactggcccttttcgtatcaaaatttgttatgagtaagcagtatcagtcacacgtttcaatgtatgttaaaagtgctgataatcaatcaacgggtcaggataagactaatgttgacttacaggatattaacgcttcaaagtcattggtacagacctacattgttatacttactgatgacccggtaatgaacgaggtaagtgataagcttcttgagatgtatactcctgaacagcttgctccttattttactgtaacaagcggcagggtttcaaatgatggtctgagaaatgcttatagcatgaccgctgtaaatcagacagaggtacttcagataactgccacaacaaccaatgcaaagctttcttctgacctttgtaacatcatggctgacgtcgctccaagctttcttataagagttatcggtgcaggctcagttgaaaagataggtgatgctgaggtttacaatacacctgtttctcctaacaccactaaaaatgttgcccttggctttgttggtggcttgatggtggctgttctagtgatacttgttatcgacttcttcgacaacactgtaaagaattctgatgagcttggcgatatttatcagaagcctatcgttggtgagataatgaatattggcggaaagacttctaaaaaggatgaaggttcttctgctgacagaaaaaaacagcttctgttcaacaataaggatataccgtttaatattgtagagaactacaaaacaatgcgtacaaaccttatgtttacgctttctacaacacgaaataagatagttgtcgtttctagccctaatccaagtgagggtaagtctgtaacagttgcaaaccttgcagcttcaatggctgaaacagaaaataaggttcttcttattgacgctgatatgagaagacctgttcagcacagaaacttcaagttaaaaaacaatgttggactttcaacaatactgagtggtgaaagcacatttgataagtgtgtgcatgaaaccaagaatggcaattttgctgttcttacatcaggcgttttgcctccaaacccgtcagagcttcttgcttctgagaaaatgcgtgaattgcttgaatatgttcagcataagtatgattatgttattgtcgatggaactccgctgcttcctgtaactgacgtaatgagccttgcagacgaggtcgcaggcgttcttcttgtggcaagatatggcagaactacatatcaggagatagaggagtctatgaagaagcttgagataggcgattgcaatctgcttgggttcgttcttaatgatatttccgcaaagaacggttctcattacggatacaagtatagctacaagtataaatatgactacagctataaatacggtgtgaaggatacttctgccgaaagttaaatgacatggagatgttagattgactaccgattatcacagccacatactgccgaatattgatgacggctctgacagcatcaaaacatcacttaaaatgataaaaatgatgaaacagcagggcataggtataattgtggcaacaccgcatttttatatgcacagggaagcttctttagacagttatcttgtcaaacggcaaaatgcttatgagaagctcatggcatctgaccctgccgtgaaggatatacatattggtgctgaggtggctatagaaaaaggcatcagcgtattaggagaacttgaaaagctgtgtatcagcggaacaagacttattcttcttgaaccaccattcactcagtataacagttggatcgtcgaggagatagacgagatagcaaattctcgaaggcttattccgataatcgcccatgtacatagatatatgggcgtttattcaaagtcagatctgaaaagtctgatgtctgtggatgcagtttttcagataaatgcagaagcttttgagcatttttccacaagacgttttgttaataagcttatttcaagtggcagagattttgtctttggaagcgatgctcataatcttgatgatagaaaacctaattttgatcttatagctaaaagatctggaagtgaaaatataagacgttctgataaagtactcatgtctgctatggctgacgaagaaagaatgtttgctttttaagtatagaaaaaatattgatgatattataaatagcctgcactgtgccattgaggggtggccatggtgtgatcttattcattgctttaattgagcggaggtatgttttatttatggagaaaacaagtgaaaacacagttcaggtgtggaaaaacaaaaagataaagcattggatgcttattgcattctttctgtgtttctatgatattgttgccgtaaatctatcctacattttcggacttttcatcagatttgaccttactttttctgcaataccaaaggagtatatgcttgcctatgtaaagtttgctccaatatatacagctttctgtgttgtggtgttttttgtgttcaagctttataatagtttgtggagatttgctagcattggcgaactgtcaaggatatttttggcctcgatagttactaccatatttcaggctgtgggtataacattactcttcatgagaatgcctgtggcttactatatagtaggagcgggaactcagttcgtgcttataacagcagtgcgttttgcctatagatatatcacccttttaagagcaaaacaggtaacaaatcaggtggcagtgcataatgcaatggtcattggtgcaggtgcttcgggtcagatgatccttaaagagcttacgatgtcagaacgtgcaaatgcaagaccactctgcataatcgatgataacccaaataagtggggaagaaatatcggaggagtccctatcgtcggtggccgtgattgcattatggaaagcgtcaaaaagtataatattgatcagatcctttttgcaattccaactgcatcacctgagaacaaaagggatatccttaatatttgtaaggaaaccggctgtgagatgaaacagcttccgggcgtttatcagataacaaatggtgaggtgcttctcagcaagatgaagcctgttgcggtcgaggatctgcttggaagagagcctatcagagtaaacatggacgagatattccagcaccttaaaggtaagaccatattggtaacaggtggcggtggctctatcggaagcgagctttgccgacagatagcaggtcatgagcctaaacagcttatcatatttgacatttatgaaaacaatgcttatgaaatagagcaggagcttaaacgtaaatatggcagtaaactcaatcttgtgacgcttatcggctctgttcgtgacagcagacgtatcaatgacgtttttgaaaaatacaagcctgatatcgtttatcacgctgcagcacataagcacgttccgcttatggaaacaagccctaatgaagctatcaaaaacaatgttgttggtacatacaagacagcctatgccgctttgaagcatggcacaaagaggtttgtgcttataagcactgataaggctgtaaacccgactaatattatgggtgcaagtaaaagactctgcgaaatggtcatccagagcatggacgctatcagcaaggcaggcagaactgatcttctacctatgctccatgcacacgttgatgaaatgacagacggtatgcttgagaacgatccgatagacgagatagctgttgataatatagagagcagtgaagcggttaagatcgaaagcgttggcaataaggacagaaatggcacacagtttgttgcagttcgttttggaaacgttcttggaagcaacggctctgtgatcccactgttcaaaaagcagatagaagcaggtggtcctgttactgttactcatcctgatatcataagatatttcatgactatacctgaggctgtgagccttgttcttcaggcaggcacatacgcatggggcggcgagatatttgtccttgatatgggtgcgcctgtgaagatagacacacttgcgagaaatcttatcagactttcaggatataagcctgatgtagatattaaaatagtttactcaggtctgcgtcctggcgagaagctttttgaggagaagcttatggcagaggagggcatgatgaaaacggataatgagcttatccatatcggaaagcctataccgtttgacacagaaacgttccttggtcagcttggagagcttgctcgtgcaagctataacaatgacgaaaatatcgttgaaatggtcgaaaagattgttccaacattcagtcctgtaggtgataaaccaacaggtaatgaaaaatatggcagaaacgatgttgcagtttctgcggcaaaataa

SEQ ID NO: 367 - DNA, 9166 bp, unidentified
  source 1..9166: mol_type = unassigned DNA
tcatttttcatcaacaacctggaagatgtagaatttcagataatagctctcctgcgcctcccacagtattgggtggtcaggtgactgtgtcctgaactcgacctgacggagtcttttatgtacagctttagcggcttccttaatagtcttggtaagaagctcctgtgtcatgaagtgtgagcatgaacagcttgcaagatagccgccgtctttgacaagcttaagtcccttcatattgatttccctgtagcccttgattgcgttctttgtagcttccctcgatttggtaaatgccggcgggtcaagtattacaacgtcatatttctcacctgcttcgttaagctttggcagctcatccaatacatttgcacatttaaaatgtactgtattctcaagtccgttaagcttggcattggctctcgcctgttcaacagcatattctgatatatcaagtccagtaacttccttagcacctgcaattcctgcatttaatgcaaatgtacccatatgggtaaaacagtctaatacccgcttgtccttgcacagcttctgcattgcaagtctgttgtacttctgatcaagaaagaacccggttttctgtccattcacaacatctatcatgtagtggacaccattctcaactatctcaacattagtgtcaaattcatcaccaataaagcccttaactctctccatcccttcaagagtacggactttggcatcgcttctttcatatactccacggatatcaatgcctttttcacgaaggatttccttcactttttcgacaataagtgacttaaatctgtcaattcctaaagcaagtgattccacaacaagcacatctgagtacttatctataacaagtcccggcagaaaatctgcctccccgaatataagacgacacgcagaggtatctactgtgttaaatctgtattcaaccgcagcccttactctctcctcaataaatgtctcatcaacaacatctgtgtgtctgctcagcattcttactgtaatcttggattttctgttaataaatccgattcccatgaaataatcatcaaaatcaagcacctcaacaagatgtccgtcaattattccgtcagacatccattcaatttcgttatcatatacccaggcaccgcctgcctttaaggttcttccttcaccttttcttaatcgtatctttccgcatacgctgaataaatcttccattctgttccttcctgccagataattctgacatttatcataattattcataatatattaatccgttgacggattaccaagaaaataaaacatacatactcctgcaaccgtaataagaagcgacacgagcttaatccatgaaaatgtagtcttctcacttccaaacagcccgaaaagtcccagcagatacgaaacaattatctgcgcaactacaatcgtaacctccgctttagcaattccaagaccacttatactttttataactgtaaatgttataaatgcacctatcacacctccaagaagtgtaatcttgttatcaaccttaaacagcttcatgatatcaggtcttccgtcaattacccacataatcgcacaagtcgccagtgctgtcaactgcacaaacattgccgtaacccacacactgcttgctttcgtaacatttgtattaaatgcaccctgtaaactcataagtgcacctgatattattgcaatcaaaaatcctgccattaactaacctcctcattaatctgcataggataattattagttaataacaggatatttattcataatgttatttcgtactctgcgtactgttttcattattatttttagttgttttttctattgttgttgcaaatgtactgtaagctgtatcaacatttccaccatcatatacctgatgaagcataatctcatatctcatgtatacttctccaacaccgatatatttggcttttacaacagagtcagaataaatctggtgtaacttctggtagctttctgctctcttaacctttaaatccgcccttgcacagcttttcttagccatgcttccaagataatctgcataatcataagaaattgctcttgcaacagccttggatgcatctacattcttagtgtacggattaactactgccatcgtagtaacagacattgccttagaatcaaggtcatctcccattgaaggatactcacatattccataatctacatctgtaacattaatctctgcaagactgtctgcatcaagcacagtatagagcatatttccagtagaaaacagatctgcacagtctttaagacttactgtatttctgtcaataccaaatgcatcttttaactgagcgtacttagtaagaaccttcttaatcttttcctcattaagagatacctcagccctgttctctgcattaactccgcctatattaatataggctcctgctgctgcataattaaggaacattgaatcaggatcccattcaaacaccattgaaacatcctgattctcatctgtaatctgataattatcacttatattacgaatctggtctatagtatcaactgcttctgcatatttcttattatatacaagaaatgaagtgttgaacgacaccgggtaaccatataacttaccaccatacgaacatgcagtcattgcagccttaccatacacattctcattatagacttcaggatacatatcattctcagaggtaagacctgaaagataagccttctccatctcttcagatgtcagaaaatatatatcacatgcattgttattccttaccgattcgtcatatatataattaatatatgaatccgcctcaatatatactggcttaacagtcaccagttcattagatttcttaaactgtctggcaacgaattcaagataagactcatatgcactgtcattataccagacattaactgtaataggtccactaagattaagcttcttcgcagcctgtgtcctgtcatctttattaccacagcctgcaaagactgtcagcatggtaacaatcagcatcatactgataaatcttcttaatttcataaagtaaactcctgattctagaaggatttcttaagcttagctatgcattcatctacatctgccttagtaattacaagtggtggaacaaatcttataacattagttcctgctgagaacagaataagtccgttatcaagtgctctcgcaattacatccttaggattaactgataactcaagtccctgcataagtcccattcctcgtctctcgacaacaacatctattgtctcaacaagctcatcaagcttttcttcaaagtaagcagatacttccctgacattatctaatacatgctgcttctcaaaaagttcgaacaccttggttgctgctgcacatgcaagtggattaccaccgtatgttgttccatggtctcctggaactaatgccttcgcaacttcctctgtcgctgcaaatgcacctacaggaacaccacagccaagagccttggcaactgtaaggatatcaggcttaacgccatactgctggaatgcaaacatacttcctgttcttcccattccgcactgaatctcatcaagtataagaaggattcccttctcatcacatagctttcttacaccttcaataaattctttagtagcaggataaattccaccttcaccctgtactgtctcaaatattatagcacaagttttatcattaacaagttcctttacactgtcaaggtcgttatactgtgcaaacttaattcccggtatcataggtccaaatgcttcctgataatgcttattaccagttacagcaagtgctcccatacttcttccatggaatgaatgctgcattgcaataatctctgcatcagcctttccgttcttgacataataatatttctttgcaagcttgactgcaccttcaatagcctctgtaccactgttagtaaagaatactctgtccattcctgaagcctttgtaagtgctgttgcagcctctacagccggttcattatagaaataattagatgtgtgtataagcttatcaatctgtgcctttaatgcatcgttatattccttattgttataaccaagtgcaaatactgctatacctgctccaaaatcaagatattctttaccatctgtatcgtaaagtcttactccgtcacccttatcaagtactatctggtaacggttgtatgtatgaatcagcttctcttctgctgtttctataatctgctgtgtattcattattactctcactttcctattcttatgagcacacattttcacatgagccaatataatattataacctcaaagcttaaggttcgcaattatttatctgaatcaaagaatttttctgcatcgtctgaaagaatagctgtaccaacacccttgttagtaaatatttcaagaagaaggcagtgtggaattcttccatcaagaatatgtactcttgatacaccatgctcaatagcatctatacagttattaagcttaggaagcataccgccaccgattgttccgctctctaaaagtgttctcgcctctgaagtagaaagctcagatataagtgaatccttatcgtcaaaatccttatatacaccttcgatatctgttaagaatgcaagcttctcagcattgacagctcttgcaattgcacatgctgcgtcatctgcattaatattgtatgcatgaaaatcatcatcatatccgataggacatattactgggaggaaatcgtccttaagcaatgaatcaagaagtgttgtatcaacatctgtcacttcaccaacatatcctatatcctcacccttagaatacttcttctcaacctttaacatgccgccatccttaccactgataccacatgccttgacaccaagctgctcaatcattgaaacaagactcttattaaccttattaagaaccatctcggcaatctccattgttggctcgtctgtaactcttaaaccattcttgaattcaggtgtcatgcctgacttttcaacccatttgctgatttccttgccgccgccgtgaacgatgattggcttaaaaccaacaagtttaagaagaactacgtcctgaataacttttctcttaagttcttcatctaccatggcacttccgccgtacttaactacaattatctttctgttaaatttctggatataaggaagtgcctcaacaagcacctgtgccttcataagttcctctgtcatatcttttgcgctcataataatctccatttcatatttattcagatatctatttgctttaaaatgctgtgtcagattagcttctgtaatcagcatttatcttgacataatcaaatgtaaggtcacagccccatgctgtagcgcttgcatcgccctgcttaacatccgcaatagcaattacaggattctgtgaaagtatttccgttgctttctcctcgctgtaatctgtagcagttccatctttaacaatctgaagctcacctgcttcactcttaaagaatatatcaaccttttcagggtcaaagtcagcaccagaatatcccattgcacagagaattcttccccagttagcgtcatgtccgaatattgctgccttggtaagacttgatgtaacaattgacttagcgagtgtcttggcttctgccttagttgttgcaccctttacctgaacctcgaaaagacatgtgcagccttcgccgtcacctgcaatcatcttggaaagctctgtaaatacatagcttaagccttcatagaaagcattataatcagcaccctcttctgtaatcttcttattgccagccattccattagcaagaacaagagctgtatcattagttgatgtatctccatcaactgatatcatgttaaatgaatcatcaacaattgcacttgtcatcttctgaagaagtgccttgtcgatatcacagtctgttgttatgtagcagagcattgttgccatattaggatgaatcattcctgcgcccttgcacataccaccgattgttaccttagtacctgcaacttctacttctacagcaacctgcttgcttcttgtatctgtagtcataattgcctctgctgcctgtgttcctgcttctaatgaatcatcaagcattggagcaagcttttcaattcctgcacatattctgtcaacaggaagctgcattccgataacacctgttgaaccgataagtactgcattctccggtacattaagaacctttgcaactgcctttgcttcttctgcacatgcattatctccttcaacacctgtacatgcgttggcaacaccgctgtttacaactacagcctgtgcaaagtcttcattatatacaatgtttctgtcccatttaacaggagctgcaaatactttgttagttgtaaatgttcctgctgtaacacatggcttctcactgtatacaagtgccatatctttctttccgttcttatatttaatctgtgcttcacatccggcagccttgaatcctttagctgctgtaacaccgcctttaattatattcataacatcctcctattgtaccatcacatatactctgtcattgtgcatatttcgtcgtgtaaattctgaatttacgctacatttattatggaaacattggtgcaagctgtaatccctcattctctggaagtccgaagagaaggttcatattctgtactgcctgacctgctgcacccttaacaagattatctaacgcacccatcattataagcctgttagttcttggctcaatcttaaatcctatatcaacaaagttgcttccctcaacccagcgtgtttcagggcatacatctttaggaagtactcttacgaaatattccttatcatagtacttgtcatatgctgccttgacatcttcgtatgtaacatctttggcaaggttggcatatgctgttacaagaattcctctgttcattggaaccaaatgtggtgtgaagataagctttaaatcatctcttccacatgcataacctaactgttcctcaatctcaggtgtatgtctgtgagttccgacaccataagccttcatgctctcattaacttcgcagaaaaggttggcaaccttagcgccacgtcctgcacctgaagttccactcttggcatcaattataattgtatccggattgattattccttccttaaccattgggtaaagtgtaagaattgatgttgttgtataacagcccgggttagcaatgattcttgtatctttgcttaccttgtctctgttaatctcacataagccataaacagcttcatcaatatactgtggtgctttatgctcaagcttataccactgttcatatacattaacatccttaagtctgaaatcagcactcagatcaataatcttagtctttgaaagaatttcgtcattaacaagtgatgcacataagccctgtggtgttgctgtaaatataacatcaacctcgttagcaagctgctccatattgtcgtccatacattttgcatctacaagcttaaacatgtttctatatacatctgaataattctgatctatgtaacttctcgaaccgagccatacaatctctgcatccttatgtcctaataataatctgacaagctcgttacctgcgtaacctgtcgcaccgataatgcctactttaatcataactcctccttgttttgcgaagcaaaatgcatatattcaacatttatgcataaaataacgcaaaatgtaaattgataacctacattatagcaactttttttcttatgtaaaggatattttaaagaaaatttatatttatacatttttgttgcatattgatgtataatatgcataatttgttgttgcatttttaaataaagtagtttattataatctgcaggtgcatagcatatgtgttttactatgtaaacttaataatatacggaggaatatataatgaaagaaaaagttattcttgcttattctggcggacttgacacaactgccatcatcccttggttaaaggaaacatacaactatgatgttgtctgcgtatgtgcagactgtggtcaggaagaggagttggacggacttgagcagagagctctctcatgtggtgctgctaagttatatatagaagatatcactgatgaattctgcgacaactacatcgttccatgtgttcaggcacacgctgtttatgaaaataaatatttacttggtacttcaatggcgagacctcttatcgctaagagacttgttgagattgcccgtaaggaaggtgctgttgctatctgccacggtgctactggtaagggtaatgaccagatcagattcgagcttacaatcaaggctttagctccagatatcaagattatcgctccttggagagattctaactggaagctccagtctcgtgaggatgagattgaatactgcagacagcatggtattcatcttccattcagcacagactgcagctacagccgtgaccgtaacatctggcatatcagccatgaaggtcttgagcttgaagatccagctaatgagcctaactacaagcatttattagttcttggatgcactcctgaggaagctccggatgaaccagaatatgttactatgacatttgaaaaaggtgttccaaagtcagttaatggcaaagctatgaaggtttctgatattatcagagagcttaacagacttggtgctaagcatggtatcggtatcattgatatcgttgagaaccgtgttgttggtatgaagtctcgtggtgtatatgagactcctggtggaacaattctttacgaagctcatcagcagcttgaggaattagttctcgacagagatacaacaacattcaagatggatgttggaaacaagtttgcacaggttgtttacgaaggaaagtgggagacacctcttcgtgaagcacttcaggcattcgttgagaagactcaggaatatgtaacaggtgaagttaagttcagactttacaagggtaacatcatcaaggctggaacaacatctccatattcactttacaatgagtcaattgcatcattcaagacaggtgatatgtatgatcatcatgatgctgacggattcatcaacctcttcggtctttcacttaaggtaagagctatgaagaagcttgagaacgagaagaagaacaataagtaa

SEQ ID NO: 368 - DNA, 6966 bp, unidentified
  source 1..6966: mol_type = unassigned DNA
gccgatggtactgcgtaacagtgggagagtaggtagccgccgtttttaagaagcctcgcttgtctattggacgggcgaggctttctgttttttattactttggtatttatatcgccgtttttaacagatacaaacctcataatacctattaaaaaagtgaatatttactgataatttgtatgttatgaggatatttatttgtatctttgtcgcccgaattgtaagctaacgatttaaaaaagagagaagctttgggaaagtttgataaatacaaaattgacttgaaaggaatgcaaacagactctgctaagtatgagtttgtattggataacctttacttcgctcacattgatggtcctgaagttcagaaaggaaaggtgaatgttacattgaccgtgaaaagaacctctcgtgctttcgagctgagttttcagactgagggaatggtatcagtaccatgtgaccgttgtctggatgatatggagctacctatcagttcttctgataaactgatggtaaagtttggacatgaatatgcagaagaaggtgacaacctgattgtgattcccgaggaagaaggggaaatcaacgttgcatggttcatgtatgagtttgttgcgctctctgtacccatgaagcatgtacatgctcccggtaagtgcaataaagcgatgactggtaaattgaacaagcatttgaaaacaaatgcgaatgaggatagcgatgatactttcgactcaggtggagatgacatcgtaattgaggaagaagtggaggaacaaattgatccccgctggaatgaattaaaaaaaatattagataataattaaagttttaagaaaatggcacatcctaagagaagacaatcaagtacgagacaagcgaagagaagaactcatgataaggcagtagctcctacattggctatttgtccgaattgcggtgaatggcacgtttaccacactgtatgtggtgcttgtggctattacagaggcaagctcgctattgagaaagaagcagctgtataattagtacagttatactgaaaacagcctgggggtgaaactctccggctgctttaagtattatagtattgctaatttaaaataggtttgatggaaaaaataaatgcagtaatcacaggagtcggcgggtacgtacccgattatatcttgactaacgacgagatatcaaaaatggtggataccaacgacgaatggattatgactcgtatcggagtaaaggaaagacatattctgaatgaggaaggattaggtagttcatacatggcacgcaaagctgccaaacagttgatgaagaagactggtgctaatcctgatgatatcgatttggttgttgttgctaccactactcctgactatcacttcccttctacagcttctattctttgtgataaactcggactaaagaatgcttttgccttcgacttgcaggctgcttgtagcggattcctgtatttgatggagacagctgctaatttcatccgttcgggaagatataagaaaattatcattgtcggtgccgataagatgtcgtcaatggttaactatacagatcgtgctacatgccctattttcggtgacggtgctgctgcctttatggtggagcccactatggaagattacggaatcatggattcgatactgagaacagatggcaaaggtttgcctttcctccacatgaaagctggtggttcggtttgtcctccgtcttatttcacagtagacaataaaatgcactatctgtttcaggaaggaagaacagtatttaaatatgctgtatccaacatgtcggatgtctctgctgcaatcgcagaaaagaatggtctgacgaaagatagtatcaactggattgttccgcatcaggcgaatgtccgtattatcgaggctgtggctcaccgtatggatgtgccaatggataaagtgttggtaaatattgagcattacggtaacacgagtgccgctacacttcctctgtgtatctgggattatgaagataaactcaagaaaggcgataacatcattttcactgcattcggtgccggatttacttggggcgcagtgtacgtgaaatggggttatgatggaaagaaggaatcgtaacgtaagttactgaattataacactcaaaaacgcatcctatttcgattcgatgcgtttttttgtctcaaccaataaaataaagagaaatgcataaagcaggttttgtaaacatcgtaggaaatccgaatgtcggaaagtcgacattgatgaatgtcttggtgggcgaacgtatttcgatcgctaccttcaaagcgcagactactcgtcaccggattatgggaatctataatacggatgagatgcagattgttttttctgatactccgggtgtgttgaagcccaattataagctacaggagtctatgctgaatttttctacttcggcattgacggatgcggatatcttgctttatgtaacggacgtggtggagacgccggataagaataatgagtttatggaaaaggtgcgtcagatgacggtgcctgttctcttgctcatcaataagatagatcttacagatcaggaaaaactggtaaagctggtggaagaatggaaagagttgcttccccaagccgaaattattccgatttctgctacatcaaagttcaatgtagactatgtgatgaagcggatcaaagaactgctgcccgattctcctccttattttggaaaggatcagtggacggataagcctgcccgtttcttcgtgaatgagattatccgggaaaagattctgctctactacgataaagagattccctattcggtggaggttgtcgtggaagagtttaaggaagaaccgaagaagattcatattcgggcggtgattaacgtggaacgtgattcgcagaaaggaatcattatcggtaaacagggaaaggcgttgaagaaggtggctaccgaggctcgccgtgaactggaacgtttctttggaaagactattttcctcgaaacgtatgtgaaagtggataaggattggcgtagttcggataaggaactccgcaattttggttatcagttagattaagagtattcatgcgactgtgatagtcgtgaaaaaacaaggtattgaactatgggtaatttagttgcaattgtaggacgcccgaatgtgggcaagtctaccttatttaaccgtctgacgaagactcgtcaggctattgtgaatgaagaagcgggtacaacccgcgacagacaatatggcaagtctgagtggctgggccgtgaattctctgtggttgacaccggtggatgggtggtcaactcggatgatgtctttgaagaggaaatccgtaagcaggtattattggctgtggaagaagcggatgtcattctgtttgtagtggatgtgatgaatggagtgactgacttggatatgcaggtagctgctattctgcgtcgcgctaatagtccggtgattatggttgccaataaaacggataatcacgatttgcaatataacgctcccgaattctataaactgggattgggcgatccgtattgcgtttctgccatgacaggaagtggtacgggtgatttgatggacttgattgtcagcaatttcaagaaagaatcatcagaaatcctggatgatgatattccccgttttgctgtggtaggacgtccgaacgccggaaagtcttccattgtaaatgcatttattggggaagaacgtaatatcgtaacagagattgccggaactacccgcgactctatctatactcgttacaataaattcggatttgatttttacctggtggatacagcgggtatccgtaagaaaaacaaggtaaatgaagacttggaatattattcagtcgttcgttcgattcgttctatcgaaggttcggatgtttgtattctgatgttggatgctacaagaggtgttgaggggcaggacttgaatatcttctctctgattcagaagaatcagaaaggtctggtagttgttataaataagtgggatttggtggaagataaatctgtgaaagtacagaaagcgtttgaggaagctgttcgctcgcgttttgctccgtttgtcgatttcccgatcatctttgcttctgcactgactaagcaacgtattctgaaagtgcttgaagaagcacgtagtgtgtatgagaaccggacgacaaagatcccgaccgcacgtttgaatgaagaaatgcttccgttgatcgaggcttatccgcctccttcaaataaaggtaagtatatcaaaattaaatatatcacacagttgccgaatacacaggtgccttcatttgtatatttcgccaacttaccgcagtatgtgaaagagccatacaaacgtttcctcgaaaataagatgcgtgagaaatggaatctgacaggtactccggttaatatttatattcgacagaaataaataaaaaagacacggattgtctcaattatatagaatatatatagagacaatccgtgtctttttataaatatatctctgtgagatcttgtattgctttgtagtagacttatttttccaactggaaatcttttcggcgtaacacgaagctgttactcaagtatttttcacgtacaatctgattttccgataattcttccggtgttccctggaaaaggatctttccttcgaacagcagataggcgcggtctgtgatactaagcgtttcttgtacgttgtggtcggtaatcaggattccgatattcttgtctttcagtttccatacaatttgctggatatcttctacggcaatcgggtcgacaccggcaaaaggttcgtcaagcatgatgaatttggggtcgatggcaagacaacgggcaatctctgtacggcggcgctcacctcccgacaactggttacctttatttttgcgtaccttttgcagacggaactctgcaatcaggctttcgagtttctctttttgatattctttgggcttgttggtcatttccagtacagaggcgatattatcttccacgctcatctggcggaaaacggaagcttcctgtgcaaggtagccgattcccgtttgtgcgcgtttgtaaaccggatatttggtaatctccaggtcatcgaggaaaatacgtccttcattaggagtaatcagccctacagtcatatagaatgaagtcgtcttaccggcaccgttcggtcccagcaaacctacaatctcaccttgcttcacattgatggaaacgtggcttacaacggttcgtttaccgtacttcttaaccaggtcttccgtgcggagcaccatcttgctttcttccatattctagttattttgcggcaaatgtagtaaaaataagctgaaataatgtacatttgcagacaaatagtgtgagttatgataaaagcattgagaaccgtcgggagatatttcatgctgatgggtcggactttttcccgccccgaacgtatgcgtatgttcttccggcaataccttaacgagttggagcagctaggtgtgaactccatcggtattgtgctgttgatttcgtttttcatcggcgcagtgattaccatccagattaagttgaatatcgaaagtccatggatgccccgctggacagtgggatatgtgacacgtgaaattatgttgctggaattttcttcttccatcatgtgtttgattcttgccggaaaagtcgggtcgaatatcgcttcggaattaggaacgatgcgggtgacgcaacagattgatgcgctcgaaattatgggtatcaattcggcgaactacctgattttgcctaagattacggcgatggtgactgttattcctattctagtgacgtttagtatctttgccggaatcatcggtgccttttgcacgtgttggtttgccggggttatgaatgctgtcgatctcgaatatggtttgcagtatatgtttaacgaatggtttatctgggcgggtatcatcaaatccctcttttttgcgtttataattgcaagtgtgtccgctttcttcggatacacggtagagggaggttcgattgctgtaggaaaggcttctacggatgccgtagtatccagcagtgtattaattctgttttcagacttgatattaactaaacttttgatgggatgattgagattaaaggactttataaatcatttgatgacaagacagtattgagtgatattaatgctgactttgcaaatggaaagacaaacttgattatcggtcagagtggttccggtaagacggtgttgatgaaatgtattgtaggattgttaactccggagaaaggggaagtcttgtatgacggacgtaaccttgtgctgatggggaagaaggagaagaagatgcttcgcaaggaaatgggaatgattttccagagtgcggctctttttgactctatgaccgtatttgataatgtgatgtttccactgaatatgtttagcaacgatatcttgcgtgaccggatcaaacgggcgatgttctgtctggatcgtgtgaatctgggggaagcgaaagataagtttccgggagaaatcagtggtggtatgcagaagcgtgtggctattgcgcgtgcgattgccttgaatccgcaatatctgttttgcgatgagccgaactcggggctggacccgaaaacgtcattggtgattgatgatctgatccacgatattacgcaggaatataacatgacgaccattatcaatacgcatgatatgaactctgtattgggaattggtgagaaggtgatttatatttatgagggacataaagagtgggaaggtacgaaagatgatatctttacttctaccaatgaacgactgaataactttatctttgcttccgacttgctccgtaaggtgaaggacgtggaagtgcagggaatggaagggtaataaaaaaggaggtgtgtcgtaatgcacgatgcacctctttttttgttcatcactataca

SEQ ID NO: 369 - DNA, 29113 bp, unidentified
  source 1..29113: mol_type = unassigned DNA
ataccttgataaaagaatcattcaaagaatttggaatttcattcgatatatactctcgtactacatcaaagacacaccacgaactggcttccgaattcttcaaaaccctgtatgataaaggtgagttcattgaaaagacctccatgcaatattacgacgaagaagcccatcagttcctggccgaccgttatattaccggtgaatgtcctcactgccatgcagaaggagcctacggtgaccaatgcgagaagtgcggaacatcactttctccgaccgacctgatcaatccgaaaagtgctatcagtggcagtaaaccagtgatgcgtgaaaccaaacattggtatctgccattggacaaacacgaaggatggctgcgtgaatggattcttgaaaatcataaagaatggcgccccaatgtatacggacaatgtaaaagctggttggatatgggcttgcaaccccgtgcggtaagccgtgacttggattggggaatccctgttcctgtagaaggtgctgagggaaaagtactttatgtatggttcgatgcccccatcggctatatttcaaatacaaaagaattacttcccgacagctgggaaacttggtggaaagatccagaaacccgtttgattcacttcatcggaaaagacaatattgtattccactgcattgttttccctgctatgctgaaagcggaaggaagctatatcttaccggataacgtacctagcaatgaattcctgaatctggaaggtgacaagatttccacttcacgcaactgggcagtatggttgcatgaatatttgcaggacttccccggcaaacaggatgtattgcgctatgtattgacagccaatgcccccgaaacaaaagacaacgattttacctggaaagattttcaagcacgtaacaacaatgagttggtggctgtttacggtaactttgtaaaccgtgctttagtgctgactcataaatatttcgacgggaaagttcccgtttgcggtgaattgaccgactacgacaaagaaacactaaaagaatttgctgacgtaaaggcagaagtagaaaagctactggatgtattcaaattccgcgatgcacaaaaagaggcaatgaacctggcacgtatcggtaataaatacttagccgatacagagccttggaaactggcaaaaactgatatggaccgtgtagccaccatccttaacatagcattgcaactagttgccaatctggctattgcattcgaacctttcctgcctttcagcagcgaaaagctccgcaaaatgctgaatatggaaacatttgaatgggaccaactggggcgtaccgatctgctggcagaaggacatcaattgaataaggcagaactgttgttcgaaaagatcgaagatgaaaccattcaagcacaagtagacaaactgttggctacccaaaaagcaaacgaggctgccaactataaagctagcccgataaaaccggtaattgcttttgaagaatttgaaaagttagatatccgtgtaggtaccgtattagagtgtgaggtagtgcctaaaatgaaaaagctgctgaaattcaagattgctgacggactggagaaccgtaccatcgtcagcggtatcgcacaacattataaaccggaagaactggtgggcaaacaagttttattcattgccaaccttgctccgcgccaattcaagaacggattggtgagcgaaggcatgatcctgagtgctgaaaactttgacggcaccttagcggtgacctctttattaagagaggtaaagccgggcagtgaagtgaaataatatacacccaaatacagaaaaggctgaaagcaactgaaacgtccgctttcagcctgactgttttataatctatctataaaaatggcagaacaatccttgaaagaaaagacagcaaaaggcctcttctggggcggattaagcaatggagtacagcagctgctgaatctttttttcgggatattcctgtcacgcattctgaatgcggaagattatggcatggtgggaatgctgtccatcttctcccttattgcaggctctttgcaggaaagcgggttcacggccgccctagccaacaaacgggatatctcccacaaagactataatgccgtattctggttcagtaccgggctaagtgcctgtctctacctcattctgttcctttgcgccccactcattgccgaattctatcacactcccgaactgacagctttggcacgatacactttcctcggtttctttgtagccagtttgggcattgcccacagtgcttacctgttccgcaacttaatggtcaagcaaaaggcaatggcggtcactatcggattaaccgcctcaggaactatcggtataactatggcctgcttgggatttgcctattgggggatagccacacaaagcattgtctatgtaggaaccattaatatctgttattggtgcttctcaccctggcgacctacacttactttcgacttcaagcctttgagagggatgctttctttcagcagcaaattattagtaaccaatatattcaaccacatcaataataatatctttaccgttatccttggtaaattctattcgggacaagaagtaggctattttactcaagctaataaatggaattatatgggacattcattaatttcaggaacagtcaacagtgtagcccaacctgtactttccagtttgtcggatgaaagggaacgccaacaacgcgctttccggaagatgctccgcttcactgcctttatttcttttccggctatgttaggattatcattaatcgcacccgaactgattatactgactattacagacaaatggctacccagtgccttcattctgcaattgctctgcatcggtggcgcattcattcccataaccaatttgtattccaacctagtcatcagcaaaggaaaatcggatatctatatgtggaataccatcagcttaggcatcatccagttaacaaccatgcttctgctctatccatacggcgtacataccatgattatagtgtatgtatccatcaatatctgctggctgtttgtatggcactattttgtatggaaacaaatacggctcagcttgtttgcagcgctgaaagacatccttccgtttgccttcatagctaccgcagtaatggcggctacctattatatcactatcggctttgccaatctgtatttattaatggcaagcaaaatgatcatagccggcacactctacacagccaccctgtggttgagcggctccgtcacttttaaagagagtttacactatataatcaagaaataatggatgctacacgtcactccggattagaatgtttacgaattatcagtatcatactgattgtatccatgcatattctaggaaataccttccacaccggtaactggctgaacaaagaattcatactatttatcaatacactgggaaacaccggagtaaccttgttcattctgatctcaggttattttggaatccgtttcaatacacataaatttttcaaaatgctggttgtcgtatggttttattccatcgtttcttatctgatcgaaacaatatggcttcacactccgcatacctggacagggctggcctcctcattgctaccgatacttagcaaaaaatactggtttatgacctgctatgtagtactttattgtttctcgccctatttaaaccgactggttcataacctctcacaaaaaagttataaacaactactgttactatggggattcttttttgtatttgccccgacaatcctgttttttgaaattcagaatgacacgggcaagggaattatcaatgtcacactagcttatctcataggacaatatctgaagacctatggtcttccggaaaacatgaaacgacatagccgggaaatcttgtcaggcagccttgccggtatttttatactgaataccctgcttacagcaatgagtggaaatatcatactgagattcgcccgagataataatctactgattatcatcgcctctatcatgattttctaccagtttacccggtggcatttttcatcccgcatcatcaattacctagcaggatacgtttttgccttatatatgcttcaaggacttcttatccactgtttacaaccctggtataccccttatgcagacagcaacctacttgttctgtattttatgggaacacttgtttctatctgtctgacgacgcttgttatagaatggagcagacggctgctattaggaaaaatagaaaacaaattggcaaatgccatagaaagaagaggagcaaaaataaaaatgtttgcagataatcattaaaacaatgatttatttccgtaactcataatttcaaaatctccaatggaacccctcctatctgagctgccatatccgaaaatgaactctgaaaagaaccatatattttttgtgtacgagccaatgtgtacatatccgtgataccctcccttattccctccaaagatccacggtctgccttttttccggaacagaatatccggtcaccataacgctctttcatttcccgcttcacctcttccgaatctgtagccaaatagatagccaccttgccgtcctcttttatcttctcatctaatttctgatagaacaactcgatagggctttgcctgatagaagccagattatctgtacgacggatatgcacaccaatcatagcatccgaaaaattccgacaacggttttctacctcttccataatctcgtctaccggaacaaacaaccgactgatccacgcataatcataaagttggaaagcggtgtatgatgccatataaacacagccaccttctttaacccaccgttcaaaatcaaaatgccggttacataaaggagtaatggaacgctcgtacagacaagacttgaaaagcagtttctgaaacaaaagcgggaaatgaaaattcttggaacgaggtctgtctaataatgcataatccaaccgcgaagcatcccgtaaacaagccacttccctgtctacaggcttaaacaactgataaaacggtgcattcagtgcccaatcccgaaaccaaatgatgcttaattcacttttcgtctttcctgccagcattaccgccgaagccactgcacgcatacggttggccaatcctcctaccggtacaaatgttattttacccattcctgtttaaaatttgaggcaaatataaataacatcgcttataaatgctaattaattactacttttgcaatatatatacctaaatttattatgcaagcaatcattctagccgccggcatgggcaagcgcttgggagatcttaccaaagataacaccaagtgtatgattaaagtaaacgggacctatctgatagaccgtctgctctcacagttagattcattaaatctggaacgcatcattttagtcataggctaccagggagagaaattacgtacccacatagagaaacaaagtagaaatactccgatagaatatatttacaatcctgtctacaataagaccaataatatctattctctctatcttgctaaagaggaattgcaaaagcaagatactttattaattgaatccgatttgatttttgaggatacacttttccacaaaattttaaataacccctatcccaatctggcacttgtagctaaatatgagccatggatggacggcacgatggtacggctcaatactgaaaatgacatcattgattttatctcaaaaaaaacgttccgctacgcagatattgacgattactacaaaaccgtcaatatctataaattcagtaaggagtttctccgcaacagttatgtgccatttcttgaagcctacagcaaagccctgggtaataacgaatattacgaacaggtattacgggtaatcaccctgctggagagatgtgaactgaaaggactccctttggaaggagaacgctggtatgagattgatgatatacaagatcttgacatcgctgaaaccatttttgccgaacaggaccagctacaacgctaccaaaaaagatatggcggatactggcgtttcccaaagctgaaagatttctgctatttagtaaacccctattttccaccacaaaaaatgtgtgaagaactacaggctaattttaatgtgcttctccgtgaatacccttccggcatgggagtgaacacgcttgtcatggcaaaaaacttcggtatccggcaagattatgtggttgttggcaacggagccgccgaaatcatcaaagcgctgatggaacattcagatggcaaaatgggagtaatttatcccactttcgaagaatatcccaaccggcaatcagaagaaatcattgcattctatccacagaatgccgattttcattatacggcaaaagaactgatgcttttttatgcggacaaagatatccgccatttactcttgatcaatccggataacccatcaggtaacttcatcccccttaacgaacttatggatttgctggcatggacgcagcagcgaaatatccacttaatactggatgaatcttttgttgacttcagcgaaaaaagtgtcgaaaatacgctgcttaagaatgaagttctggaaacatacccacacctcacagtcattaaaagtatttccaaatcttatggagttccgggattacgcttggggatagccgcatcttccgacaaagagataatagcctatttacgaaaaaacatggctatatggaatataaactccttcgccgaattctatttacagatatacagcaagtataataatgattatcaaaatgcctgtaaaaaattcatagccgagcgccaacgctttttcgaggtattgcaacaggttgacttcctacgtgtcataccttcacaagccaattatttcctgtgcgaagtaacttcccgcttcagttccaccaaactcgtttctttattgctggagcataatctcttgttaaaagattgtagtaccaagacaggattcaatggcaggaattacatccgtatcgccatacgcgacactgaagacaacaattatctggctgaaaacttaaaaaaactgcaagcatgagtatcaatatctgtatttgtggcggtggcggtctggggcacgtcattgcaggagtagctgcacataaaggctttaatgtttccgtcctcacccggcatcccgagcaatggaatccatcattactcattgaaaattgccggggaaatacattctccggctcattagcctgcgttacggctaacccggcagaggtcattccacactctgatatcgtattgctttgtctccccggatttgccattgaggaagaacttctccacatacaaccgttcttgcaggaaaaaacttgcataggaagtgtagtcagttgtaccggttttttctttaccgcttatagaatattaggcaaaacagcttcacttttcggattccagcgtgctccattcattgcccgtgtgcaaacctatggccaaaaagcactcttgttgggatacaaaaaggaattacaaatagccaccgtaaacatatcaaaatccgatattttactacgaactcttcaagaaatgttagatacgccggtgcgtatgcttcatcattttctagaagccagcctgaccaatagcaatccattgcttcatccagcccgtctttattcacttttccatacctggagtagaggaaaagcatatcatgagattcccgggttctataatagttgggatgaagaaagttcagagctcctcattgcttgtgacaatgaattccaacaaattctgaaagcactgccagtccgaatagagccaattcctactttattggaatattatgacagttatgatgcaaggtcacttacccgcaagatacgctccatcattgccttcaaacatattccagctcctatggaaaaaacagaaaaaggatttctgcctgatttcaaaagccggtatttcactgaggattttccatttggattattgataatcaaatcaatagcagatgtattaaatatttgtaccccaaacattgataaaatattgctatgggggcaagatgtattaaacaaagaatatatccacgaaggagaattaaaaggaaaagacctgtcagaaacaggttacatcaacgctgatttgttttataaactactaaaaaattaatgtatggatagtgaactaagaaagcgatttaatcccgatggttcccttctccgtcgccagcaactacgtatgttagagcttctggaggttattgatgtgatttgtcgcaagcaccaaataccctattggctcagttccggaactctaataggtgcagcacgtcacaaaggtttcattccctgggatgatgatctggacatagaaatgcttcgctcagattacctgcgtctgctgaaagttcttcctcaagaacttccggacaatcttgcattgcaaactaatgaaacagatcccaattacatctttatatacggcaaattacgtgataaggattctcatttggaagaaacaaattcatatgaccgtattttccattataccggtatctacattgatatttttcctttagaaaagatcccttattgtctggcttggataggaggacacatgcaagggcagatatacaatcagttgaataataaaaatataaaagaaagcacattatacaaacggattcgtaggatttatcattttaatacccgcatcggttttcccatcctaaggttcattgccaagttattccccagaaaagaattacgccattcttttggcaccgcctatttcaaaccgcgctatacagacgatatttttccactgacagaaatggaatttgaaggaaaaatgttccccgtaccacgccaaacagatgctgtgctaaggaagatatacggtgactatatgcaattaccagatttagagaatatacatccgcattacaacaaactcgaattttacaaataaaggagattgaactatgaaaccgttccttgtagatgtacctgtactcattttgttcttcaaccgcccgcaacagctgtcgcaagtgtttgaacaagtcaggaatgcccgtccctccaagcttttcctctatcaggacggaccacgcagcgaacacgacctgcccggtataaaagcatgtcgtgaagtgacagatcagatagactgggactgcgaagtccaccgtatgtatcaggaaaaaaactacggttgcgacccttcggaatacatttcacaaaaatgggctttttctatggttgacaaatgtatcgtattggaagatgacgatgtgccttccgtttcttttttcacattctgtaaagaaatgttagacaaatacgagcaagacccccgtatcaccatgattgcgggtttcaataacgaagagattactccgggggtaccatacgattatttctttgcctccactttctctatctggggatgggccagttggaaaagggtcattgaccaatgggacgaacattatacttttctagaagacaagttcaatatgcaacaactggaacagctcattaaagaacggaaattccgtaaagactttatctatatgtgccatcgccataaagaaaacaacaaagcctattatgaaaccatcttccacgcttccatgcttttcaactcgggactggctatcgtgcccacccgcaacatgattaacaacttgggagccacggcagactccacccattttgccggttctgtgcatacactacctaaaggataccgccgcatcttcaccatgaaacggtatgaagtagaatttcctctcaagcatcctcgttatgtcattgagaatgtagcttataaaaaagctgtctaccgcattatggggtggggacatccctggattaagataggacgttcttttgaagaactatttctgaacctgcgatacggcaatttttccatcatcactaaagcaataaaaaacagaattaacaaatggctgaaaagagaccaacaccggtaaaaccactcactatttatttttatcacacccgattaacccgtgaaagttacgaggaatggaaagattataagtttccgggacatatcctctacggacttcctttgctggaaaaatatggaatccggtcggtgatgcataaatacaaagctttccccagccgtctgaaactaatgttctatgccactaaagagattctgtgctgcaaagagccatacgaagtgctctacggtacatctttccgtgggttggaacttatcatcctactcagagcattaggcctctaccgcaagcccattgtcatttggcatcacactgctttaaaaacctcatccagaaaaataagagaacgcatctcacgtttcttttataagggcattgatcatatgttcctgttcagtaaaaaattgattaaagactcattagcaaccggaaaagctcccgaagaaaagcttcagcttatccattgggggccggacctcgctttctatgaccatcttctgcaaacaatgccggatcggaaaccggaaggttttatctccaccgggaaagaaaaccgggatgtagacacaatgctgcaagctttctgcgccaccgatcaacaactggacttgtacatagcccccaccaatggaagtgtaaactaccaacagattattgaaagcttctgtctgcccgattctgtacgagtacattatacggacggtgtcatcccatacttgttggcacagaaagtggcacgaaaaagctgtgttgtcatctgctgcatggattttccttataccgtaggtcttaccacactggtagaggcctttgcattaggcatccctgtcatttgctcacgtaatcctaattttgaaatggatatagacaaagaagaaataggaattaccgtagcctatgatgacgtggaagggtggatcaatgccattcatcgcatagccgaccatcccgaagaagcccaaaaaatgggcgccaacgcccgaaagctggcagaaaaacgtttcaatttggaaatcttttcccgtgaaatagcagaaagcttactggaaatatccaagatgtcccctaaaaaacgtacatttgcataaacttttatgcacatgagagtacttatcatcaatacgtctgagcgaataggtggagccgccattgcagccaaccgcctcatggaggctttaaaaaacaacggaataaagacaaaaatgcttgtacgcgacaagcagaccgaccagataagtgtcgttgaactaaagaaatcatggtggaaagtatggcaattcatctgggagcgtgtcgttatctggcaagccaaccacttcaagaaacataacttgtttgccgttgacatagcgaataccggcaccaatatcacagcattgcccgaatttacccaagccgatgtcattcatctgcattggattaaccaaggtatgttgtcactgacagatatccggcgtatcatccaatccggcaagcccatcgtttggacaatgcatgatatgtggccttttactggtatctgccactatgcaggagattgcgataaatatgccacacaatgccacaactgtccgcaactttacaaagggagcaagaaagacatagcctaccgtactttccagaaaaagaaaaaactgtttgaaggagcacaaatcacctttgtagcttgtagccgctggttagaatcattggctaagaaaagtgatctgattaaaggtcagaccattaccaatattcccaatgcaatcaacaccaacctgttcaaacctcgtgataaaaaacaggccagagaaaaatgccacctcccgcaagacaagaagttattgcttttcggctccgtaaaaattacagacaagagaaaaggaatagactatttggtatcagcttgcaaacaaatagcttcctcgtatcctgattttagtaaggagttaggtgtagtggtttttggcaaccaagccgaacaatacgcttccctgtttcctttccctatctatccgatgaattatgtcagcaacgagaaggaactggtagatatttacaacgcagtcgacttatacgtcacaccttctttacaagacaacctacccaataccatcgtagaggcaatggcctgtggtattccgtgcatagggttcaatgtaggaggtattccacaaatgattgaccacctgcacaacggctatgttgccgaatatcagtcttccaaggatctggcaaacggaattcactgggcattgaccgaaggagaatatgaaagtctgagcgaagaagcctgccgtaaggcagtatccagctattcggaaagtaccatcgccaagaaatatgttgaaatctataacaagattacagggaatcatgcataaccatcatcctcatcccaagttttctattattactgtcacctacaacgccgcaaaagtattggaggatactatacaaagtattgttacacaaacttataagaatctggagtatattattgtagatgggggatcaacagatgaaacactggatatcattcacaaataccaggaacatatcaccactgttatcagtgaacccgaccaaggtttatacgatgccatgaacaaaggaataaaattggcaaccggagattatctttgtttcttgaatgccggtgacggcctgcacgaggatgatactttgctgcaaatggtacattccatcaatggaacagccctgccgggagtgctatatggagaaacagaaattgtggacagtcaagggcattttttatatatgcgccgcctgtccgcacccgcaacgcttacctggaaaagcttcaagcaaggaatgctagtctgccatcaagcctttttcgcccgccgtgatctggtggaaccatatgacctgagatatcggttctcggcagattttgactggtgtatccgtatcatgaagaaagcggatgtactccataacacccatcttactcttattgattacctgaatgaaggaatgaccacccgtaaccataaagcctccttgaaagaacgcttccgtattatgagccgtcactatggatgggcaagcacagtgacacaccacttatggttcgttctgcgcctgctttacaaataatccggagtctggcttacgacgggccttaatcaattttcctacgggctcttctgacctgcaagaataagaacaagaccagcacacaggtcaatacacccaacgccacaaaagccaccgtttccgtaacatgcagcgatttcggatcgaacttaaattccactacatgctttccggccggcacattcatcgcccgaagaatataatccgctcttccgtgcggtgcttccacaccatcaatatatgcctgccaaccaggatagtaaatttccgaaaaaaccactgttcctcctgtcttcgaattaacctcatatttcaagtcattaggttcgtacgcagtcagtttgattgtacccagtgtatctgtttcagccgccgattttacctccgcactgaattttttatctacgacagccgtttttgccggatctatccgatgcaaagcatctatctcttcattggcattatccacatactgcacctcgtttacaaaccaagcattgcccagcgtataaggattctgtatcgggacagtctttccaccttgcagcggaaaaataaagtaacgggtattcagcatattcaacacaggaaaaccggacggagccaccttctgcatatcgcctcccgcctccgaaacagccttgaacacgccattcatctcagtgctgatatgctcctctatcatttcttgatagcggcgcagcttggcggcatgatatccaccgatgctcttatgccaataagaagtcgtattttcattaaacgtattgccggctaggttcagtacccggaaatccaacgttttatcggccaatattgccttatccgtttcggtcggtttaaaggaattatcctgctgcaccttctccacaaattgttcatcatacaaataacgtttgttcacactccacatatctgccagacagaggacagccaatgccagaatcgtcaccttcgcctttagtttgcccatgccatataaccaaagaactgccgtacctatcataataacaaagaaactgcgccatgcatccgaagtaaagatactctgacggatttcttccagattagcaagtaacggagccagctgatctgccggaataccctgcaatgcctgcatttccatacttgaaacatacgacgggaaaaagaaaccgggagctaatgcaaacaataaagcgatgccacctgtcaatcccagactgatataaaacgaccgggcctgttccttaaccaactgagggcgtgccattacctcctttaaagcaaggacagccaacaaaggtatggtaaactcagcaatgaccaaaatagaagaaaccgcacggaatttatcgtacatcgggatataatccaaaaagaaatcggtgaatcccataaaattctttccccatgacagcaggacagacaaaactgtagcactcaaaagcgcccatttcataggacctttcactataaacagcccaagaacaaacagaaacatcacaaacgcccccacgtatacaggaccggatgtaccgggttgctcaccccaatactgacctatctggctatagatactattatacataggattcgccttttccatcgccttttcgttagctgccaaaggtacggaagcaccacctttcacattagggacaagcaaagagaaagtctcaccgataccgtagctccactgagtgatataatctcgttccagaccactttttgtctgattatgactatccggtttcaccagctcactctttccacgcatcgtttccttactatactcatacgtatgatataagttagatagatttatacaaactcccaaaataccggccatcaacaacacaccagttgctttcagaaatcgcggcatttccttcttctgccaagcatccactccgaacgcaaccgccataaagagcatgacaaaaagaaaataataactcatctgcacatggttcgacactatttgcaaagcaacaaaaaccgctgtcagcaaaccacctgacaggtatttccctctataagccaataccataccggctatagtgggtggaatataagccaaggttacaaatttccagatgtgtccggcagctataatgatgaaaaaataagaagaaaacgcccacaacacagcccccaatgaagccagccagaccgagaaatcgaatgcacgcaataatatataaaagcccaacagcatgacaaatacataccacacataattcgggagatacaaatgatataacttctccactcccttcagggtatccgtagaatcataactgggtgccatctgataagtaggcataccaccaaaaatagaattagtccagcgcgtacgctctcccgtacgttccagatattctttcgcttcttcaccggcaccaatgcccgccacagagtcatgttgtgaaaggatacgcccttctgtcactgccggaaaaaaatagacgaatgagatgacagcaaaaaggataatcactactatatcaggtagtattcttttaaataagttcataagtatatctgtttattaacgttgcaaagatacgatatactctgataaaatgcgtacatttgcagccataaataaagttgaattatgaaaataggaattataacagccatgagttccgagcagaaacaagtagcgcaactgctcgaaaacaagaaagaatacaccgaaggtcctttccaatatactgaaggcagcattagaaataataccattatcctgatgaaatgcggaataggtaaagtgaacgctgctgccggtactgtagaactgatccgtaccttccaacccgactgtgtcatcagcaccggtgtagcaggaggcatagacagctgcctgaaaataatggatgttgtggtgagccgacaaattgtatatcatgatgtatggtgtggagaaggcaatatgtacggacagatacaaggacttcccgcccgattcgaaggtaatgccacattgtttgattgcgccatgtcactggatactccgaccgccattcatggaggtctgatatgcagcggagacaaattcatcaccgaccgttccgaactgaacgacattaaagaaaagttccacgaagggctggcagtagatatggaatcgggagccatcgcccaaatctgttatatatataaggtaccgttcatcagtttccgtatcatcagcgatacgccgggatccgacaaccattgggaacaatacacaaatttttgggagactatagccgaccgttccttcgaggtcactcataccttcctttcctcattaccagctaatttataaaaacgaataatatgaagacaatacccagttttaccattgaccatatccgcttgcttcgcggtatctatgtatccagaaaagacgaagtgggcggtgaaacggtcacaacctttgacatccgcatgaaagaacccaaccgggaacctgctttggggcaaggagccttgcataccatagagcatctagccgctacctacctgcgtaaccaccctatatggtctgacaaaattgtctactggggaccgatgggatgcctcaccggtaactacctgttaatgaaaggcgatttaaaatcggaagatattatagaactgatgcaggaaacgttccgctttgtagccgattttgaaggcgaagttccgggagccgcccctaaagattgcggtaactacttgcttcatgacctgcctatggccaaatgggagtcggccaaatatctgcatgaagtattggaacacatgacaaaagataatctgtattatcctactaaagagtaattctcaacaacagaacagtagaaacgtaataacagaaaatagaaaagccgctttcttttcagagagcggcttttctttaagtccttttcaatagagattgaattacttacgtaatcctagtgctttaacaatagcacgatatctttcgatatcacggttcttcaggtagttcaacaacgcacggcgtttacctaccaaagttgtcaaagctctttcagtgctataatcttttctgttgagcttcaggtgctcagtcaggtgagaaatacggtatgaaaacaaagctatctgcgcttcagctgagccagtatcagtgttagactttccgtacttttcaaagatttcttgttttttagctgcatctaaatacataattcttagattttttgatatataaaattttcatttagcaggtgcaaagatagacattatcttttatatcacaatgaattagagcgatttattttaaaaataatcttctatctcttttactgtcgcatctttcagcatatcttcgaacattatagcaaaggctgcccaactgacattgaatgaaattgtaaacccgatttctctccatccgatgaataaaagtgcccagtccgaaaccatttcttcacgaatttcggactggaccctttttaaactatcgctattttatttcaaccagccactcatggaacctatagtgcaatacatattcggattggctatgactgataactttatcccaagaaatccggtttacatcaatttccgcccttgccagccacaaagcattttccatcacataacggtctaaagaaagctcaagcatcatccggctcaaataaaaagcagactgttcataggcataccatttaccgcatgattttttatccatgatttctaacaggctgctcataacattctcctttatacttaataccggatcttgtaataacggatgtcatgatacctgtcatgagatggttggttataatgacatctccaccttcagaaagcattttgtcgatttctatggcaccactccctctacatttaaaagtaaagaagatacggaagataaaaaataatcgttaacagccaaatattttttagaataaaaatcgtacctttgcagccaaatatataggtatagtatgcaagacattagaaacattgcgatcatcgcccacgtagaccacggaaaaacgactttggtggacaagatgatgctggcgggacatttgttccgcaacgaccagacaaatggtgaactggtattggataataatgacttggaacgcgaaagagggataactatcctttcaaagaacgtttcaattaactacaaaggaacaaaaatcaatattattgatactccgggacacgccgacttcggtggcgaagtagaacgtgtactcaatatggctgatggatgtatcttattggtagacgcattcgaaggcccgatgccgcagacacgcttcgtattgcaaaaggcattacagatcggattgaaacctgtagttgtagtgaacaaggtggataaacccaactgccgtccggaagaagtatacgaaatggtattcgacttgatgttcagcctgaatgctacagaagatcagttggatttccccgttatctatggttctgccaaaaataattggatgagtactgattggaagaccccgacagaaaacctggttccgttgttggacgctattattgagcatattccggcaccgaagcagttggagggaactcctcaaatgttaatcacctctttagactattcagcatatacaggtcgtattgctgtaggacgtgtacatcgtggtacgctgaaagaaggtatgaatattacactagcaaagcgtgatggtagtctgataaagtctaaaatcaaagagctacatacttttgaaggcttaggacgtaaaaagacaaatgccgtttcatcgggagacatctgtgctgtagtaggtgtagaaggcttcgaaattggtgatactatctgcgatttcgaaaatccggaaccattgccccccatcgccattgacgaaccgaccatgagtatgttattcactatcaacgattctcctttcttcggcaaagaaggtaagtttgtgacttcacgccacatccaagaccgcttgaccaaagaattggataagaacctggcattgcgtgtacgcaaaagcgaactggaggacggtaaatggattgtttcaggacgtggtgtgcttcatctttctgtcctgattgaaaccatgcgccgcgaaggatacgaattacaagtgggccagcctcaggttatcttcaaagaaatagacggagtaaaatgcgaacctatcgaagaattaacgatcagcgtacccgaagaatattccagtaaaatgatcgatatggtaacccgccgtaaaggtgatttagtttctatggaaacacagggtgaccgtgtaaacattgagtttgatatgccttcgcgcggtattatcggtcttcgtaccaatgtactgacagcatcggccggagaagcgatcatggctcaccgttttaaatgctaccaaccatacaagggcgagatagaacgtcgcagcaacggttctatgattgctatggaaagcggaacagcttttgcatacgctattgacaaattacaggatcgtggcaaatttttcatttatccgcaagacgaagtatatgccggccaagtagtaggtgaacatgttcatgaaaacgacttggttatcaatgtaactaaatcgaagaagcttaccaatatgcgcgcatcaggttctgatgacaaggcacgcatcattcctccggtagtattttcgttggaagaagcattggaatacattaaggaagatgaatatgtagaagttactccaaagagtatgcgtatgcgtaaagtgattcttgacgaaacagaacgtaagagagctaacaaaagctaatcaatctacctttaatataaaaaatcccggagaccatattatcttcgggattttttatatttaatctacaaactttactttactaacttctctaggtttagcagccggcatttcatcgggataaccgaaagcaatcgcataaagcaactcatacccttcactgaatcccaactgtttcatatattcggcagctgcaggtgatttcatgaaacgcacaggccctcccaaacagcaggaacctattcccattgaccaagcagacaaaatcatattctcacccaacagaccacaatctatctgtgacatatcatatgcaggatcgttagcaataaacactactgtaggagcattattgaacatattctgaaatcccggacgttctgccgctttgggattttcttttttgaaaatttcagtcaaaccattgataaattccggattatctactacacgaacctcccatgactgtttattcattccattaggtgcattgattccacattccactatagtctgcattttttcacgttccacagccttgggcttatacttccgtatactacggcggctcataatagtttctattacagggtctacctgactcacggaaacactatccgtaacaacttccttctgttgagaaccttgcgatgtacagctgcataatacgaacatacctgcaccaactaacattaatctaaataatttcatttgctatcatatttggtttgcaacaaatctaggcattttcaagcataaaaaaaagtggttcctatcgggaaccactttttatatgttaaatctgtaaaattcagattacaatttcggaccggcagcaaccaatttcttacctgcttcgttaccagtgaacttagcgaagttcttgatgaaacgaccagccaagtcttttgctttttcatcccactgagcagcgtcagcgtaagtgtcacgaggatcaaggatcttcggatcaacacccggcaattctgtaggaacaacgaaatcgaagtaaggaataaccttagtaggagccttatcaatagagccatccaaaatagcatcgatgataccacgagtatcgcggatagagatacgtttaccagtaccgttccaaccagtgttaaccaaatatgctttagcaccagtcttttccatcttcttaaccaattcttcagcatacttagtaggatgcaatgacaagaaagcagcaccgaagcaagcagagaatgtcggagtcggttcagtaataccacgttctgtaccagccaatttagctgtaaatccagacaagaagtaatactgagcttgttcagggttcaagatagataccggaggcaatacaccgaatgcatcagctgacaagaaaataacttgttgagcgtgaggacctttagagataggtttaacgatgttttcgatatgatagataggataagaaacacgagtgttttctgttacgctcttatcagcgaaatcaatcttaccgttagcatcaactgttacgttttccagcaaagcgtcacgtttgatagcagcgtagatatcgggttcactttccttatccaagttgataactttagcatagcaaccaccttcgtagttgaatacaccttcgtcatcccatccgtgttcgtcgtcaccgatcaacttacgtttcgggtcagtagacaaagtagtcttacctgtacctgacaaaccgaagaagatagcagagctagttccttccatatccgtgttagcagagcagtgcatggaagcgataccacgaagcgggttcatgtagttcatgatagagaacatacctttcttcatttcaccaccgtaccaagtgttcaggataacttgttctttagtcttcaagttgaaaacagtagctgtttcagagttcaagcccagttctttatagttatcaacttttgctttagatgcattgaaacatacaaaatcaggttctccgtaagcttccagttcttcagcagtcgggcggatgaacatgttagttacgaaatgagcctgccaagctacttccatgatgaaacgtactttcatacgagttgcagcattagcaccgcagaatgtatcaacaacgaacaaacgcttgccgctcaattgttttacagctttagacttcaagtcagcccaagcttcttcagtacaaggtttgttatcgtttttatattcgtcagaagtccaccatactgaattttcagaagcttcattcttaacgaagaatttatctttaggagaacgacctgtgtaaacaccagtcattacgtttacagcacccagttcagtaacctgtcctttttcgaaaccttccaatcccggtttagtttcttcagcgaaaagcacatcataagaaggattgtggagaacttccttcacgtcggtaataccgtacttgcttaaatctaaatttgccattttttaatgatttaatttggttattgtataatgttatttttactctttattttctgaaagaagatgtttttcaacacccccttgtctaaggcgctacaaaattagtgctttattttaaaaaaaagaagttattagagaaaaatttccgtaataatcaaatatttatatttgtgtaacaaaaatgcaattcgtactttacaaatctagaaattatttgtttctttgcaggtcaaagtcaacaatataacaaaagcatagatatgaaaatcatcaatctcagtgaaggcaattctctcctaaaccaatatgtagcggaattgcgcgatgtacatattcaaaatgatcgtatgcgtttccgcagaaatattgaaagaataggagaaatcatggcatacgagatgagtaaagcactaacctattccgtaaagcaagtacagacacccttgggaactgccacggccagcacacacgatgacaaaatagtgatcgcaacggtattccgtgccggactgccgctgcacaccggttttctgaacatgttcgaccatgccgacaacgctttcgtttccgcattccgtttttacaaagatgatgaacaccgtattgtagatgtacacattgaatacatcgccgctccttcattgaatgacagaaccttgcttctcgttgatcccatgcttgccaccggtgaaagcatggaacttgcctggaaagcgttccttaccaaaggcaaaccagctaaattgcagatggcctgtgtcattgccagccaacaaggggtagcgcatatggcagaactttttcccggcgatgatgtcacattatggtgtgccgccatagaccctgtcttggacgagcacaaatacattgttccggggttaggggatgccggtgatttatcattcggcgagaaactctaaagctcaaactataaggacagtttcaggtgtgttctcttacacactaaaattctaaattaaatggttagtaaccggcaattattcactgcctattactaaccatttaatttttagaacaactctgtagatccggttcctacagggaaaatgaaaatattatttcacttcccaaatatcatttgtcatcagtaattcctggaaattatgatattttttctttgcggccacttcttcaatctgtgcattaacggcgtcatcataagtaggcgcttccacatcacggatcacccctaatgcaaccggaaaatccggtccttccatcaatgccagtttcaactgcaaagtattatccatacaatgagcatcgtgcactaaaatgtctttttccgtcacaccattctcgccaatctttaccactttcagcccgaaaccttcctgcatcagcccgtattctttatctaccccaaacaacatcggtttaccgtgttccaaataaatggcattctttgaacgaccttctttcgtatatactgattcgtgtgttccatcattaaaaatgacgcagttctgaagaatttcacatacagccgcacctttatgattggcagcagctttcagaatctccactgtaccaggaccatccgtagctaccgcacgggcaaagaaacgcccacgcgcaccaaaacataattcagccggatgaaacggatcttccacagtgccgtaaggagatgatttgctaacaaatccacggggagaggtcggagaatactgtcctttggtcaaaccatatatacggttgttcaacaaaatcatattcaagtcgatattacgacgaacggcgtgtataaaatgatttccaccaatagccagcccatcaccatcccctgaaatctgccagacagtaatcttcggattagccaccttgcagcctgtagaaatagcagccgcacgaccgtgcacagtctgcatggcatatgtattcatgtaataaggcagacggctggaacatccgatacccgaaataacggcagtatcatgaggagccactcccaattcagccatcgctttgtgcagcgaagccaagaaaaaatggtcaccgcaacccggacaccagcgaggttgtccctttttgaattcttttgctgtatattcgttcatagtctttactttctttacggttattatttatttaaaatctcagtgaaagcatcaactaactcgctgactacgaacggctggccttttacctcattaaactgataaggaacaaatccgtccactttcatacggagatatccggcaaactgaccaagattctgctcagccacgactaccttcttatatttcttcagcacttctgccgtattgtgaggcagcgggttcaaatgaacaaaatgtgccaaagcaaccttcttgcccgcatggttcatttcctccattgctgaatataaatgaccgtaagttccaccgaaacctactatcagcaaatctgcatcctctacgcagccttgcaccttaacatcaggcactggaattttagcaaccttctcggcacgcaaacggcacatcaaattatggttttcaggctcggtagaaatagcacctgtatcactgtctttttccaagcctcccaaaatatgcatataaccttcctgtcccggcaatgcccaataacggacacctgtttcggcgttacgcttgtaaggagtataattatccttcatttccggagtaacatagggtgggttaatagccggatagttcgccagatcaggcaacttccatgcaccggaaccatttgctacaaaaccatcagtcagcaacaccaccggggtcatgtgttccaaggcaatcttacaagcatcataagcagcatcaaaacaatgagttggagaagctgcggcaatgaccggcataggagattcaccgttacggccaaacaaagcctgcaataaatctgtttgctcagacttagtaggcaaaccagtagaaggaccgccgcgctgtacattaataaccaccaatggtaattctgtaataacagccagattcatagcctctgatttcagacaaacacccggtcccgaagtagaagtagctgctaacgcacctgcaaacgaggcaccgatagccgtagcgcaacctgaaatttcatcttcacattgaaccgtagtcactcccaatgatttatgtttagaaagttcatgcaagatatctgttgccggagtaatgggataagatcccaggaacaaacgcagacctgctttctcggcagcagcaattaagccataagccgtagccttgtttccgctgatatccatgtactttccaggtactttagacttagtttccaccttataagtatgatccacagacgcatgcgtattgtgcccataatcatatccggcgtgtatcactttaatattcgcttcagctatttgcggcttctttgcaaatttctcgcgcaagaaattttcagcaaccgccaggtcacgattaaacaaccagcagaccaatcccaaagcaaacatattacgacatttcaacattgacttgttgtccatgcctgtatctgccagacaatctttcaccatctgcgaaataggagcagcaattacatcctgcttaatacccatttcttcaatcggattgtctgttttgaaagccgccttgtccagatctgatttctgaaaacaatctgtatcaataatgatacaagctgtggacttcgcaaatttgtattgtgttttcaatgcagcggcattcattgcgaccagcacgtcgcatttgtcaccaggggtaaaaactttacccgcaccgatatgcacctggaaacctgacacaccggtcaacgaaccttgcggggcacgtatatccgccgggtaatcggggaatgtactgatatcatttcccactgtagccgaaatattagaaaagatatttccggccagctgcataccatcgcctgagtcgcctgagaaacggaccaccacttggtccaactccttgactatcatttcatctgccataacttattatttagggttacaaaatttcactgtttgcaaagttcggaaagttctgtcaaaggacaaaatattccgctatcaaactacgtttgaatatcaaaatgtacaaaattaaaggtttatttgtttccaagctaagaaaaagcagagataattacctgtttaaaagcataaattcctatcattatgacagcatcaaaaacgattcatttttacaatttattatttttatccatgttttatgaacaacatgaaagtttatagcagaataacaacattattagattataaaaaacagacaaaaaacaacaaaacaacaaagaaaggattattttcttcccacttaagacatttttcaatctttcatattgccattttaacaaaaagaagtacctttgtacccataaaggggccttgtagttcaacggatagaatagaagtttcctaaactttagataggggttcgattcccctcggggctacaaagagcagtaaacaattgttatacaaccgtttactgctcttattttactggatagttttcaaatctgcttatttaatcaccccaagttctttgcccactttaataaatgcagcaattgccttatccaaatgtgccttttcatgcccggcagacaactggacacggatacgtgcctgtcctttcggaacaaccggataatagaaaccggttacatatatgccctctttctgcatcttggcggcaaaatcctgagacagtttcgcatcataaagcatcacagcacaaatcgcgctctgagttggtttgatgtcaaaaccggcagccagcatcctgtcacggaaataattcacattatccatcagcttagtatgcaaagcatcactttctttcaatatcttaaacatttccagactagcaccgataatggcaggagctacagaattagagaataaataaggacgggaacgctggcgcaacatatcaataatttctttcttaccggtggtaaatcctcccattgccccaccaaatgctttacctaatgtaccagtaaagatatccacacgcccgtatgcattaaactgttctgccacgccatgccctgtaggacctactacaccggccgaatgagattcatccaccataaccaacgcgtcatacttttccgccagttcacaaatcttatccaatggagccacattaccatccatcgagaatacaccatctgtagcaataatacgatgacgctgtgcctgcgcttcctgcaaacaacgttccaggtcagccatatcagcattggcataacgatagcgttttgccttacacaagcgtacaccatctataatagatgcatgattcaacgcatctgaaataatagcgtcttcttctgtaaacagcggttcgaacaaaccaccgttagcatcaaaacaagctgcataaagtatagtatcttctgttttaaaataatcagaaatggcagcttccagctgtttgtgcaaatcctgagttccacagataaagcgtacggaagacataccgaagccatgtgtgtccatcgcctctttggcagcattgatcaagcgttgattatctgacaaacctaaataattgttggcacaaaagttcaacacatcttctccgtcattcaccttgatgtccgcacgctgaggtgtggtaattatacgttcatttttatacaatccggctgccttaatatcagccagttccttcgcaaggaactccttcattttaccatacatagctttgtttttttattaagtatatagtttaagtttaaaaatcagtctgacttgacaaagttcttatttttttttgatatccgattaaattatagagaaaattttgataaaatatgcagttttctatctatctttgcttccaaaagaaaacttaaagcaaatagcaaactatgaaaaatgtattaattatcggctccaccggtcagatcggttcggaactaaccatgaaattgagaagtatttacaatggtaatatcgtagccggatatattcccggtgctgagcctaaaggggaattaaaagaatcaggcccttctgccatcgtagatatcaccaacgaacaacaaattgccgaaactgtatcaaagtacaacatcgacaccatttacaacctggcagccttactatcggctgtagcagaagccaaacctcaactagcatggaaaataggcatgggaggcctgttcaacgtattggaagtagcacgcgaaatgggttgcgccgtatttaccccaagttctatcggtgtcttcggcaacaacacccctaaagacaagaccccgcaagacactatccgtaatccgcgtaccatgtatggcgttacaaaagtatcaggagaattactgagcgattattaccatatccgttttggcgtagatacccgctccgttcgtttccccggattaatttcgtatgtcacacctccgggtggcgggactaccgattatgctgtagacatctattattcggctgtaaaaggtgaaaaatttgaatgtcctattgcagccggtacattcatggatatgatgtatatgcctgacggtttacgtgcagccattgaaatcatggaagcgaatcccgacaaactaattcatcgcaattcgttcaacattgcttcaatgagttttgatccggaaattatttataacaatataaagaagtatatgcccgacttccatatggagtacaaagtagatccgctacgtcaagctatcgccgaatcatggccgaactcactggacgacacttgtgcccgtgaggaatggggatggaaaccggaatatgatctagacagcatgacacaggatatgcttgccaaactaaaaatacgattcaataaataa

SEQ ID NO: 370 - DNA, 39201 bp, unidentified
  source 1..39201: mol_type = unassigned DNA
tacttctcttaagaagataaagtgactatcgctactctttcaagttcattatatagatgtacttctcttaagaagagtagtatgttttagtataagtgaacacttgccttttagaatagcgatgcaagggatgattaaaggaataaaagattcctacttttggaaagtgttttgtaactgcttgattattaacaaatagaataatcgtgcaggattggtgatatttgcctgaactaaagtatatcaatgggaaatactgaatacgcacaatggtatgtcatgcgtgatttaaaacggtgtaatgctaaaaagccggcatacaaacaactgcaagaagcaggagtaaaggtatttgtccccttgaagtggtaaatcattttgcaaaagggtaaaaaggtgcgtgagaaagttccggtcattcaagatttgctctttgtttatgattcccgtcagcatttggactccattgtggaaagaaccaaaacgcttcaataccgttggttgcggaatacgtttcgggaacctatgactgtgtctgatttggaaatggacagattcatgcaagccgtcagcagttccgattcacccaaatattatttgccggaagagataacccctcagatgtgcggacgtaaaattcggattataggaggctctctcaacggatatgagggctgtttgcttaaaatacgaggcagcaagataaaacgcttgcttgtcgaattaaagggttatctcgctgttggtgtggaggttcttcctgaatatattcaatttgcctgatacgatatttatgactgttatttcaaatgtaatggacaatcctagagccttttgggttgtcaactccttgtttgtattcgccttgagcgtattttgtgccggcgtcttgattccacaaatcttgttgatatcatttcgtaagcgtctgtttgatgtgcctgatgaacggaagatccatcagggagtagtaccccgtttaggagggatagccttcaaaccggttgtctttttctcggtggcacttgctttgggactcagtatgttgttgggatacggtcagcttcttggtaatatcggcagtgaaagccgcccgttggcattcggcttctgtaccattatgatgctttatttggttggtatggctgatgacctgattggtatctgttaccgtgccaagttcgccatacagattatttgcggattactggtcattgcaggcgggctgtggatcaataacctgcacggtttgctgtttattcacgctcttcctgaatggattggataccccattaccttattcgccgtggtatttattatcaatgccatcaatctgatagatgggatagacggattggcttccgggttgtgtggagtggctatgcttttttatggattggtattttttataataggcgaatacatttatgccctgctcgcttttgcgacacttggagtgctcgtcccctttttctattataacgtatttggagatcctgccaaaaagaacaaaatattcatgggtgataccggcagcttgacgattggcatgatgacttgcattttaagtctgaaactgcttgacgggtttccggtaaatccctctatgcaacagcctaatgctttctttttagcctattcaccgcttatcattccctgttttgatgtggtacgggtttatttgcatcgtgtgcgaaacggaaagaatccctttttgccagataagaaccatatccatcacaaaatgcttgctgttggcatgagacagcgtacagttatgattgccattgtactggtatctgtctgttttacactgtgcaatattctgctttcacgttatataaatgtaaccttgcttttaatactggacatctttatatggaccttgggtaatctatggttaacccggagaatccatatagttcattcgaaactatagttttatatcaatatgaatttttgcaaaaatttaattggggcaatattactcctgtttttaggagcttgctcaacttcaaaagaagtcacttattttcaagatttacgtccgggcgaaagcgaattggcgcttactgctctggtagagattaagattcaaccgaaagacaaattgtctattttagtcaacagccaggatttgcgcctgaccaacctgtttaacttgccgattgtttctcaacagattggcatggagggttcttccggttctaatcgtggtgtgtccggttatacggtagattccaaagggaacattgactttcccgtgttgggagaaattcacatagccggtatgacccgtgaagaggtggctgcctatattaagaaagagctacagtcgcatgatttgattaaagaccctgtcgttacggtggaatatatgaatctcagcgtagccgtaatgggtgaagtgaacaatcccggccgttttagtatcgacaaggataaccttacaatcctggatgccttaagccaggcgggagacctcactatctacggaaagcgggaaaaggtattggtgttgcgtcaagaagaaggaaaacaacgggtttatggagtcaatctttgctctgccgagcatctttacacttcgcctgcttattatctgcaacagaatgatgtggtatatgtggagcctaatgctaccaaagcccgtcagtctaccgtaaacgggaacaatgtgcgcagcacctctttctggatttccctggcttctttattgacctccatcgctgtacttatcgctaaataaaaaagagaaatggctactattcagaataaatcaacagtacaaaatacgcaggatttcattaccatacaggatttattttacctctgtctcaacaaatggcactggtttgccatttcattggccttatgtttgggggttgcgaccttttatctgttgagaaccccatcggtatatgtcaggactgcctctattttgattaaagacgattccaaagggaaatcttcttctacggatatggagtctttttccgatttgggactgtttacgaccaacaccaatgtctataacgagatgggaactttgaagtctcccgacatcatgcgtgaagtggtgtctcgattgcatttggaaatgaattatcagacagacggacgttttcataaacagactgtgtatggaaaccaacttcctgtccaggtggtgattcctaatctttccgagaatgaatccgcaactttcgaactgcatctggcaaaggatggtgcagtggaattatcctcttttacacggaatggaacagaaatagaaaatgatggttttgtgaaaggcaatttgaatgacagtattcaaagccccctaggccctattgtcgttattccatcggctgcctattcagataaaacggtaagcacaatttatgtaacccgccagtctttgtctgcggcatcagctggctgttctgctcgcttgaatatatcccagaacgatgagaagtccaatatcatcacgttgtctttccaggatgtgtccacccaacgggcggaagatgtgctcaatacccttatatccgtttacaatgagaactgggtaagggacaagaatcagatagcggttagtacatccatgttcatcaatgagcgtttgggtgtgattgagggtgagcttggcaatgtggatgatgatatatcttctttcaaaagtgagcatttgctgccggatgtacaggcggcggcaaatatgtatatgactcaagccaatgaagccaatgctgcaattcgtgaattgaacaaccaggcatatatggcccgatacataaagaactatttgaccaatgaaaacaataaacatcagttactccctgccaattccggcattgaaaatgcaagccttgccacacaactgaatgaatataataccaagttattggagcgcaatagcttggtgtctcacagtagtgtcaagaaccccttagtcagggaaatggacaagtcgttggatgatatgcgaagcgctttgatcacttccattgacaaccaaatggtagctttgcgtgcacaaatcagaagtttggaggccattgggggacaggcaacctcgcagattgcctccaacccgaagcagtccaaatacctgcttagcgtggaacgccaacaaaaggtgaaggagtcactttacctatatctgttacaaaaacgtgaggagaacgagctttctcaggcatttacggcctacaatacccgtattataacaaagcctggaggaagcatgattcctaccgctcccgtaaagaagaacattttcctagtggcttttgccttgggtatattgataccggtagtcatcatcttcattcgtgagaacatgaatacccgtgttcgtggaagaaaggacttggatggtctaagtgttccctttatcggagaaattcctttgtctatacgtggtaagaaaagagtaaaatcacatgaggcacataccattgtggttaaagaaggaagccgtgatattatgaatgaggcttttcgtgtcttgcgtaccaatctggaattcatgattggcaaagatcaatcctccaatgtgattgtagttacctcgttcaatccgggaagtggaaaatcgtttttgaccatgaacatagccatgagtcttgccatcaaaaataaaaaagtattggttatcgacggcgaccttcgccacgcctctgcctcagcttatatccattcgcccaaaattggtttgagtgattatttaggaggacagatcgacaaactttcggatattattgttacggacgagcagcacccttcattcagtttcatccctgtcggcactatcccccccaacccgaccgaactgttgttcgatgaccgtctacagaaagcaatccataccttaaagcagcaatatgatgttgtattgatagactgcccgccagttgaattggtggccgatacgcaaatcatagagaaactggccgaccgtaccgtttttgtggtacgtgcaggcttgctggaacgcagcatgcttccggagttggaaaacatctatcgagagaagaaatacaagaatatgtctgtaatcctcaatgggacagaaggagccggcggaagatacggttatcggtatggctaccgatacggttatggaagcggttcttattacggcagtagctccaagtaatcatgtggccgttccgtaaaaaacagactttgaaagaaagtggatttttccgtggcttcaccgactggcattgccatatcctccccgatgtggatgacggcgtacagacgatggatgaagctctgcaaattttaggggaatacgaacgactgggagtaaaggaagtatggctcactccgcacattatggaggatatgccaaatacgacccaacatttgagggcacgtttcgttgaattacaaagcgcataccaaggtaatatagcattgaatcttgcttctgagaatatgctggacaacctatttgaagagcgattgaataagaacgacctactgcctattggtaaagctggcaaacacctgttggtggaaacaagttacttcaatcccccgatggacttgcagaatatcctgctccgtatcaaagcaaaaggttattatcctatattagctcatccggaacgttatctgtatatgaacgagagtgattaccaacagttgaaatctataaatgttcagtttcagcttaatcaattttcgcttctatgtttgtatggtaaagaagttaagaaaaaggctttaatgctccaaaagttaagaatgtacgactatactggtacagatttgcatcgattgaatacattgaacagagcaatttgtttataaataatttattgcgtaagaagtatgaatataaaatatgatgatctaactaaattatttgccattgagcaagctaaagaaacttcatataggagtacgttacggcaaagtcttgcctcattcttaagtttatgtgataaagctgacatctccgttgatacgaagactgaattgaagtacatttgcaattacataaatgatattgttaagtattttaaaaaaggacttcacagtaccgctttttcaaaaatgaaaaacttatttgcaggaacaaaaaatcataaggtattaaacaacagtatgccatattcaaccccttgctgcaggaagttcattgtatagaatttgagtgaaaggggattacgaaatatagaagagtttcctctttatgaagtccatggatagtctgaatctaaaaacatattttgtgctgtcagaaggcttcaacgcacaattctaacatgtccccaaaggatgcattaatttgttttggaaaatgcaaatacaatagatgactagcaatgaatgaaaaatacccctttaacacattaatatcgaaatatcgcatatcggcaatgggaatatcaatggtttccattatgctataccatcaaaattggattaccaacggtattttctttgaatgggtgcgaatgttaggatacataggtgtagaggtgtttttgttcatatcaggctttggtattgcgcattcgcttgcgaaaaactcgttaggacagtattacaaaaatagggtaatcaggcttataccagcttgtattctgttcggtttatgcaagattgcattgagttatattcccacgatgcctcctatgcaagacttctttttggacttgttttctctgtcacattggtacatatatgccatagttatttactacctgcttgcccctgttatttacaaaataatagacaaacgggggggggattgcatttttagcaataattattgccacatatataacaatttgtttttggcaatatgaagccgatgctccatatttgataaaatatgggcgttgggttgtgaaacggtttcctgtgttcgtatttggaatgttcatagctattaggccgttgagatttggaatctacaaagtggttttattgggagtattggccacattggccaatgtgggcgtgttccactatacaatattagccaatagtgacccaacgagtcatgatttcttcacaaagttggcgatattgctaccggacaggtcggttattcccgataacggacgtttcatattggatatgtttaatgtgttactactgattccgttattcgctcttattgcctttcttatgaagaaatctcatatattattcattattaatcgaataggaaaatattcacttgaaatatatttgtgccatcaatatatatttacagtgatttcagaacattttgccatgcctcctatggcggctttagctgtgggcatgtgcttgtcgtttgctgtggcatacttgataggtacaacagcaagctcaattaaaacgtgtgccacaagatatatttgaaaaatactgcaaccatgccgagtgaatcaaccaataagcgcatagccaaaaatacactgctgctgtatgtcaggatactattgacaatggtcataggactgtacacgtcccgtgtggttcttgcggaattaggaatatcggattatggcttatacagtgtagtaggcggcatcgtaacgatgtttactttcatcaatggatcgttgaatgctggtacacagcgtttcttgacatttgaattgggacgtggcgatattgtacaactgaagaaactattttcgacagctattgttatatacacctttttggcaatgataatactgttccttgccgaaactataggcttatggtttctgttgaataaaatgaattttgcccccggacgattaaatgcggcaatttgggtatatcaattttccatcattgcctgcatggtcagcatcattcaagtgccgtttatggcagcattggtggcacatgaaaaattcaatatgtatgcttatatgagcatatatgatgctgtgatgaaacttgccatcgtcttcttgttgacatttgcgccatttgacaagctcatattctatgctttcctcattttgttggtcagcacctcttcagccgtcatatataattggtattgcagaaaacattttgtcgaatgcaggttttcttggagtttcgacaaaagcgtgtttaagaaaatgttttcgttttcagcgtgggatatagttggaagtgtagctgtattaggccaaatacaaggcgtaaatattataataaatttattctgcggaactattgtaaatgccgcatacggtatagccaacactgtcaataatatcatcaatacatttgctgcaaatatcataattgcagcgtcacctcaaattgtgaagtcatacgcgcaaaaacatcttgatgaaatgttttcgcttgtcattaatagtgccaagatgtcttcttacctgttattgattataggaatacctgttttcgttgaaatagagttcctacttaaaatatggttaggcgaatatccttcgtatgctccattgtttctacgtataatccttgtgcaatcttgggtaaaaacattgggagaacctactgtaagggcattgcatgcaatagggaatataaagctccttaatatagtagttggagtgatattattattgatactgccaattacatattttcttttgcgctttggttatccgcctgaaatcgctttgggtgcaaatatcattctttggacggttgcaattcccatacgtcttatgttgttacgtcgatattctggtttccctgtaatggcatacattaaagaggttattgtcttagggttagtaatagcgacaatttgctttgttgtaccatatattgttcatgtaatatatgaatatgaaagttgggtgcaattgttattggtatgttttgtcagtgtgattacatcaggatttgttatattatttttgggattctctaaaaatcagagaactcaaataatgaacaaagttaaaagagccttgagaatatgaatattctgttctatacgcatgggaaagtttatgccacgaggggtgggactgagcggactaccgtttcggtggcttcggctttgagtcggttgtatggctgccgttgttactccctatatgaggctgaggaggtggttgaaaaggaaagctgttttgtggcggagtttcggtggcaggccgggcgcaatcgacaagcagatgtagaaactctgcataggattgtggttgagaacgggattgactacattatcgaccaaggtattttcatcaatgtagggttgttgcgtgaggcagttgatggcacactatgcagggttatacttgcccatcactatgagccgggggccgaggtgctgtatatgtcgttaaagcaacattggagcaagtggtatgcaaagatgtcattgcgcaggaggtgtcggtggatatttgacttggtgttttatccatacgccaaacacaaatatgtggaaacattgcacagtacctaccgtgaggcttactttcaagcgcaccgcgtggtgctgctgagccgggggttcattgaggcataccagcggtttggccggttcaacggtgataacaatttctcaattatcccaaacagcttgtcgtttaatgaattcctgcctgtcgataagattaaggagaagcagccggttgtactcatagtgtcgcggatagaagaggtgcacaagcggctgtcattggctctgaagatatgggcgaaagtaaagaaagaaacagatgccaatggatggcggttgaaaatagtgggtaccggtactgacctgccaaagtatcggcaaatgatcaagaacgagaaaatccccaatgtaacatttgaaggacggcagaatcccatcccgtattaccgtgaggcatcgatattcatgatgacttcgcggagcgaagcgtggggattgacgctcactgaggcgcagcagatgggcgtggtgccaatagctttcgacacctacgcctcgttgcgggacataatcaccgatggcgtggatggcgagataatagccgaaggcgatgttgatggatatgtgcgctgtgtgttaaacttgatgcaggatgatgtcacacggcaacgtatggcaaggcaggctattgcatcatcgcaacgtttttcgcaggaaaagattgcagggatgtggaaggcactctttgacaatttaggatgatgaaaataaattatttcacatggaaaattcgcagaagaatagcagattataccctaatgtgggggcaaaaagtatgccaaaatatcgcaaattcaaagaaaagacttgagtatgtcgatttaatgaaagggatatgtatcacactggtggtagcaacccactgtggagtatgtattccacactatttgcctttaggatttgaaataaacatggcactcataaacataaggatgccgctgtatttttccttatcaggattttttttcaaagaatatatgagtttcagcgatttcgttgttcgtaaggtaaataagctgattgtcccgtatgtgttttttgcaattttcccatacgcattgctgtttgtgatttggcccgaaacgattccacaaaacactcaaggcatatatattccgttacgccttgttatagagcctatgaatggcacgctgtggtttttaagagcgttgttcctaacctatctgttgtattacgcatttcatcgaatttcgcattcatggccagaagtggtgaaattgatggttacgctggcagtcgcattactcgcatatatgggaacagaagctgggaacaagcatttggaaaacaatacattgaatcaatggatatggctgttgaacataccgatggcatttatggctttgccatatttctatgtggctgagttccttcgtaaccacaacatcctatcgatgaaattcccgatatggaaaaccattgttggagtagtattatttttggcgatatgcttattaacggctcagcccgaagtgagcttcaaagaattgcagctccctaatctgcctcttatatacattgcatcgttgagcggaataatggtaatatggcttcttgcagtggctgttaataagctactatttgtgtcctattgtggccgatattcactaattattcttggaacacaaagtttcttctttggtgtggtaaaacagtattccaacagcgtatgggttatgtttttagtgaccatggcattggcaccggttactatatggatattcaaaaaatatttcccatactttacagcccagaaagacttattcccagtcggcgacaaggtattgaagagaaaagaataaaattgtattatgctagacaagaactcgatatcaaaagccattgacaacctgcgacttccgatggctattatggtggtagcaatccattgctacttctttaactcgctaaatatcaacgcattaccaagcaaatggggggggtatttgttgagtggattataaatatttgttcgatagtactgaccgattgtgcggtgcccatgttttttgttataagcggctatctgtttttcttgcgtcaggatgacgggtttacgtgggcgcagtataaggccaagatgctgagaaaatgcaagacactgttattgccatttttcatttggaacatcttgggagcgttatcctatccaagtcgctttattgatgccacgttgactgaaaaattattgggattttggagtcagaggatggaatggggaagctgggcaggaccttgggacgggccattgtggtttttgcgtgacttgttcgttgtgatgcttttcagccctttcatttactggataataaagcgaatcggaatttggttcatagtcgtaatgttggtttggctatctttcattgacaatgagtctttgtgcccaggactctcaggcacagccttgttgtggttcagtctaggcagttacctgtcgatcaagaagcctacctcgttcgggaaaatacccatgaacattgtggtggttcttgctgctgttttcttcgtatgcaggttgttggtaatggggaatgtcatcgatggaatttggggggatatcctcaacataacatggattcttacatcaatggcattttactttagactggcttacctcatggcagagcgtaacgttcgagtcagcgaaacattaaagagattgggagcttcaagttttgtgatatttgctatgcacagcctgataaacggtcgtatatcatctgttttgcttttcatggtagggaaacagaatgtgggcgacttgcttaccataacattctatttcgctaccataattcttactgtggccacatgctattgctttcatttgatagtcaaaaggaataatgtaactgctctcctctttgaaggagggagaaaatgagataattatatatgaatacgcattacacgacagaccgcagcacccaaatggtattgtcggttttaaaagcttatgggataaagaaaattgtggtttcgccgggaacgacaaacatggcattcgtggccagtgcgcaaagcgacccgtgtttcgaaatgtattcctcggtagatgagcggtcggcagcttatatagcctgcggattgtcgcaagagtcgggtgaagctgtggtgatatcgtgcacaggtgccacagcttcgagggattatatgcctggactgaccgaagcatactatcggaaactgcccgtactggccataaccggctcgcatggagagtatctaattgggcaccttcatccgcaggtgatagacagaagcgttactcccaacgacattgttcgttacagtgccaatatcaaagaaacaaaatgtccggatgatgaatggcacaacaatgtggaaattaacaaagccgtttcagaacttttcaggcatggtggcggaccagtccatataaatcttgaaacgatgcacagtggtaattttgcttgcgaggaattgcctccgtgcagggtcatcaagcgtattacttcggttgcaagcataccctcgattccgaatgggaagatagccatagtcattggttcgcaccgtcatttttctcaaaaagagaccgatcttattgataaattttgcagtgagtacaacgccgtggtatttgctgaccatacgagcaattataatggcaaatattccttcaactcggcattgcttgggtgccaattccattacaattcatccatattcgatgtagatctcataatccatatcggcgaagtgagcgctgatgtgtattcctattcaaagttgaagagtccccgcacttggcgcattagcgaagacggggagatgcgcgaccgtttcagaaatcttgagtatgtgttcgaaatgtcggtagagcagttcatggaaggcattgccaaaggcagcagtgtaaacacattatataatgaatgttgccttgaatataaaaccatgttttcccggatacctgaaataccgttctcaaacatttggatagccaatactctccatgacaaaatgccagaaggtagcctactgtatttcagtattctcaatagcttgagggcgtggaacttctttgacatacacagttctataactacttcgtgcaacgtgggtggttttggtattgatggtcccttgtcaacggcattaggtgcagctattgcctgtcctgacaaaaccacatttatagtaaccggcgatttggctttcttctacgacctgaatgtgttggggaaccgccatatggacaacaacatgagaattctcctcataaacaacgggtgtgggacagagtttcgcaattatgaccaccccgcatcttattggggggaggaagctaacctttacatggctgccggtggacacttcggaaagcaatcaaggaaactggtgaaagattttgtcgagaacttgggttttgagtatttgtcggcttcgagcaaagaagacttcatggaggtatatcccaaatggattgtaaccacatctgacaagccaattatgctggaagtctttacaaacagtgccgacgagagcgtggcactcgataggtttaggaacatcgtgccaccccctaagggacagcaaatcaaagagcaaattaaaataacagtaaaagagctggtagggaatgatatccttacacaagttaagaaaataatcaaaaaataacatgtcactgattaaacgtattctgtggtatttcaaaccgttaaaaaccaccgtagcaaatatatcaattacagccccctctcgaaaacttgcaggtaagcgagtaatcgtcacaggcggtacacgcggactgggatattacatagccaaacgatttgctgccgagggggggaggtattaatcacagggcgagatgaaactaagactgccattgtggcaaaggaaataggttgtaaatacttgtgtctggatgtaacccatcttgaatcgtttaagggctttttttccattgcaaggaaggaactcggtgggcaaatagacatccttgtcaacaatgcagggataagccttcatgagggtaatatgatgaatgtgacagtagaagggttttccagccaaattatgactaacttgactggaccgtactttctcgctcaggaatttctgcggcagtatgaaaatcagattgaaaagtccaatgcttcaatcatattcatggcctcagagaaagggttatttcccgacgaattgccatacgggctgacaaaggctgcgattgtgagtctgacacaaggaatggctcgccggtgggttacaaaaggaatccgagtcaatgccctggctcctggagtgacagcaagcgacatgactggatataaaagggataacctatattgcgaaaacaattgcagtagaagggcatacctgcctgaggaggttagccgaagttgcggtattccttgcgtcggacacttctcgctgcataacggggcaggtacttaccacgaatatgggaaatcatttgcggtgtgactggtaacacagaaatgaatatattatttgttttgcaacgataccccgggtttggaggcatcgagtcggtgacacggatgcttgctggggaatttatcggacggttcggctacagggtcgcagttttttccacatcccgacaagataactcctcgcagttactcgacggcgacctgttttattaccaaacttccgacttgaaaggcgacgagctaaagaaggaatttgatgctttggttcatgatttcagtccaaactttattatctatcaagactcatacgttcccgaagattttttgctggaacatttgccgcagggcataaaaataatagtgtgcgagcataacacacccgattgcctcgaaaccgggcttgagagtgtgacgaaaaatctatcctgggccaatccaatgaatatcatacggaaactgcgtttgccacggcgtatgcgcaacctccacaaggcaaccaccgagcaccataaaaagatgctgcacgttgccgacaggtatttaatcctttcagatggcttccgcccgatacttcgtgattttttccatatcgaaagtccccaaatatctacgatgcctaatccaatagaagtgccaagagaaccgatcattatcgagagccgcccaaaccaggcattgtatgtcgggcggctgacagaccaaaaggggattaagtacttaatagaaatatggtcgaaaattgagccgcattgcaattggaggcttctcgtggttggagatggtgacaaacgacagtatatggaaaaagaaatacgttcccgccgcctcaagaatataaggcttataggttttcagcaacacacgtcaggctactttatggaatcgtcggcacacctgatgacatcgatatatgaaggtttcagcataaccaatttggaggccgccatacgtggaacaataccttttgctttcaacagttttgcatcggcaaaagatatcattgacgacggacaaaccgggtatcttataaagccttttgatgtggatgcttatgttgagacatttctggcatttaccaagttgccacagagcaagatgattgctatgcggcgcaaggcaatcgagagggcgcaagaattttcattgcaacacattgccgataagtggaatgaactttttaacaaacttagacatggagaaaatagggatactcacctaccacagggcttatagctacggagctaaactgcaagcctatgcattggccacatatttgacttctataggcttcgaggccgaagtcattgactacggaaatatcggggaggagaaattgcgcaaaataggcacaaaaagcctgaaagattttattgtaacaacattatgctatattgcttcgagcatcgctgaaccgcaaagaatacggcattttgacgagttcatggacatcatacctcactcgcccaagcattatgacaaggcaaatattgcagaggccaacgataagtatgattattttattacaggaagtgaccaagtatggaacccaaaatacaacgaaggcgacctgacctacttgcttgatttcgtaaaggataataaaaagatattttcatacgccgcaagtttcggtgtgtcacaacttcccgatgatatactccaagtttacaaacctttgctcaagaggtttaacaaaattcttatccgcgaagttactggaaaaactttgttgcatacacaattaggattggattcacaagtagtactcgatcccacatttttgctttcccgcagccagtgggagaagatggcaaattatccgttatcaaaacaacagaaatatatactgagttttcagattataaatagagacgttcactacgatgccatgcttgattacttgcaccgcaagctgggatatgaggtgatagaactgaaagattcgttccgctacaagccatggaagtggcccatttatgccaaagctggcccgaaagagtttttaggtttgataaagaatgccgaaatggtggtgaccaattctttccacgcaacagttttttccattcttttccacagatcgtttttttgctcacggaatagttttggattcaattcccgtatggaaaaccttacaggtggtcttggcttggcagacagaatgtttgattcttcgacatttctccactctatatccgatacagatgtggtatatgagaaagtggatgaaatactcgaagcaaaaatatcggcaactaaacaaatcatagaaaagacttttgcaaaatgaaaaccatttgtttcgtttccatgggtgaattgcttgtcaccaaggggggcattcaccgggtcacatactgcttgatgaatgagctgaagaaacgcggctatcgctgcatctacttgttttacccaatagatgaatcatgctattataccggcaatgtcgaagacgaagtacacaagctttctccagagcaagtggaaaattatcttacccaagagaaggtggatgtggtggttaaccaacaagctatttttagtacatcgttcacgaaactagtattaggctttaatttgcgtcgtttcaaatatatatcagtttttcacaatactcctgctatttacgaaaagacattaacattttcaagactttggtataacttcttacatcagcgtggagtctctgctaagatgtcgaattgcgtgagaatgatagtttaccctttatggaagcagagggttgttaaaggggcagggaagatgtatgctgtcaactacgatgccagtgacaaatgcgtgatgctgtcgagcaacgattggcctacacttggccgctaccttaaacatgacgtaagtgagaaatgtgtgaccatacataatccacttacatttgacacaattgagacagcagaatgtttatgccataagaaaaaaaatgtgttgattgtgtcaaggcttaacaattttgagaaacgtcttgaccgtgcactcaagatatggaagaagatagagaccggcggctttgatgattggcatttgtatatagtcggctgggggcttcaaggaaaaatgctccacaaccttgctcgaaaattaaaactaagaaatgtgcattttgaaggacggcaaccgtcggaaccatattaccataatgcttctatcttcatgatgacaagtgcggtggaaggctggggactgacactgaccgagtcaatgcagacgggtgttgtaccgatagcttttgacagttacccggcattgcacgagattatcaccgaccgctatgatggttgtataatccgcgacaacgatttggatgcatacgctgtttgcatggaggaactgatgcgcaaccgcaaagagcgtgagcgaatagctcggaacggtattgagagttgcaagcgatttgaaactgataaaataattgtacaatgggtaaaattgatagaaagtctataaaagtgttgtgggtatcattagtcaagttccctccgctgtgcgagcatttgggtgaaactattccggcacattgcggatggatgtattcctcggccaaggcattgctaagggtgatgcccgaagtacggcttggcgtgatggtttattcttacggcaggagttatgaacggtatgaaattgacggtgttacatactaccttattcctacgggaaggatagaccgaacgtcgaagaaacaaatcgagacttgccgcagggcgatacgtgattttgccccagacttgatgcatatccacggcacggaacattcactggccaaagctgcttgcgtggccaatgagaatggtacgcgcatggtggcaaacattcaggggcttgccgggccttatatgcgttatgccgatggtggactttcgttgtggaacaaatggacaaacatcactccgcttgacttctatcggggtacatttctactcaatgcaaaacgcaatttcaagcatcgagccgaatgtgagaattatgtcctcacgtatattactgacatcgtggggcgtactcagtgggattgtgaccatgtgatgaccgttaatccccgactgcgttatcactttatgaatgaaacattgcgagattcgttttatgaagttccccgttggaattatgcccagtgtaaaaaacatacgattttcgtgagcaacagcggttcgccactgaaaggtgcacatcaggtgctgaaggcattgcctattatcttgcggcaatatcccgacacggtggtcaatttctgcggtagccgtgttatgagtaataatctgaaagacattcttcgtttccaaggctaccacctatatcttcgtcgattggtaaagcgattacaattgcaggagcatgtgcatttccttgggtctctttcagaagctcagatgaaacaacaattccttgacgctaacgtgtatgtcatgcccagtgccattgaaaactcgcccaactcgttgtgcgaagcgcaaattcttggcacgccggtggtggcaagctactgcggcggcatccccacgttgctcaccgacggactgacgggctacttctatcgctatgaagaatatgaacagctggcacaaacggtgatgaggttgtttgggcaagaaagtgacatcggactgtcggctgccgaaatggaagtggccggcaagcgacacgatagagaaaagaatgccctgcggcttgcggagatttataacgatataatgcagcattaaactatgtttgaaaagataaggccatatctcaattttaggtatttcctgtatttcttcagtttcatcgcaggctggccgtgcgtattctacctaatggggtggttgccccattatacggtgaactacgtgttgctgtttgtcatggcaatgtcgtatgtcataataaggaaatgtggccaatttgacaaaccaataaacgatctgatcttgattcaggtatttgggtggattttcttttcattaatccatatggatacttcatattatacaagaatcatattgctgctaactacctttgctatactaaggattcagcaagatgagggtggctcattggatttctgcaaaacgtatgatgtatggttggtggttcaagcaataagcggaacaatagggattttattagtactcggtggattattgcagcctattttcaaatttgttgagatggatatgcgacccgggtatttctttggattattcactacaaatacctactttgggggacttgtccgtaatgccggattttatgatgagccgggagccttggcgttttggggaatctatgcattgataattaataagatgtttgtaaaaaacacaaaaatagagatacttttaattgtcggtttgctatcaaccatgtctgtggcatatttcatacagttggcgatatatttattagtgttttaccgcaagcaatcttggaaactgataatgattgcggctgtgattctcataacgctaaagttcataacatcctataatgaagctatggacagtgctttttggggcaggtttcagtatgacgaatccacaggtacgatttcgggagataatagaagcgtcttgatggaacgatgctggcgcatcttctgtgactatcccatattaggcatgggagcaagaaatctggtgtcacccgaagttgcttcgaaatatggttttgtcggggctaacttttttttcaattgggctgcagacgggatcgtgggggcgattattacttacttgcctctgatatacttgttccatttaggcaggtatgataaaaagttgtatggcataggattgttgatgctgttaggtttcttgcaacgaccttatgacagcacccaattactgtaccctatgatgacttatacaatcgtatatcaagcttattactcaatcttttatagaaatgaataatctcgttttttgggcgcattcgtattgtcgctcaacccttaagttttattctgaattagctaaagctctttcaaggaattgcttcatatacacatggattgaaaacttagatttgagatcggctaccggatttagcaattctgagttttcggatttgaaaattgtgcatataggaaatgatattgatttagcagaaaaaacattggccaatcatattgatgattacaatatattttgcgcatatcaaacatgccctgtctatcagcatttaatgaatattttaatcagaaagaagacccggtatggaatgttttccgaagctccgtgtaatatggacgaatatccgaaaagatttttcaaggagctttatttaagatgctttttacctgtaaaattaaaaaatattatatccaatgctgattttatcttgaacgcttccggatattatgaaaagggattgttcaacctcggatggaaaccagaacagataatttcatgtgggtactacccgcctcgaattcccggcagcaagctaatggaacgaactgaaaacaattggcataactttacaattcttctgtcgggactacaccaatggcacaggtctccttggatattactggaagcattagacatattgaaaaaaaaaggcttcatgcccaagtgctatatcacgcagtctggaccatacctcggtaaagtgcaagattatgcgaagaaacggcaactgtcaaatgtggagttccttggttttgtagatatttccaaattgatagatttgtatgagtcatgttcggtttatgtgggttgcggaaattatgagccatggggaatgaggttgaacgactgcctacagtgtggcgcaccattaattgtcaatcgaggcatgggaggagttaagatggtcgatgagtataattgtggactcagcttcaaccgtggcgattatataggcttggcaaatgcaatggaaagactgatgactgacaaagcattgtatttgcaaattgcaaagaatgccatatatgcagctgaagaaattaggccggaaaaggctacagtaaaatatgccgctaaaataaagaaattcattcaataaagattatgagatatttcattacaaacgtacttccccatcatttatcaggaaagtataagatttcttatgcagccgccaactttagctgggcgctaatacacagttctgtctttgatgaagttttttctattgcgccccttaacgtttcaggagctatagatgatgttgacatgccagagcttgtttactctgattggagaaagagaggaaaaatccttcaaaagctcgcacccataaaagagagctttctgatttttagaaaaatcaaacgcaatagtaatgtctggttttataacataagtattctgaacattgttttatttttcctgtgcaaatggttcaaaccttcagcacattgcaatgtgataatattggatatttatattccgaaaagaaagttgtcgcttgaggctttattcctttgggcaataaatcatgcaaactcaacaattaagttgtcggattcacctctttttacttgcaaaaaaacagaatgcctgccgggtgtcgtaccttttaatgcccccctattcccaataatagaaagtgtgaaggccgaatttttactttcgggactattacgcgaagacatttcccagatttcgttgattatcagagttttttccaaaataaaaaatgctacattatatataacaggattttctgaaaaagaagaggagatgaaactggaatgtagcaaatatcccaatattcattactatggtgaattatctttcaataggtatatggatttactccataaggtctcatttctgttaagcacaagagatccaaaagaaaaaggcaatcaatgcaatttcccctcaaaaataattgaagggattctgcataaccgcataataatttcgacaataaaatacaagcaattggctggcttaaaatattttttcgtttcatctgatgaagatgaattgaaaaatcaaattgagggaatcattagaatggattccgttggacttatccggtatgccaaccaatcaaactatgccaaatcaatgttcaatcccaatagatggggtgaaataatgaattcattggaaaaggtttgacataataactttattttccatttcaaagatcataacaatgaaagtattacaaaccattgctggttttggggccttgtatggtggcatagccacctgtacgtatgatttgatttcggcgatgcacgacattggttttccgctcgacttgctgactttggaagtaaagaattcagctgacaagttgatgggaaaaggagaagactggattaaggcgttacccaacgatgcggtcacaccctacgagtattcaaagaggattgcccaatatctaaagagtcatgattacgacctgtaccacaccaacggcctgtggatgtattgcaaccacgtaacctgctctgtggctcggcatcgccgcaagccatatatcatcaccccccacgggatgctttatcccgatgcgctccatcgctcatattggaaaaaatggccgttgatacagctttgcttccgcaacgacattggctgcgccgactgtatgcacgtcacatgcaaagccgagatggaacatgtgcgcaacttcggttaccgaaaccccatcgccatcattcctaaccctgccaacctgcccgattatttagacgaagtggcgacagcgaaaccgccctttctggggtacgacttgccaagaaaatttggtttccttggtaggttgcaccccataaagaaggttgagaaccttctttatggggtagcgaagttgccatcgccgcaagattgcgaactcgtgattatgggcaagggagatgacgcatacgagcaattcctgcgcagcgaagtggctcgactcgggctgaaaaatgtgaaattcagcggtttcgtatcgggacgcgagaaatttgagcaactggcacagctctcgtgcctgttcgtgccgagcgacttcgagaatttcggcatgatagtcaccgaagcattgtcggtgggcacgccggtcatggccagccttggcacaccttgggaggagttgaacacggtgggttgcggctggtggactgaccgctcgcccgaaaacattgccaccgtcatgcatcaagtccttgaaatgccaatggaggatcttctcacaatgggcgaaaaaggacgcgagcttgtgcaccggaaatacactgcgccacaagtggcccggcaaatgcagcaattgtatgaatggttgacgggcaacggcagccaacctgtttttattcacgtttaatcgtaacttctaatggaaatacttacaaaaagacttgcatatatagatgcaatgcgtggattcaccatgattcttgtagttttcagtcacgttcaatattttggttatggtgaatttatccaatcggtgtataatttttgtggggggggtagttgcttgatatacagagatttaatcgtgctattcttcatgcctctattttttttcataagtggattcgtcctttacaaacccgatgtagaatggaatggtattatgagcttcaaattcattgccaaaaaagctttacaactgcttgtacctacgttggttttcatttcactatatatctttgtgtataattcacctctgaacttgctttgtcggtcgggacgcttgggctattggttcaccattgcgttatttgagtattatttgctttatacattattccgatggatatgttacaggttgcatcgccacgaaggtactgactggctactattgtcaggctcggcaatattatatttcgcagttacacagtctgtcttaaaccgattgggcgtaaacaatgaaacaatcagtttgttggggttagatcagcttaggtttttcttttattttgctattgggtcgttagttaggaagcatttttcgtggttcaaagaacttttagagaatggcaaaataatcacattgttgataatagcatttttctcattattcttaatcgtgcaccgcagtggtttcacattcggtaatgctatgatgtaccatctttacaatttcattggtggactaatggcactttttatagtgctcatttttttctacaaatatcaatatgttttcgagaacacatgtaaaatgggtaaatggcttcaatacatcggtcgcaacacactggctatatatatgttgcattactttttcttgccacgaaatttacaattcatcggcaacttttttatgcaacactccaatccaactttggaactatttatcacaatgggtatagctattctcgtcatcatcatttcgttgataaccaatgctatgatatgcacaagcccttttttagcccattatcttttgggcgttaaaaaatagatgatttatgaaatcggtttctatcaaagactacgacaattcgtggtatcgccctggcggggcggtgaagaggttgttatggtatttcgtcaatgtgctgttttttctcaatccattcaatccgttctcgggtataaaggtgcggctgctaaggttgttcggggcacaggtcggagtgggggtgaacattaagcccaacgtgaacatcaagtatccttggctcctcgaaatcggagattactcttggattggagaaaatgtatggatagacaatttagttcaagtgaccatcggggccaatgtctgcataagtcagggagcaatgcttctatgtggaaatcacaattacaaacttccaacatttgacctgattgtcaaacctataattatcgagaacggagcatgggtaggtgctaagtctactgtatgtccgggcgtgaccctccacacccacgccgtgctgggtgtgggttctgtagcaaatcatgatttagatgcttatagtatctatcaaggtaatcctgctattaaaataaggaagcgtgtaatggaggcttgatttatgaaggaaggattatttttgcttggtgctttcttgattacctttttcatgggattctttatttgcttaggagcattcccctatataatctcttattttaccgaaagagtaagaatggcttatgaaaaagcagaagacaaagaagtgtttaggtggtgcgtggctttcattgtagccttttctacagcaataataatatgtttgattaagaagtaacctaaagttacttagtcgttctttgacatcttatggatttcatggatttcagtttcagtaatagtacatatactgcactattggctctttttgcggctatctttggtgttgggtacccattaatcatacaagccatcggtgaaattgacaagaaatatgacagtacgctcctcctaaagtgttttgaagaggaacccgacttcaaacgtttcaataaaagggttctaacttgcattttcttctctataacaactccattcatattgtttctatctaatggagtgccatatattcagatattcatcttggctattgcctccattgcgatgctttcacttttaatgtcttcgataggattgtataaattatttctaagttactattatccaagccgattgtttgatatacttatttcaaaaccggatggtcggtatatggagattttagatattgccatttatgcggtcaagaaagataatatcggtctatataacgcttgcatgcaacatttatatgactctattagcttgttaagttccgataaacctcaaattaatcagattacggaaataacgaaaagaatattaaactattcctcatctaaagatgctcccaacatgttgaagtcggatacagtaggtataaacttttacttttccctgcccacactaaactacagattgatgtggattactttacagaggcacatcaacaatgacaattttgactgggtaatgaattattgggaatatgcagaccagtattattctttcaagctaatacatgataatgataaaccacaagtgcgcaatggtctaatagataataagcgtgaaaaattcaaggaatttcatattgcattaggagcatttctgctgtatagtggcaaagacggatggctaaaacaactcatgcgttttaccaatcaactccctccaaaatatgaattgacactttgctcgtttactgaaatatttgactggttgatacactttgacaacttgttgcaagatgcatccaaccaatttatcttggaagttgaatatcctttcaccaaacatggcggtgttcaagctgactacattgcatatggtgccattgtaaagtatttggcttattccatgctcttcttggatgaaatagactataatgttaggtatatggatcccatgacagctcctttaccatgcacatctaatgatgaagaaaatgggataaaaataatacctgccaataagagatacattcggttagcaatacaactgaaaaaatcaatcaatgaaattaaaacaatagtacaaagaccactagatgttgagagccgtgtattaaaggcactagatgactttattaaagaatgtaatgatgcaataaaaaagaaagaatggtctgaagaaaaagagaatttaattaaagaccaactcacatttgaatttaatagacaggtaaactctcttatccaaaaaaaggattcatcactcagctatggaatagaagagaaaaaaacggccaaaagcaaagtaagaattgattctaatgatatttatgaaggagattatagatactcaatcaatttggaggtagtgataatctcatcactcataagaaatattcaaatcgcttacaatcaccttttcttgttgaaccatacttctttaaactatacaataaggtatgctgacatagaacctgccttaaagaaactttgcttgtccgaacagtatacagtcatcggttttggagtagaaataccccagtccattgctcaaaaaattccagctaatgtaaagaatatagtggctcataattctgaaatcctgattcttaatagaggaatgttgccatatatatcctttatcagagataatacgaatgaactggcacctttagacgataaaggaagttttctttacacaaatttagacaagctcaaagagggaagtccttcaagtgatgagaattcgaatttagaagtgatggtaaactataagctaatcgttccatcagaaatcataaagtacatacgcataagggtattctgggatataacaaacaaaacttttgatttagataaaatcgttaatgctgataactatttgaaacgataaagataccagtgataactgccactttcaacagtggcaagacggtgcgaagaaaaagattcttctgttcgtattttgattgatctccgtatcagcaatggtctcatttataactcctgtcgtagcaagaaatcgagcaaatgaatgtgtggattccttcgtaattgctgcctatagtccattcatcaaagctgacgacatatttggggcagtttcatgtattctattattaagtatgatttataaattgtggtaaatataccgacattgttagttatacttaacaatatagaagagagaacgcatagaagcccaaaacataacattacattataacttacatgaaagtatcagttattaccgctacatggaatagcggtaaaacgcttcgcacgaccttggatagtgtactcaaccaaagttatcccgatatagagcatattatcgtggacgggggaagtacagacaatacgatggaaataatccgggagtatgaacctcgttataatgggcgattgcggtatataagcgaaccggacaaaggtctttatgatgctatgaacaagggaatccggatggctacgggggaggtggttggtatcttgaattcggatgatttttatacttcatcggatgtagtggaaaaattagagaaagagcttgctaccaaccgggtggatgcagtatatggagatattcattttgtggatggcaatgacctgggtaaatgtgtccgctattattcgtcaagacttttcaaccgtagctggatgcgacttggctttatgcccgcacacccaagtttctactgccgcaaaattatatatgataaatatggtggctttgatttgtcatacaagattgcttccgattttgaatgtcttttacggtttattttcgtacataaaatacagacaacatatatcccaatggattttgtaaccatgcgtacaggaggaacttccaccagcggctttgccagccataaacaaattatatccgatcatcaaaaagcattcaaacgtaatggcatatacagtaatgtccttttggaatcattgaggtatatttataaaattcatgaagtattactaacaaaaataacaagatgaaaacagctttaatcaccggaattaccgggcaagacggttcgtttcttgcagaatttttattggacaaaggatatgatgttcatggtatcatccgtcgttcatcagttgattatcgggaacgtattgctcatttagaggggaaacctcattttcacttgcactatgcggatatgggggactctatgtctttagtgaaattagtgggcaaggtacaacctaccgagatttataatttggctgctcaaagccatgtgcaggtatcgtttgatgcacctgaatttacagctgatgtggacgctgtaggagtgcttcgcatattggaggcggttcgtaccaatcatctggagaaaacctgtaagatttatcaggcttcaacttccgaactttatggcaaggtagaagaagttcctcaaaatgaaaatacaccgtttcatccttacagcccttatgccgtagccaaactctacggctattggattgtgaaagagtaccgcgaggcttataatatgttctgttgttcgggcatcctgttcaaccacgaatcggaacgtcggggcgagacctttgtaacgcgcaagattacgttggctactgcccgtattgctcaaggaaagcaggattgtctgtatctgggtaatctggattccttacgtgattggggatatgccaaggattatgtggaatgcatgtggctgattctgcaacaggacaaaccgcaggatttcgtcattgcaacaggtgtacagcacactgttcgcgaatttgctacattggcattccactatgccggcattgaactgcgttgggagggtgaaggtatagatgagaaaggtattgatgcaaagaccggaaaggtactggtagctgtcagtgaggatttctatcgtcctacggatgttgtcaacctatggggtgatcctacgaaagctaagaatgaattgggatggaatccgcaatccacctcctttgaagagttggtgaaaattatggtgtctcatgatatgcaaaaagtggctgcggaacatgtggccaacgtaatgcgtaccaacttggccgaatatctggagaaaggaatcgtgaaatgatggataagaacgcaaaaatctatgtggcaggacaccggggaatggtgggatctgccattgtccgtgaactgcaacggcaggggtatacgaatattatcacccgtactcatgcagaattggatttgacacggcaggaagctgttgaaaagttttttgcggaagaaaaaccggaatatgtctttttggctgctgccaaagtgggtggtatcattgccaaccaatctgcattggctgatttcatgtatgacaacatgatactggagatgaacgtgattcacgcagcctggaagaacggctgtaaaaaattggagttcttaggttcttcatgtatttacccacgtttggcccctcagcctatgcctgaatcttgtttgctaacatcagaattggagaaaacgaatgaagcgtatgccttggccaaaatatcaggtctgaaatattgtgagtttttgaatcggcagtatggtacggatttcattagtgtgatgccaacaaatctgtatggacccaatgataattatcatcctgaacatagtcatgtacttcctgctttgatccgccgtttccatgaggcgaaagaagcgggtctggatgaagtgacttgctggggtgacggcagcccgctccgggagtttctctatgttgacgatctggccaacctatgtgtattcctgatgaataactactcggggaatgagacggtaaatgcaggaaccggcaaagaattgaccattaaagcccttacagaactggtggctaaggttgtaggatttacaggcgaaatcaagtgggatacctcacgtccgaacggaacaccccgaaagcttttggatgtatcgaaagcaacggctttggggtggtcttaccaaactgaattggaagatggtatccgattggcttatgatgatttcctgcataatcccatgcgtgcagaaaggtaacgatttaaaacattatttatgcaaattcttttattatccggaggctttgggaaacgcctttggcctctgtcaaataacagccgttccaaacagtttataaaattactcaattctcccgatggtcaaaaagagtcgatggtacaacgggttattcgtcaattgggagaatccgatttaaaaggtcatgtaaccgtggctaccagcttgtctcaggctgatgttatttacaatcaactgggtgaatacatcgatgtagtggtggagccggaaagacgtgatacatttccagccattgctttggcagcttcatatctgaaatatgagaaatcatgtgccgatgaagaagtagttgttgttatgccttgtgacccttttacggaagctggatatttcaaagttattgagcagatggtgcatgcggtggatgacaatgtagccgagctggttcttatggggattactccaacctatccatctgctaaatatggatatgtagtgcctgatgaatcgaaactgaaaggtggaatcttttcggtcaaacggtttacggaaaagccgaatgtagctacagcggaatatcttataaaagaaaatgcattttggaacggtggcgtatttgcttttaagttgggatatatgatgaatattgtggagcaatatatccgggctgtttctttttcggaaatccgtaacagatatagtgaattccccaaaatcagtttcgattatgaggtggcagaaaaggccaaattggtagcagtagttcctttctctggcaaatggaaagatttagggacttggaatacacttacagatgagttggaagaccatgtaatcggtaatgttatcactgatggagaggcagaaaatacacatatcattaatgaattggatcttccgattatgtgtataggaaccaaagatttggtgattgcagcatcgaatgacggtattttaatttccgaaaagagcaagagcgagaacataaaaaaatacgcagaccggctacagtgttgtccaatgtatgaggaaagacattggggagaatacaagattattcataatgttcaatattcagatggctttcaatcgttgacgaagcaattgattataaaggcaggaaaaagtctcacatatcaagctcatcatctacggaaagaggtatggacggttgttgacggagagggactgttggctatagaaggaaaaattaccccagttaaacagggagatactgtttgtatccttcaagatatgcgccacggtctaaaagccataaatgacttgaccctgatagaaacgcaaaccggaagcgatcttcttgaagatgatgtggaattgtttgattggaattggcaaaagtagatacaaagtttggcgagaacttccagataatcaaatccgattaaatattttacacaaaattcagaattataaaaggcaagggcttttgtgattcttccattgattatgaaaatcgagtttatgggagaatcaaaatttatattgcattccaaaaatgcaaatgttcagtggatagtatcaaaatattccggtgttaatccattaagaatttatcttatgctatttcgtatgggaatgaagaaagaacaagaagtgttggaacaaactgcgtcttgtacatcactttttgttcttttgatatcttgaaaacattgattgtataacatggtttcttcgttatcggtttattatcgaaaacttgcttatcacgtaatagaatcggacggcttcctatgggtcggattcaagccgggaatggtacattttattgctaaagaggtttggaatattcgccccttgacccgaacggatgttgagagatattatgaggagtttacagtattaacccaaggtaaagggagtctttattttcggattgtagctcatggtggatttctgaaagaggcgttggcttatgagttgcatggtttgactgtttctgacgacaactacctcagaagccttaattccggcagacatgtagaactttacccgcataacgagaaagcttatcgtgctattataaaaggctttgaacagcatcgtatcggtaccgttgtgcaagcgaccgggacgggaaagtcatatctgctggctcgttatatatcagaccatgccacagaacgaatttgcgtatttgctccaaatgtcacaatcctggaggagatcaaaaaggcggtaggctttacctctccttatatctgctatcgaacgtttcagtcattgatatattatcgaaaaaatgataaacaactcaaagcagatcatattttgattgatgagtttcatcatttcggtgcagaaatatggggggctgctttgcaggaggtaattgaatccaatccgcaggcctatatattaggaacatcggccactcctattcgcccggagggaatgattgatacggtggatctttatttcgagggaaatctgttttatgaacttaccttacctcaggcttggtattaccgtattttaccagtcccaatcctggtacaaagtgcctatggattagacgatgaactgaatcgtttacaaaagcgattggatcgaagcggatgttcaattcgacgaaaagaacaagtccaaaagaaactggatgtggctcgcgttgattttaaaggggcgttaggagctcctgaggtaatccgaaagttcttgcccaaagatgtatgtaaactgctggttttttgccgtgatcttaccgacctgaaacagatggttcctgaggtgtgtggctggctgacacaagccggacgggtaatcataccatttgagatccatcacactcaaagcgaacggactaataatcaaatactaaaggctttccaaaaagaatctgggaaattgcatgtattgttctctgtcaatatgctgatagaaggactgcatgtggagggcatagatgccgtcttgtttctacggcggacagaatcctatattgttaccctgcaacagctgggccgttgcttggatgccggaagcgggaaacagcctgtcgtattggattttgtgaataacctatcgggcaaatctgtatatgacatgatggccttgcacatggaacgccttgcctgtcagccttcacccaagggatttgaaggggtgacctcttttctgaccacaggtttcctatcagacatacggcttcgtattgaggagatattgacagagttggaaccttggcagatcatgtatgagaggcttattgagttccgtaagaaagaaaatgactggccttcggttacagaggggaagctgggtttgtggtgcaatacgcagcgcatggcttacaaacggggcagactctcggaggagcgttacaaactgctggagtctgtcggctttgaatggaacctgctggattcaaactggatgaaggaattccaatcattgaaagtcttctttgcgactcaaggtcgctggcccaaacgggaggatggtgccttggctacctggtgttatactcaacgggaaagacgtaagaaaggacatttgagcaaagaacgcattcgtgtgttggatgagatcggatttgtgtggagtcaggacttgaacggtgaatggatgaaaaattatgaagcgttgaaaatctttctcgacaaacagcagcgctttcccaaatcagccgaaggctatttgggcgagtggtgcagtacacagcggaaaatgcgcaagcaagggaaactttcccctgatcgtcaaacactattagatcgaataggatttgtctggtcggtggagcaggtctggcgaagccacttggaacagttgcaccagtttcatgtccaaaatggacgatggcctggatgtcgtgaaggggcattggggcgttggtgtacggttcaaagacggaattatcgaaaaggaagcttgtcggatcaaaaaatcgcccaattggaacaaataggatttatacccttgaaaggagacaagtaatacagaagaaatggaaatactctcatttcatacgaaacaatagagtttccgcagccttattatcgcagttcaaagtacactatgattttagaatacaatatacccaatcgcttttcgtactaataggcatattaccgtttatacaagccacccttaaatttcggatagaaggactggttgctttccacatacatatagtgtctaaataaacagcaaatattgataaatgagtattcaatataaaatcatctttggatatatggtgttgattgtggctataatcggtatgattataatcatggtacgtgagcggaatagggttttggtgattgaaactgaggcacaaacaattcatcgggttcaacacaatggaaatatagtccagcatcacatcacgattctctcaacttatggtgaaacagccctttcttgggaagaggaggattttgcgaactatcattctcttcgtctgcatatcgattccatgttgcaggccatgcacaaggggtatgaggaatttgtcagccaaagtcaaatagactcgctgcgctatctattatccagtaaagaagagcatttataccaaattatgcaacttttccatagtcagaacagtcaggaaggtatgcaattctctcatttaccagcggaagctcaaccgcgtactgttattcgtaaaaagaaaggttttacaggatttttaggggcaaaagaaactctggagatagttccttccgcatctacaattctcaagacattgaacaaggaattgctatccatgcaggaagaacggcaggaaagtatcaatgcttataccgatagcctccgcaaccacaacaaggaactcaaccgaaagcttcgccatctgataaccacgatgaacaaccagacagaacgtgtacttgaagcgaaggaatgtcatcttagagaatcttacaaccgttccatatgtgtcatctcctggctgattatctctgccattattctgcttgtcatatcctatctgattattcaaaaagatttacgggaaaaggcaagaacaaggaagcgtttggaagatacgatacaacaaaacactgcgctgttggaaatgcgcaagaatattatcctgaccatatcgcatgacatacgtgcccctttgaatgtcattgacggcagtgccgatctggcaatggatacacgtgaaaagaaacggaggaatatccatctgaataatataaggagggtgtgcaagcatgtggtacatctgcttaacaacctgttggatgtgtaccggttaaacgaggcgaaagaaatacggaacgatgtcccattcgacctgcatgaattattggaacgtaccgctgccggtttttctcatataatcaataataagggtatcctgttcaattgtgattttaaggatacggaagtcaagttatatggtgatgcagaccgcatagaacagattatagacaatctgcttaccaatgcagttaagttcacggagaccggcacaatcaatttcaatgtgcactatctcaatggactgctggtcatggaaatagtggataccggtgttggtatgagtgaggagacactttcccgtatctttcgtccttttgaacgccagacctctgcaaccaatgcggacggattcggattggggcttccgatcacgcaaggacttgtcaatcttcttgatgggacaatagaagtaacaagtttgattaattgtggaagcacatttcgtgtgacccttcccatgccggaaacggatgaaccgttggaaagcgaaaaacatgtcccggcgcatttcacacacctgcatcacaatgtacttgttattgatgacgacagtatgttgcaagctgtcattaaagaaatgttagagcgtaatggcatgacctgtacaacttgtaccacagtcaaagaggtagtaaaagccatgcgggaaaaagattatgacctgttgcttacagatatcctgatgccttacaccaacgggtttgaattgttgactttgttacgtaactcaagtattggcaattcaaagactatacccattgtcgctatgactgcacgtggagagaaggagaaagatgcttttttgaatgccggatttacagcctgtatttataagccgttttcatctacagaattgatcggtctgttgtcaactatagaaagaggttgccctgacaaaaagcatgatgtagatttcagcatgatgttgtgtgaggtgagcgataagataaaattattatgttcctttattgaccagtcgaaaaaagatgttgaagaactcaattcggccatagaaaattgtaataggaagaaattgcgtgaaacggttcaccgtatgctgccgatgtgggaattattacataatgaagaaatgttgttcgcttatcgttcccttttaaaagatgaaagggccagtgacactgctttaaaagaatatactcaacggataataaatcataccgatatgttgatggcagcagcaaaaaatgaaataaaaagacagacaaatgaaacggaaaatactgatagttgaagacaatatcagcctgtctcagatgcagaaggactggtttgcacaagctggttatgatgtcgtgacagctatgaacgaaccgatagcccgttcactgatacgcaaaatacaatttgatctgattctatcggacgtacgtctacccgaaggggacggaatatctctactggaatggctgcgcaaggaaagaaaggatattcctttcatcatcacgaccgagtatgtgtcggttcccgatgtggtgcgcactattaagttgggagcgatagactaccttcccaagccggtacgcaaggaacatctgctggaactggcagaagatgtgttccgccccatggttacggtacggaaacaggaaaaggtactgtttcaccgtacaagtccgaagatcctacaagtggagaaacttgccagactggtagctccatcggaaatgtcggtgatggtacttggtgccaacggtacagggaaggagtcggtggcacagagcatccatctgggcagcgaacgccgggagatgcctttcgtggcggtgaactgcggggcactgccacgtgaactggccgcctcgttgttcttcggtcacgagaaaggggcatttaccggtgccgacaccgccaagaccggatatttcgacatggcgaaaggcggaactctgtttctagacgagataggtacaatgtcctatgagattcagtccatgttgctgcgcgtgttacaggagaatacctatactccgataggcagtgacaaggaacgggtagcggacgtgcgtatcgttaccgccacaaatgagaatttgcaactggccatcaaggaagggcggttcagggaagatctttaccaccgcctttgcgaattcgagatacgtcagccttcattggcggaatgtccggaagacatcatccctttggctgagtttttccgtgaacgccattcgaaagaactgaaaagggaaacacaaggctttacggaagatgccaagcgcaggatgcttacctattcatggccgggcaatgtccgggacttacagaaccggatcaaacgtgctgtattgattgcggagactccgatgctggatatggaaggattggatattgagatccgccaaagtggagatacgcactccccggcaattcagccgttgaaggatgagtcattggagaaaatgaatattatcaatgctcttaaagcttgcaacggacaccgggaacaggctgccgcactgctgaacatcaacccggcaacactgtaccggaagatgaagaaatacggggtgaaataaaaatgagcctgccgttagtgcaaatctcactgaatatgtgtacatttgcaaacaaatagagaaaaatcgacatattgtctctaagacaattgctgactgtatatgacataagaccgcaaggtgtttctaatgggaatctggaaaattaacattgaaaggaactattgcgtgattgcttatgctatgc

SEQ ID NO: 371 - DNA, 6268 bp, unidentified
  source 1..6268: mol_type = unassigned DNA
tcctttgcatgatctgcgatatagcgtgccagcaaataggatttccctgttccggtagcctgcacgaccgcaccgatacggtgttgtttgaatccccgcatgatcgccctgtaagccgcttcgttatgcggataaagctccacatgtcttccggacaagaggctttcaatatagctttcatccgaaacggtcagcccatgcagttcaaagtccaatgcttccggcaggaatccgccgtgtgccacgatcctgaaatagagatttcgataccctttatttagtggagagagcgtctcataaaacagttctgcatccgaacgggtcaaaggacgttcgtttcgaacctctttcactatggcatgtaccatttccggcttgaagcctatccgtagtccctcttcggattctgttacctggaagcctagacggagatagcaatctgttaaagacgataccatcctatttacttacaagtcaaaaagttcatttgattattgtcctttgctgtttaaagagggctatcatatcacccattgtcagtcgaccggtaatatcttctgttataatccggttcaaaagccgaagatccgcctcaatttggacacggaaacgacaggactcaggataatcatcccggattgtccttgctgtttcatcccaggaagaagctgacaagtgaagacgggaagaaaactccatacgccggttgtgccctttgtagatacggtaataaattgtaccacgctcgggatttttcttattaggttcaaaacggacaacaacagtaggcatccttgttacttttacagctgatttatatagaggagtttcccttataatcaaaacttgggtagggtgattttttcttaaaaacgctcaccaatctgagtattttcccagcattatttatatccgcactggaaatatggataaattcactcatactagtatatgctacccagaaataggagaaagtccaaacaataaaagttcccaaaaggaacacccatacgcaggaattttttcatttaccattccccttttcttcacactaaaatccagaatcatattgcagacggttgcggtcaaaatgcctctcatgcccgttctcttccgaagttagtggtgacaacatatagtaatccttgaatgttatacacccgtttgaaattagaaaccggacgaatctgcatcttcctcgttttccgcttataaagcagaatcatcatcaccttaaaaaatattaatagtctgattttcaggtttaatctcacatctttttatattctgtacagcaatgcgttcacaatacgtccacaagcaagcccgtctccataagggttcactgccttgctcattttttcataggcgactttatcgtcaatcaaaacagatacttcatttactattctgttataatccgtacctaccagttttaccgttcctgcatccaatgcttccggacgttccgttgtgtcgcgcatcaccaataccggcttacccagtcctggagcttcctcttgtatgccaccgctatcggttaatactatagtggatttttccattaaatagacaaaactcagatattctaaaggttcaatgaagaacatgttcccaaaatcggataattcctctccaaatacgtcatgtatcggtttgcgcacatttggattcaagtgcatcggataaacgaagtccacctccgggtatttttttgtcaagtctttgatagcagtacacatatggatgaatccgtcaccgaagttttcacgacgatgtcccgtaatcagcaccagcttcttaccaccattcaaacggctcacgtcatatccggcttttgccagtatccctaccaattcacaatccaacgccttgtcgctcttaattttatccactacccaataaagcgcatcaattaccgtattcccggtcacgatgacattccgatcgtcaataccttcccgtatcagattgctacgactcagtggcgtaggcgagaaatggtaggtcgccagtcgtccggtcaaaagtcgattcatctcctctggccatgggctatagatgttatgtgtacgtaatcctgcctctatgtgtgctaccggaatctgttggtagaaggccgacagagcagcggcagtagaagtggtcgtgtcaccgtgcaccagcactacatccggccttgcctctttcagtacatcacgcatacctgtcaatacacgggacgtcacgtcatataagtcttgtccctgcttcataatgttcaagtcataatctggacaaatatcgaatatatccaatacctggtccagcatttcccggtgttgtccggtcacacatactacagtttccacccgttctggctgtttctggaattctttcaccagcggagccatcttgattgcctccggacgggtgccgaagaccaacattactttcttcattgaattatatttttacatcagattgattttataaaatcgtaacagcgatatatctgtttgttaaaatcgaattcattttttgccatatccaggcagttcttcgatattgtgctgtattcttcgtcaggaaggttaatcaactcaataatattattgtgtaattgtttgaaatcatgtggctttgaaaccattccaaaataatatttcgatacgatctcagccccttctccacctccacaaaacagtataggtatgccaataggtatgagatcatatattttggatggcactgctcctttgattgctacggtaagtggaacaattgacgcatcgtatcttgacaactcttcggcgatttgttctttctttacatatccatgataatacacgaaacaaccgggatgtttatttatatattcttttatcttttctgcctgatttccaccaccatacaagtggaactcagcgccaatagactgaaacggaatattctcgataattgaatatatatcttgtgccacacctaatagtccggcatatacaatgcgaaagggcgtgtgcttccttttgggttgagcagcaaccgcatattgctgcaaattacggtatacaaacttgttttttgtcgaaggaaattgattcacatgccggattatctcttcagactgaccgaaaataccgtctgcattgcgataaatataacgttcaatccacgcgaaaatatcatatatcttcccaccttcacgcattgctccaagctcaacagcagaaagtggccataaatcggatatgttcacaagagtcttgcgcccgaatatttttttgaaaagcgtgatggccgaaccagccactggtagtggagggctttggatgatcaccctatcgtaaccctggatcttctttatcttaaaagcaaacaaccataacatggtcgcaaatgacatcatacttaccgctcgcttaaaaggattcttggacacggttgcataagtccaatatctatacacgtttatgccattaatcttttctttttttgacaaacggcctctataaccctcgaatatttgtccttgagggtaattcggcaaacaagttaacacatccacttccgctccctgacttttcagcccttcagccatattggttatacgggaaggagcagccccaagctcgggagaatagtagaacgacacaattaaaatcttcatattttatgcctgaaatatttgatacgttaaatttctgcaaaatactatttttatcgtcttagaaggttctaggcgattgtattctactgatacaaaatcgtttataatttctatggaatttgcaccagatacagcgatattagccctgttggtccttatttcagttgacgatatggcaaggacctcaatatcgggtgcgaaatgaatatagctgatacattctgtcatattattgccgacaatcttatcatttattgtaaacacatcatcgttaatagtgaatttccgttgatgtatacatcctttaaaaccatcgtgctctgccataatttcattttcggtatcggatagtactcttactttagctcttttacccatacggaaacctccccacacctcgctagaatccttgttgccgacagttacggtgttatgagctgacgtacttcgttcgtactgccttcttgcagtcttgttgtaggtagaaatacctgtatcaacaacaaacggtctgcaatcaattcgcaattcataattaaacgtatcggcatgactatgccccggctgataggtcgcagtaatattacccacatccacaactgcctctaaatgtgttgaacaaagcttcctatagccacattctttcataggcaaaggggtccattccaacttcaatcttttggcgtatgctctcaattcggaaactgtcggtgctatcccatatgccgaatcattaagtaagggaatcgtatcgtctttccacacgatgctctccaaatgccccaacatccttaccacatacagtttcaaaagctcacacattttctcatgacctctattaatcgaggcattatagcaatccaataacctatcgagcaaaatgcagtgatacatcggtgattgctcgtaatgtgagccatcaggcaaaatctgttcatcaagctctttatacaacagacaggatgccttgtcatacatttttttatcggaaaaataaattgaagcgataaacaaagcgtaagcatcttctaaaagatggttgccaagcagttggtattccagtttccgttcgagcaatttacattgcgcataaagggaatcgttccaccgttgcaaccgattgctctccacttttttatgatgcctgccgataaacttgatccagttgatgcttcgcagtgcgataggataaggatcaagaccgatcctgtttgttggcaaatcagttataaaccgttcaacccattctgaaccttgttcaaaagtcatgtcaggttgcaacaaccaatccatataattcagattgtatgcccaaagcatcccatgactaacatcattccatgacttaaaatcccctataagatttaggaatgtaaatgtcttgggtacattgtaacaataccactttgcgataactgagaccatccgcaatgaagattgccggggaacattatattccatcaacttatgagaaaatagtctataatataattgataatagatttgttttaaccgaagatgtttaattgtattgacaataagaatattattagccatttgatttagtgcattataatttcaagtatgcgtttattcgtcttatcagattcaaactcttcttcaaatttcttcaaggcattctctgaatattgagaatagtttgttgcgttaatcgataagatagcttgttttatcgcatctacatcaccgggaattactaaacgaccattgtaaccgtcttctacgatttcaggtattccacctgcataggttgatacgcaaggaatgcctacagacatagcttcgatgataatgcccgggtagccctcgcgataagaaggtaatagcagtaaatcatattctactaaagtttttaaaacctgttcggaagagacaacaccatggtatgttattccgctttcgttgaagttgatattgcgatatttatcctcttttatctcaccatatatatcaagggtataattcgaaggtaacagtttggataccgctataagatcttctatccctttttctttgttgatatgcgacatgaaaacacatctgccatgaaagtctgaggggttctttcgtattgttgaagctttacgcacattagggaaccaatgtatattgtcactctttcctattaactgttgtaggtgcgtaataccctgttgggtttcaaagaatatcaagtctgtttgtctgatagcatcaagtgcccgttgtaattgggtttgaccaattttctttatgtagaactcaaatgaacctccgaatttacgtagtacgacttttttgtgtgccaaacgagctattttgctcaataatgggaaataataaattgtaccatgatcagaaaaattgaacattacaatatcacacccaaacagtctccacaaaaatgccgggaaaaagtatgaataattgcgccacatactacgctggcgagtgcgaagatttgaataccggttgttttgtacaaacctatattcatattcagactgagaggcaagatagtcaagatagtttttcatcaacaccgtcgcacctccataattcaataagttgctctcatcgggaattgagcctacaacgagtaattttttccgtttcatt

SEQ ID NO: 372 - DNA, 7433 bp, unidentified
  source 1..7433: mol_type = unassigned DNA
atgtctctttccgaagaagcaatcactcttcagcgtgctgcgcacgaactgatgtatttgggtatggacggcagtcccgtctatagcgatgacttgtcacggcggaacggtgaggtctaccgtcttaccatggctttataccggtcgggtgtaaaaggcactaccatcgaagagcaggcaaatgtctgtcttgcccttcttatgggttacagcgcctcttttgtggaccatggcgaaaagcagcagcatgtccaggaagtgctggactgttgttgggatgtgctcgacgcccttcccgcttccttactgaagctccgtctgcttaccgcctgctacggtgaagtgttcgacgagtctttggccgacgaaggccgttccatcatcgcctcctgggattccttatcacttactcccgaacagcaggaagcggttgatgaatttcagaatgtgacagacaatccctatccatgggaatatatcgatgaataaaacttttcatataatgcttaacaataaatccgtattgattaccggaggaacgggttccttcggaaagaagtttgtggaaaccattctccgtgattatccgcaagtaaagaaaattattatttactcccgcgatgagctgaagcaatttgagctgaaacagaaatatcccggtcataagtatccgcaactacgtttctttatcggtgatgtccgtgacctcgaacgcctgacgcgggcttgcgaaggagtggacgtgattatccatgcagccgccatcaagcaggtggataccgctgaatacaatcccgaagagtgcatcaaaaccaatgtacacggtgcgcagaatgtgataaaggctgctcttgccaccggtgtacagcatgtggtggccctttctactgacaaggcttgtgcccccattaatctttatggcgccaccaagctcacttccgacaagctgtttactgccgccaacaatatcagcggttccaaggacatcaggttctccgtagtccgttatggcaatgtgatgggttcccgcggttccgtaatccctttctttatcaacaagcgtgacaacggggcgaaggaacttcccataaccgatatgcgcatgacccgtttcaacatttcactggaagccggtgtcgctttggtcatgtatgccatcggacatcacctgggtggtgaaatctttattcctaagattccttcctatcatatccaggacgtggctaccgccattgcacccaatctgccgcaggtggaagtgggcatccgtccgggagagaaactgcacgaggagatgattactgtaaccgatgctcttgatacaatcgatttgggcagatattatgtcattcttccttccgtatctttcaagcacagtcgcgaagagttcatcagacatcacaatgcagtacccgttcccgacggtttccactacagcagtgacaacaatacggagtgggagacagtagagactatgcgcgagaatatcaagaaatacgttgaccctaatttcgaggtgaaatgataagcaagcctattccatacggtcgtcagcatatcacagatgaggacatccgggcagtcatcgataccctgaaaagcgattacctgacacaaggtcccaaaatcagggaatttgaaacgaaatttgccgaatatgtaggtgcacaatatgccgtagcggtgaacaatgctacttcggggcttcatcttgcagctaccgcactgaatgtaaagccgggtgacaaggtgattgtcactcccatgacctttgctgccagtgccaactgcattcgctattgtggcggcgaggtggtattctgtgatattgacaaggatacttacctcatggatatccgtaaactcgaagccatgcttaaagcttctcctcgcggtacttacaaaggtattgttccggttgattttgcaggctatcctttggatctggaagagttcagaaagcttgccgacgagtacggtttgtggattatcgaggatgcctgccatgctcccggcggctatttcatggacagtaaaggcaagaaacaacattgtggtaacggttgttttgccgactgtgccgtattctctttccatcccgtgaaacatatcgctacgggtgagggaggcatggtgaccaccaacagcaaggagctctatgacaagctttgtctttaccgtacgcatggcattacgaaagaccctgccttattgcacgagcatcatggtggctggtattacgagatgcaggagttagggtataattaccgtctgactgattttcaggctgccttgggtatttctcagctggagcgtgcgaaagcaggtcttgaacgtcgtcatgaaatcgtaagacgctataatgaagcgttttccggaatagatggtatcaagactccgttcaatactgccgatgtctatcatgcttatcacctttatatcattcaagtagctgaccgcttgggtctttataattatctgcacgagaacaatgtctatgcgcaggttcattatgctccgcttcatctgatgccttactatcagcagtggggcaataggaaaggcgatttacctatagtagaagagtattacgaacattgtctgagtcttccgatgtatcccacgctgacggacgaggaacaggagtatgtgattgaaaaggttatagaatttgtagcgaaatgaaaaatatagcaatcattcctgcacgtggcggcagtaaacgtattccgcgtaagaatatcaagccctttatgggtaaacctatcattgcatattccatagaggcagctttacaaagcggtctttttgaggaggtgatggtttctaccgatgatgaggagattgccggaatagcttgtaagtatggtgccaaagttccttttatgcggagtgccgagatgtcaaatgaatatgccggtactgatgatgtaattcttgaagtactgaggaagtataaagagcaaggcagggagtttgaaacggtttgttgcatttactcaacggctccttttgtcactcccgaaagactccgggaagcatacggaaaaatgaattcggagatagattccgttttcacttgtgtggcttattcctatcctatacagcgcagccttcacatcgtggatggaaaaattagtatggtttatcccgaatacaaaaatgcacgttcccaagatttagaaccgatttatcacgatgccggtcagttctatttctctcgcactgctccctttgtggagagccggactttttggggtgagaatacagccgggttggtactttccgaacttgaagtgcaggaccttgatacacagactgactgggcattggcagagatgaagtatgagttgcttcataaatgatgtaatgcagaaaatctatctccgtgccgatgcaagtgctgccatcggctacggtcactttattcgtactctggctttggccgatatgctgaaggacgattttgattgtaccttctttacttgccatcctaccccttatcaggtgagtgagatggagaaggtatgtcctttcatccccttacaggaagaatcacattatgatgagttcctttcccttttgcaaggtgacgaaattgtggtacttgacaactatttctttactactgattaccagcgtgccatcaagcaaaaaggttgctgtctggtgtgtgtggatgatatgcacgacaagcactatgtggctgatcttatagtcaatcagggattgggttacacgcgtgatgactattcgtgtgaaccatatactcaatttgcctttgggcttcaattttcattgttgaggaggcctttcttcaatgttgcgctgcagaataaacggaacaattattcaggaggtttatatgtattggtggcttttggtggttctgatttcttgaatttgacgtatcagaccattcatgcaattaaagccaaagacaatgtgaagaagataacggcaattgtcggtgattcgtatgcagccgagaatatggttgatgaccccaaagtaacctatcagaagaatttgtctgccggttccattgcagacttgtttagtactgtagatgtcgccatattgcctgcctctacgatgatgaatgaggcattggcctgtggaactcctgttataggagggtattatgttgataatcaggagcacgactattatatgtttttgcgtgaagggctgattcagggggcgggtgattataccgatgccgctgcctttactcttgttgctgagaatttggataagatggccattcgtaaaagacatgccatcactccggatattcccaaacggtttgtcaatttgtttaaaagtctgttgatatgcaagtaacttcacaaagagcttcggccatattgtataattatctgtctggcaaccattttgataaaccgttcttattgccggcaaatgtgtgtcctgtagtgcccctgtcgtttatgaaagcaggtgtcggttttgagtttatagacatagatgaaagccatgccatgtcaaccgagaaatgtttgacagctatagaggcgggaaaatattccggtcttgtatttgtgcatgcctacgggaaaaagtatgacaacaaagaattttaccgggcagtgaaaagtctcgatccaaatctttgtatcattgatgattgttgcttgtgcattcccgaattggcagattccttgcctgaaaatgtggatctctgcctttacagtaccggatatgccaaattcatagaactttcctatggtggctatgcaagttttaggggggggtacgaagttgttgattatcagtatgatagcattagtgaacaaaagcattcggtatatataaggaaatgtctcctggagaatgtcagatatatgcttccggctgactatccttggctggacgcctcaaatttacaaatgaccgatgaggaatattttgacatcattgaaagaaagctcccaaaagtgattgcggaaaaagagaaaataaacaagatatacaggaatctgcttcctgaatcgattcagatgggagatgatttccagaactggaggttcatgattgtcatcgagaaccggcagaaggttcttgacgcaatattcaaggccggtctgtttgccgggactaatttcccttcggtttcatacatgttcaaaggtgtttcttctcctgttgcggaagtggaggcgaagcatatcgtcaatttgtttaatgatttccggttcagtgaagcacaggcaagaaagatctgtgatgtgataaattcggttatatgaataaaagattattgatactgggcgcaggtgaaatgcaggttcctgtcatccgaaaggcgaacgatatgggattgcataccatagtcgcagatatggatgcgaatgctccgggaatggggtacgcctcggaaccggttcttgtcagcacgatggataaggaaggtgttttggaatgtgccaaacgtcactctgttgacggcatacttactacaagtgacgcgcctgtaaatgtggtttcctatgtcggggaacagctggggcttccgtccatgtccactgaggtcgcaaaaatctgtacaaacaaatacttgcagagggaaatgtttgcggccaacgggattgatgtaccatttttcatgctttgtgataaagatacggacttgggcacattgcaagattatccatatattgtcaaaccggtagattcctctgcaagccgcggagtaaaaaaggttacaaatcataaagaacttgtacttgctttttccgaagctctcggttattcccgtaccggaaaggccattgtcgagggctttataacaggccgtgaattcagtgttgaaacatatacgcaaaacaataaaactaccgttgtcactattacggagaaactttgtatcggtgaggcagaaggcttctttgttgaagatacgcacattgaaccggcgcgtataacgaaacaggagtgggagctggtttcggagaccgtatcaaaagcactttgcctgattggacttaataattgcccctcgcatacagaaataaagctgaatgaatcgggcgcttatatcatagaaattgcttgtcggcttggaggagattatataacctctgatttggttccattgtcaaccgggatagatatgctgagaaatctggtgaactgttctcttggtttgcccgttgatgtccttcgcaaacatgaaaaatgctcagcggtacagttccttaatccgctcaactatcagcgttgtgtggattttctaagctcttcccggtcatcggctgtttttcggtctgaaataagaccttattctgaaaaaaaaataaaaaactctttagaccgtttagggtatatcatacttcagactgatagtatggaagagcttgaaagtattctaaggacgattaaatagtaaagacatgagagataagtgtatgattgtggctgagatgtctgccaaccataacggtaagaaagaaacagccattgaaaccgtcagggctgcaaaacgtgccggagccgatgccgtcaagttgcagacctatcgggctgataccattacgcttcgctgtgacaagcctgattttataattaatgaaggctctatatgggacgggcaatatttttatgatttgtatgaacaggcttatactccttgggagtggcatgaagagttgttccatgtggccaaggaagaaggactgatctgtttttcttctccttttgataagacagccgtcgatatgcttgaggctttggactgtcccgtttataagatagcttctttcgaaattacggatattccattgatagaatacgcggcttcgaagcataagccgatggtacttgctacaggcatagccaccgaagaagatattcaattggctgttgaagcttgccgcagaatgggaaataatgatattacggttcttaagtgtacctcttcttatccggctccagttgaggaagccaatctttgtatgattcgtgatttggcagaacgtttccaggtaaaaagtggactttccgaccataccctggggagtgtctctcccattgtggcggttactcaaggtgcgagtatgatagaaaagcactttattttgaatcgttccatcggtggtccggattgttctttttctatggaagagaaagattttgcccaaatggtaaaagatgtgcgcatggctgagttatctttggggaaaacgacttacgaattgacggagaaaatgagaggtagccgttccgcatcacgttctctctatgtggccgaggatatgaaggccggagaagtgattacggagcggaacgttcgctccgtccgtccgggcttcggcctgcaccccaaatatctgaaagatatattgggaaagaacgtgaaccgggatttggagaaagggacgaggtttgcattggagtacgtgaatggttag

SEQ ID NO: 373 - DNA, 15630 bp, unidentified
  source 1..15630: mol_type = unassigned DNA
ttagcctaatcttgtggcgctgtaatgccggaaattcctgccgaaataaacttcgttggtacagggcgctttattgccaatttcaggtgccttgataccggataatagcgttaaaggactttcttcgacaaaggcttcatcccataattccgcatcgataaaggactgtaacaggatgtttccgccttcgactaacagagattgtagtccctgcatgtacaggtgtttcatgatttgcggcagtatatcccgttggaagtcaatggggatgtattcaacgttgggttgtggcaggcacggtttctcggtgaacacaagtgtgcggacatttccatcgaatacatgcagcttgggagacagccgcaactgtctgtctgttacgattcgtactggcgaccggccttgccagttccgtacggtcaggctggggttgtccagctctgccgtacgtgtacctaccatgatggcactgtgctctgcccgtttcttatgcacaagcatggatgtcaggggggtggatagaatgaccggttgcccgtcctcacggttcttatcgatgtatttgtcggcagactccgcccatttcagggtaatgtaggggcgatgaagggtatgaaacgtgataaaacgccggattagacttctgcattcatcttccagcaccccggtgatgacttcccgccctgcatctttcagcttccggattccccgtcctgctactttggcaaacgggtcctggcagccgattacgatgcgcggaatctctttctctatgataaggtcggcgcagggcggtgtctttccgtagtgggcacaaggctccagactgacgtagattgtagaacgcttcaacaacgaggggtcttttacggagcggattgcattgacttcggcgtgcgcctcgccgcaacgcacatggtatccctcgccgataatttttccgtcgcatacgattactgcgcccaccatcgggttgggggctgcattgcataacccgttttgggctaactgaatgcagcggcgcatgtatttttcttcttccatactttgtattactcttaaacttccactatttttgcagcccgaaatgccgaatgttatgactgtttccgtttctcatatccgccatgctttgcaggagagttactctgcgcaagaagctgccaatctgtcccgcattgtctgttgcgaaatgctggggcagactgcggtcgattattacctgggcaaagatatgattttatccccaaaagagatgcaggatttagacaccattcttgcccgcttgcgtaatttcgagccgatacagtatgtgcagggcaccgcccgttttctggaacgctcctaccatgtggcccccggcgtgctgattccccgtccggaaacggaggagctggtggaggtgatgctgaaggaagttccgtccggagcccgtattcttgacattgggacggggagcggctgcattgccatttctctctccaagatgctgccggatgccaaagtgacggcatgggacatttcggacaccgccctccgcatagcccgccgcaataatgaggcattgcaggcatccgtgtgctttgtacagcgggatgtgctggcgtatgttcccggcagcggggaacggtatgatgtgattgtcagcaatccgccatacgtcactgaatcggaaaagcaggaaatggagcgcaatgtcttggactgggaacctttttcggcattgtttgttccggataatgatccgctgcttttttaccggtgcattgcagagttgggcaagggtatgctggcgtccggcggcagactttattttgagataaaccgtgcgttcggggaagctacggcaacgatgcttcgcgcacaggggtacaccaatctacgggtgttgaaagatatttccggaaatgaccgaatagtaatcgcagaacgatgatagaaattacagaaacagatgctttaagccgcgtggctgcttattgctccactgcggagcattgccgtgcggaagttacggagaagttgcagcgttggggtattccctatgatgccatagaccgcataatcaaccgtttggaacaggagaaatatattgatgaggaacgtttttgccgtgccttcattcatgataagtaccgcttcgccaaatgggggaagataaagatagggcaggcgcttcaactgaagaaaattccccaaagtgtattttaccgttacctgaatgaaatcgacgaggatgaatatcttgccgtgctggataatttgctggcggtaaagcgcaagagcgtgcatgcggagaatgagtacgaactgaacaataaactggtgcgttttgctttgagccgggggttcgaaatgaaagatatccgtcactgtattacgctttctgatgaaaatgacgaattggaataaaatttatccgtattcttttttattctcgtcagctttctgtatttttgcggcatatttatcataatagttagtttggctatgaaaactttagaaagattgtttgcagagaagttgctgaagattaaggcgattaaactacaacccgctaacccgtttatctgggcgtcaggatggaaatccccgttttactgtgataaccgtaagactctttcatatccttctctccgtaatttcgtgaaagtggaaattacacgtctgattctggaacgtttcggtcaggttgatgccattgccggtgttgctacgggagctattccccagggtgcattggtggcggatgcgttgaacctgccgtttgtatatgtacgctctaccccgaaagaccacggtttggagaacctgatagaaggtgaacttcgtccgggtatgaaagtggtggtggtagaagatttgatttctaccggcggaagcagtttgaaagctgttgaagccatccgtcgcgacggatgcgaagtaatcggtatggttgccgcttacacatatggattccccattgcagaaaaagcattcaaggatgcaaaagttcctttggtgacattgaccaattacgaagcagtgatggaagttgcccttcgcaccggttacatcgaagaggaagatgtgcctacgctgaacgaatggcgtaaagaccccgcgcattgggaagccggaaaataagacttattttacataatgatagattatgacaaaagaaccattcggatagttgctgtccggatagttctttttgtcttttaaagaccattgtattatgactaaatttgaaagtgcggtaaaggtgatacctgcttcgcaaaaagctgtttatgagaagctttcagaccttagcaatttggagaaagtgaaagaccgcctgccgcaggacaaagtgaagaatttgagtttcgatgcggaaacattgtcgatagaagtaccgccggttgggaaaatagtattacagattgtagagaaagagccttgcaagtgcatcaagtttgcaacaaccacctcgcctctgccctttaacctgtggatacagatagtgcccgttacggagacggaatgtaaaatgaagcttaccatcggaatggagttgaatccgtttatgaaaaccatggtgcagaaacctttgcaggaaggattggagaaaatggcggaaactttgtcgctgattaattattaattactaaatcttatggctcagaaactttgggaaaagtccgttcaggtaaataaggatatagagcgttttacggtgggacgtgaccgtgagatggatctttatctggcaaagcatgatgtgttgggttccatggcacatatcacgatgctggaaagtatcggtttgctgacaaaagaagaattgtccctgctgcttgcggagttgaagaatatctacgcaactgctgagagcggggagtttgtgatagaagagggggtagaggatgttcactctcaggtggaattgatgctgacccgtaaattgggtgatgtaggaaagaaaattcatagcggacgttcccgtaatgaccaggtgctgctcgacttaaagctctttacccgtgcggagataagggacatagccgaggctgtagaacagcttttccatgtgctcgtcatgcagagcgaacgttataaagatgtattgatgccgggttatacccacttgcagatagcgatgccgtcgtcgttcggactgtggtttggcgcttatgccgagagtctggtggatgatatgctgtttttgcaagccgcctttaaaatgtgcaaccgcaatccgttgggttctgctgccggatatggctcgtctttccctttgaaccgtacaatgactacccggctgttgggcttcgattcattgaattataatgtggtgtatgcccagatggggcgtggtaagatggagcgtaacgtggcttttgcgctggcaagcattgcgggcaccgtttccaagcttgcgttcgatgcctgtatgttcaacagccagaacttcggatttgtgaaactgcccgatgactgtactaccggttcgagcataatgccgcataagaagaatccggatgtgtttgagctgacacgtgccaaatgcaacaaactgcaatcattgccccagcagataatgatgatagccaataacctgccttccgggtatttccgcgatttgcagattattaaggaagtattcctgcctgctttccgggagttgaaggattgtttgcagatgacgacctatattatgaatgaaatcaaagtgaacgaacatattctggatgacgataagtacctgcttattttcagcgtggaagaggtaaaccgtctggtgcgcgaaggcatgccgttccgagatgcttataagaaggtcggtctggacattgaggctggcaatttctctcatgacaagacagtgcatcatacgcacgaaggcagtatcggcaacctctgcaatgatgaaatatccggtttgatgcagaaagttgtggacggctttaattttgaggtaatggaacaggccgaaaaaacgttgctcggccggtaatcataattgattaactgcttgtggtgtacgatgttggctttctctgtttagggtataaacgtattaatgacagtctggttaatatcgtacatccctatttatttaacttttttccggtaaaaagtttggctgtaacgtagaaactgtttatctttgcacccgttctccagaaacctgcggaaatagctcagttggtagagcataaccttgccaaggttagggtcgcgagttcgagtctcgttttccgctctccttttttgaggatgctcgaatggtggaatggtagacacgaaggacttaaaatcctttggccagtaatggctgtgcgggttcaagtcccgcttcgagtactcatctaaggctttgtaaatcattgatttatgaagctttttttatgctctttatctaaatcggaaatcttatttttttttcggaccgccctgtttttcagcaaaaatagagttgcattttaccttgaattatgccgctcatgtaaaccaagatgtaaaccgaaaaagtatatacgttagctgtttcagttggaatcccctgtaagaaatatcgttgtccatagtgtattatgtcgtaaaggagcattgtaaatgcagctgtatatcagcaaaaacctcgttttgcaattgcgggctctacggttgccaattgcgggccgtacagcccgcagatggaaaccgtatggttcgcaactgcaaaacggaatttatcaagagttatgacggcataatataaggtgcaacgcaagaaaaagaacaaggagaaagtgtattttccttgtgcattttgggacaaaatgtaaggggttggggtactttttccccttaatatgggcagaatgcctcaaaatatgatgagatgtgtattattgggtaaagtaacagataattaagtagttatagaagatgaaatgctgaaaaagcggacattttagtgatgaccgatagtttctcgtcaccggtcgtcacacttctcgtcacctctgtatcgccctctggtaaagggatacgggcaataggtgacgagtgacgaccaaaaaacagttttctttatttcaatatcagttcataatctgctacatccagccattctccgaacttcatgcctacttccttgaagtgggaaacttgtgtaaagccaagtttgctgtgtaaggaacaactggccgtattacaagcggtaatacaagctatcagtgtgtgataattatgttgccggcattcttcgatgagaacctgcatcagcagtttgccgagtccttttcctctatgtcgggcagacaggtatactgtcgtttcgagggtatatcggtaagccgtccgttgtttccagggatgtgcatagcagtatcccacaactttatggtctgtttcgcatacgaaaaagggaaagtggggaaaaatttctgctatacgcaggcgcatctcatcttcagatatcggctctgtttcgaatgtataggtactgttgaggatgtactcattataaatatcggtgatgtacttgacatcttgaggttgtacaggtctaatcataccgaaaaatcattgtttggataatttaagcaggtaagtgcttgctaattaacgatacagccggggacgcctgttattaaaccgataccctatacccagcatcagatagttgggttcatgaaaatccttcaggttgtagccgacatgcaggaatgtgtcgcgggtcatatctattttgagcgccaggatttggtagaatgattgcaagtcgcccccgccatgcaggatattggctccgaaacctatgccgacggtaaagtagggcattacccattctccgcgtgccgagacacccagagagagttgtttgcgaagcgggggagtgccgaatgcctcttcctcgctggcatcgtcgagctgggtagcgtaatcctttgtataaatgttggcactggcatcatagacaccgtccagagatactcctgcacggaatttatatccgaagttatacatcggagcgaaacagaacccggctacgccgtatttgccgggagcggggacttgtccgccgggaacgtttacggctttccgtctccacgaaccgaacagcataaggtcatagctgacatgccgggggaatgccggaaccggaatttgctgcaacggttgcaaggttttgtcaatgtcccggttgaaattatatgccactccgattttaaaatctatcgtgttcagtccggtgttggggtaccgggtattgccgttggagaaatgtactgccgttgcgccgatattgaggtcgaaccgcggggaaagtatccagttcaggtgaatgcctgcgctgagataggcgtttactttgcttcccattacagtattgttgggattgctgagatagtcatacggcttccagccaaaagatgcgccgaacccccattcgtagttaagcgacaagcggggagtgattccggcgatgcgggcgccttggaaggcgtagagggcaacgggaattcccatttccctgcggttgccgaaatcgaaatagcccaatcctattccctgataggaacttccgtatacccggtcggcggcagtacccggtggcagccggaatgagtacttcaagtgggcggagcaagcagacctcattattttgcgcatatcgttttcaccccgcagaaaggagctggtggggaaaatatatcccgcccggccttcaatgccgagacggtggatataagcatcttgtgcgcatatattattggacagaaacagtataatcattaagagaatcatatctcttccggtccgcattttactattcatgatgtcgtggcgttctctgaatcttgtgcaaatataatccttttatctttttatttgcatgaaaatcttatatttgcaaggttaataattcgtcatctatgttattcaagaaatatgctggtcaatcggaataacagtggaatttccggtggcttccttattcgttgactattcgacggactgaacttatccggggtgcttatggacagggtatattcctgttacatggaaacggagttctcgctctttcctcgtatggcggcattggccgagaatgtgtggtcgccggcagagaagagtttgcaggatatagtacggaagcggtagtcttcattccaaagaacaggacagcggttgtatcaattatagaatgacagataatacgtcagtcatcattttgatacaaccgctgtctcttttacaagccatctatgcttctgcttattccgaagcggttatttctcgtcgttcttccggatttccacacggcgtatcttaccgctgatggtcttgggaagttcgtcaacgaactctatgacacgggggtatttgtaaggagcggtcactttctttacgtggttctgcaactccttgaccagttcctcgccggcgcggttcttatagtctttggacagtacgatggtggctttcaccacttgtccccgtatttcatcgggaactccggtgatggcacattctataactgcgggatgcgtcatcagggcgctttccacttcgaacgggccgatgcggtaaccgctgctcttgataacgtcgtcggcgcggcctacaaaccagaggtagccgtcctcgtccttccaggcaacgtcgccggtgtaatagatgttgtcgtgccatgcttcgcgggtgcggttggcgtcgcggtaatattccttgaacagaccgagcggcttgcctttgtcggtacggattacaatctgtccttgttcaccggcctctaccgaacggccgtcatggtctatcaggtctacgtcgtattggggattgggcaatcccatgctgcccggcttgggttgcatccacggcatggtggctacggtaagggtggtttcggtctgtccgaaaccttccatgaggctgatgcctgtcagtttcttgaatgtatcgaatacggcggggttcaacgcttctccggcaatggtgcaatactgcaatgaagagaggtcgtacttcgtcaggtcttcgtgaatcaggaaccggaagatggtaggcggtgcacaaagcgaggtgacgtgatagtcctgtatctttgtcagaatatcggcaggagtgaatttctcgtggtcgtatacaaagatgttggctccggctatccattgtccgtacagtttgccccatacggctttaccccagcccgtatcggcaatggtgaggtgcaggctgttttcgtgcaggttgtgccagaaacttccggtaacgatgtgccccaacggatacgtgaagtcgtgcgccaccattttgggttcgccggtagtgccgctggtgaagtacatcaaagaaatatcgtcgttgctgttgggatgctccggtcgtgcgaaaggggcggcatcggcaatgcctttgtggaagtcctcaaaaccttcggctatctccgggcctacgctgaccagcttcttcacactcggagagtcgggcatggcagccgtgatgtggtcggtaatgacgctttcgccggcacagacaatcatcttgatgtctgcggcattgcagcggtatacaatatctttcttggtaagcaggtgtgtggcggggataacgacggctcccagcttatgcagtgcgatgatgctgaaccagaactcatagcggcgtttcagaatgagcattaccatatcgccgtggccgatgccgaggctctggaaataggaagccgtcatgtccgtatagcgtttcatgtcggcaaatgagaactggatgtgctcgcccttgtcattggtccagagcagtgcgggcttgtcgggatgttcggccgcccaggcatccactacgtcataaccgaaattgaaattctccggtacgttaatctttaaattcttgatgaagtcctcttgagatgtaaaggacgtttgcgataaaaatctttctaccataacttttggaatttcttcattcaccgttcttcatttatgtgttgttacatgattacagcaaggaaacgtactttctttccgtccagcgctttcatgccgtgaggcagtttggagttgaaatacaaactgtctccttcgtttaaaatcaagtctttgccgtcgatgctcagcatcatgcggccttccagtacaaggttgaattcctgtccggagtgactgttgtagtgtatcggctcgttatccggcttgggttcgacggtgacgatgaacgggtcggcgttgcggttcatgaagccggcagccagtgactggtatttataggcttttgtacgctcgatgctggttcccttgccggcacgggtaaggaagtagctgctcatcttcggctcttcaccgaacatcagggcatccagtgcgatgccgtaacggcgggctatcttttgcagcatgcttacggagatgtcgaattctcccgtttcggcaagacggtactcttctgccgggatgtcgcaatcgcgggcgatgtcttcggcattcaattccaatacgtcgcgcagtccgcgcaggcgttcggctatttgtttaatctgttcgtccatgtggtttttattaagtggattagtacggttatttacttgctttgatggcattgataatggcggaagagaatccttgatgttccagttcgttgatacccttgattgtaattccgccgggagtgcataccttgtcaatctctatggcgggatgcgtgtcgttgttcagaatcagttcggcggcgccttttaccgactgggctatcatgcgcatgccgtccttggggtaaacgcccagttctattccggcctgcatggctgcctggatatacttcagtacataagcgatgccgcaggaagtcatggcggtggttgccgctatcttatcttcgggaatcagcatggcaagtcccatttggttgaagatgtcgagcaaaagctgttcctgttccttgctggcgttacggcttgcaatgagcgtcatgctttccatctcgctgatggcggtgttggggatgaggcggaacatggtcatctccttgtctgccacgtagtgtgccagttcttcgaaagggatgccggcagctacggagataagtatctgcttgcttttcagcttgagttcgcttaccaccggttttatcagccacggtttgacggcgagtatgatgagctcggcgccggtaacggcttcctgattgtcgcgtgtggtttgcaaagtggggagctcagcctttaacgcatccagtttgccttgcgtgggattagaaacaatgatgtcgctggcggggatgatggttccttttgccagaccgcgggcgatggagccgcccatatttcctgcaccgataattgctgttttcatatcatcttgtcatttaaaaagttgtcttcgggcaaaggtaaagattttaatgaaaaaacgaccgaaacaggaaggtattcttctttcggtcgtatcttttgccggctgattatccgtaaattgtcaaagtgctttcttaaaacgttccaggaagaggttcgcttcgtccatgccgagacacaggggcggcaataggcggagtacgttcgtgccgctgacaccggtaaacacatgctgttctttcagtaacctcaaacgcagttctttgacaggctcttcaaattcgaggccaatcatcagtccgcgtccgcgcacttccttgatttgcgggaatttcttcagctcttccatcaggtatgcgcctacttgggcggcattctctacaagagcttcctgctctatgacatccagtacggcaagcgcagcgctgcaagccagatgatttccgccgaaagtggttccgagctggccgtaaacaggagtaaacatcggactgataagtacgcccgccatcgggaatccgttgcctatgcctttggccacggtgatgatgtcggccttgataccgttgtactgatgggcgaagaacttgccgctacgtccgtaaccgctttggatttcgtccagaatcagtaccgtattgtgctctgtacaggccttgcgcaaggcttgcataaactcgtcggtgggcaactgtatgccgcctactccctgaatgccttcgatgattacagcgcatacatcgcctttcgccagttcggctttcattgcctctgtatcattcagcgggagataggtaacgtgtccgcagttgttgatgggagcaatgattttgggattgtcggttgcctctaccgccaatgaagtacgtccgtggaaagctttcgagaaggataccacgcgagttcgtccgttatggaacgaagcgagcttcaacgcgttttcgttggcttcggctccgctgttgataaggaaaagggaataatcattgtatccgcagacctttcccaaccgttctgccagttgctgttgcagttcgttgataacggagttagaatagaatccaagcgtggctacttgcttgccgagcatctctacatagtgcggatgtgcatgtccgatagagattactgcatgaccgccatagaggtcgaggtactccgtacctttatcgtcccatacatggcagccttttcctttgacaatattgatgtcaaaaaggggatatacatcgaatagtttcattctttcagtaactgattacaaattaaagatactttagaaagcactgggtttcagtctcaaaccgacagtctcttccagattgaacatcaggttcatgttgtgtacggcctgtccgctggctcctttcagcaggttgtctatgcaggagatgataaggagcttgtcgccatgcttttccaaatggataaggcatttgttggtgttgacaacctgcttcaaatcgatgttcttgccgacgatatgcgtgaaggagtctttggcataatactcttcatacatgcggacaatctcttccaacgccactttggtctttatcacgatagtggtaaaaatgccgcggggaaaatcaccacgataggggatgaaatcgatgtccgaatcgaaactgttctggagctgtttgagcgattgcttgatttcgggcacgtgctggtgctcgaaagccttgtacacactcaggttgttgttgcgccagctgaagtggctcgtagctcccggcttgacgcccgcaccggtgctgccggtgatggcattcaccataatatcgccgttcagcatcagatgcttggcaagcggaagcaggcccaactggatgcaggtggcgaagcagccggggttggcaacatgctttgccgtgcaggtggcacggcggttcagctcgggaaggccgtagatgaagtcatggtcgtcgctcttgatgcgatagtccatggagaggtcgattatcttcaggtcttccggtacgttgtggctttccatgaattttctggtgtcgccatgcgccgtgcagaagaaaagcacatcgatttcgtccaacggaagttcgtcggtaaacgttaaatccgtctctccgtacaacccttcgtgtacgtcggttattttgttgccggcattgctcgagctgtttacgaatacgatttccgcttcgggatggttcagtaacaggcgtatcagttcgcctgccgtgtatccggctccgccgatgattcctactttaatcatgttgataatatctattgggttcttctggtattataactaatagtatgatatatataagcgtacctgcaaacgcagtgaagatcgtagcaaaaacgtagatgatgcgtaccagtgacacgtcgagtccgaaaaagtttgccagtcctgcacatacgccggaaagcattcttccgtttcgggggcgcgttaatttttgcttccggttcatcatttagatttcttcgtctttgtggtttgagtaataggcacgcagtgcggtagaagtcaccttgatgaagcctttggcgtcttccgcagtccagcctttctgcatttcaccgtattcgccgaatttattctttacaaggtcgtcgtcgctttccacgcctacggtagagaaacagagcggatgaagttcgagaatcgcagtaccgtttacattgcgttgcgaagactccagcatggcttcgatgtcgcgcattaccggttccagatactggctttcgtgcaggaacataccgtaccagttggctacctggtctttccagtattgctgccatttgcttaatgtgtatttctcaaggaacttgtgtgcgccgataatcagcatgggagcggctgcttcgaaacctacgcggcccttgataccgataatcgtgtcgcctacgtgcatatcgcggccgatgccgtaagccgcaccgatttcctctaccttctggatagccttgatggggtcgtcgaatttttcatcgttgaccgctttaagctcacccttctcgaaggtcaggcgcaactgttcgctgccttctttcgtgcaatgtttcagataggcgctttcgggaagtccctgtgcggaatccagaatttcaccgccgcaaatggaagtaccccacagacctacgttataggaatatttcagtttggcgaagtcggctgcaaagccgtgcttgttcagataatctatctcttcctggcggctcaaagccatgtcgcgtgtcagcgtgatgatttccacgcccggagccatgacaaggaaagtcatgtcgaaacgaatctggtcgttacccgcaccggtcgaaccatgtgcaatggcgtctgcgccgatttcgttggcgtagcgtgcaatggccagcgcctggaatatacgttcggagcttacggaaataggataagtaccgttacgcaatacgttgccgaataccatgtatttcaagctcttttcgtaatattcctgcgttacgtccaaagtaatatattttacagcacccagtttgtaggcgttctcttcgtttgtcttcagctgttcggggctgaaaccgccggtattggcacaagccgcatatacctcgtatcctttctctttggccagatacataactgtgaatgaggtgtccagaccaccgctgaatgcaactactacttttttcttcttttccataatacttatgaattttgaatgttgaattataaattgggaatcaggcttgtaaacgagtctgtgtgttcccattcataattcaaaatctataattaattatattttatcttcctcgtgtaacttcgggtcgtaaagcattgccgtgcaaatgcagaacttccggtttttggctaccagtatgtcatggttgatacagccctcgcagcctttccagaaagcctcgtcgtctgtcagttcattgaaagtaaccggtacgtagcccagttcggtattcattttcataacggccgctccgctggtcagactgaatatcttggctttgggccaccgcaggcgtgccaggcggaaagaagccgtcttgatacgtttggccagtcccaagccgcggtaatcgggatgtacgatgaggcccgatgttgccacgtactgcttgtttccccagctttctatgtaggtgaaacctgcaaattcgtctccacataaagctatgatagcttttccttctttcattttagtcgccacatattcgtgtgtgcgttctgcgatgcccgttccgcgcaccttggcagcttctcggatggtatccaaaatcttatccacgtaaacttcatgtgaggcgtcggccaccatcacatcaatctgtttcgaatccat

SEQ ID NO: 374 - DNA, 7216 bp, unidentified
  source 1..7216: mol_type = unassigned DNA
ctaatccttaatcccttgtttcaagtattcgtaaaagctatattgcgaccgtaccttctccttttgcggtcgtgacgacttccagcggtttcgcaaccggtcgtccacgaagcaggctttccgtttgtccgacagttgtatggatagcatatcgatgagctcttgcttcaagtccgggtccagaatgggggtgacggcttcgatacggcggtacaagttacgccgcatccagtccggcgagccgaggaagagcttgggtgcgccgccgttgccgaagtaccacacacgggcatgttccagaaaggtatccacgatgcgtgtcacgcggatgttgtggctgtactcctgcccggggatgaggcagcagatgccgcggacaatgaggtctatctctacaccggcttgcgaggcttcgtagaggcggtctatcatggcggggtcttgcagggcattcatttttaggataatccgtccttgcttgccttgccgggtcagttctatttcgtgattgatgaggcggttcagttcaggaatcaggttgaagcgggccacaagcaggcggtggaacaccggattttcctttccctgcagagtacggaacaagttgtgcaggtcgtttacaatcaccgggttgcaggtgaatagtccgctgtctgcatagagggtggcggtcttttcgttgaagttgccggtgctgatgtaggcgtagcttgtcagtttgcgcccttccttgtcgcggcgtagcacgagggctactttggcatgtacctttagtcctggtatgctgaaaatgatgttgatgccggcggctttcatcatctcggcggtggcgaggttgttttcttcgtcgaagcgggctttcagttccacaaagacggtgactttctttccgttctgtgcggcggctattagggtgttgatgacggtggagttctctgccacgcgatactgggtcaccatgatttcacgcacggtgggttcgtggacggcttcatatagaaaatggatgaagtggtcgaaggagtggtagggataatgcagcagcaggtccttcttctccacatagcggaagatggattcgcgttcgtccaggcaggtcagcttcatgggctggggtttcttgatgggacgtacgctttggttgggattaggcagatgccgcaaatcctccatgttgaggtgcttgtctcccggcaccagctcccggcggtctatgcggtaggcatctaccagaaagtcgaggaagtcctggggcatggcgcggtcgtatacaaaacggcacacggcgcctatcttgcgtttctttaccttcttcttcacctgctcgatgatttcggaggtattggcggcatcgtctatcagaatatccgcatcgcgtgaaatcttgatgcaataactgctgtccacttcataaccggggaagatggtatccagattggccttgatgatgtcttcaatgaacatcagataatagtctttccccaccttgggcagctggatgaagcgcggcactttgctgtacggcagtttcatcacgaaatactggatgcggtttggagaactggcgggagctcctttcagatgaagccgtacggctagatagagacggttgtcgcgcaggaatgaaatcaccttgtccttgcttacgggcaccggggccagataggggaatatctcttcgcggaagaagctgcgcacaaaatcgcggtgaaacggttctacgttgcggctttgatagaatatgatgtgatgtttccgcagggcgggcagtatcttctgttcgtagatgcggatacgttcctccagttggcgattgacttcttggttgatttcatctaccagttcggcggcagactgcatagtctcttcatcgctttgcgaggctccggtggctatggccttatggtcggctacgcgtatcttgtagaattcttccagattggaagagtatatagaaataaagttgatgcgttcgtatagcggcaatgtctcgtcttccgcttccagcagtacgcggtagttgaaggaaagccagctgatgtcacgtttgaaatatctgttgtccatggtgttaaggtgttaatgtggcatattagcacattaccacattgtattcttcccaaatataattacctttgtcttaataaacaaaggaaagatgacaaaagttggtttattatcggatacgcatggctactgggatgaaaagtacctgcaatattttgagggctgtgacgaaatatggcatgccggtgacatcggttcgctggaagtggcacagaagctggcggctttccgtcccttccgtgccgtgtatggcaatattgacgggcaggagatacggcagctctatccgcagattctccgtttcacggtggatggggcggaggtgctgatgaagcatatcggcggttatcccggcaactacgacccttccatcaagggcagcattctggtgcgtcccccaaagctgttcatcagcgggcactcgcatatactgaaggtgaagtatgacaagacgttggatgtactccacatcaatccgggcgctgcgggcattcaaggtttccataaggtgcgtacgatggtacgctttgcggttgatgggggaacgtttaaagatttggaggtgatagaacttgctgaccgatgatgtagtttgtttattttcaatggattgtatttaccgattgcttgcgctatagtgtaaaagccgttacatgctaatgtaaaggttgttacgctattgggtaaaggccgttacactatttggtaaaggtcgttacacgctgaggtaaagaccgtttcatcaaggggtgacggccgttacgcactgaagtaagcaaaacaatgtaccggagtaagcaaagcaatgaagtaaaaagatgaaaccaagccttcacttaatcgaatttttccattatctttgtacccgaatagcaagtagagccgtggggcatcgtcctccttcttattttattctccattttgaagtatcaccgaaaaagaactgaaatatgaaaggaattattcttgcaggtggcagtgccactcgtctctatccgttgtccaaggctatctccaagcagataatgcccgtctacgacaagccgatgatatactacccgctctctacactgatgttggcgggaattcgcgaagtgcttattatctctactccacgtgacttacccatgttccgcgatctgctgggaaccggtgaagaactcggtatgtccttttcctataagatacaagagaatcccaacggactggcacaagcctttgtgctgggtgcagagttcttggacggcggaccgggctgccttattctgggcgacaacatgttctacggtcaaggcttctccgccatgctgaagcgtgccgcttccatagacaagggtgcctgcatctttggttattacgtcaaggacccccgtgcctacggtgtagtggagtttgatgccaacggcaaagccgtctcgctggaagaaaagcctgccaatcctaaaagcaactatgccgtccccggactgtacttctacgactccaccgtgacagagaaagccgcctccttgaagccctctgctcgcggcgaatacgaaattaccgacctcaaccgtctctatctggacgagggcacgctgaaagtggagctcttcggccgtggctttgcctggctcgacaccggcaattgcgacagcctgctggaagccagcaattttgtcgccaccatccagaaccgtcaaggcttccgcgtgagctgtatcgaagagattgcctggcgcaagggctggatagatgtagaccagctgtatcgcttgggtgaacagcttggcaagaccgaatatggcaaatacctgatggaactggctgaatcgaagcgatgaactctttgttccccaaaaagagaaggagaatagttctcctataaaggcccgctgactttaatttttaatttataatttttaattctcatgaagacttatctcgtaaccggtgccgccggttttatcggcgccaactatattaaatatatcctggcaaaacataatgatattaaagtggtgatactggatgccttgacctacgcaggcaatctgggcaccattgccaatgacattgacgatgaacgttgcttttttgtaaaaggtgacatctgcgaccgcgtgcttgccgacgaactgtttgccaagtataagttcgattacgtagtgaattttgctgccgagagccacgtagaccgtagcatagagaatccccagcttttcctgatgaccaacatcctgggtacacaaaacttgctcgatgccgcccgccgtgcctgggtcacgggtaaggacgagtccggttatcccacttggcgcaaaggcgttcgttaccatcaagtgtctaccgacgaagtttacggctcacttggtgccgaaggctacttcacagagcaaaccccgctctgcccgcacagcccttacagcgccagcaagacgagtgccgatatggtagtgatggcctatcacgatacctataagatgcccgtcactatcacccgctgttccaacaactacggtccttatcacttccccgaaaagctgattccgcttatcatcaagaatattctcgaaggcaagaacctccccgtctatggcgacggcagtaacgtgcgtgactggctctacgtggaagaccactgcaaagctatcgacctggttgtccgcgagggtgtggaaggcgaagtctacaacgtaggcggtcacaacgaaaagaccaatcttgaaatcgtgaagctgactattgccaccgtccgccgcttgatggaggaagaaccccgttaccgtgcagtgctgaagaaacaagtaaaagccgccgacggcacgattgacatcagctggataaacgaagaccttatcaccttcgtcaaagaccgcctaggtcacgaccagcgttatgccatcgaccccacaaagattaccaatgccctgggctggtatccggagacgaagttcgaggtcggcatcgtcaagaccattgaatggtacctgaacaaccagccgtgggtggaagaagtgaccagcggtgattatcagaagtattacgaacagatgtatggaggtagaggttaaggtttagggattagggtctaaccgctaatccttaacctctaacctctcaattcagcgccaccgctaacagtaatcctaagaacagcatattgcgcgacgtctcgcccagtatgctgttcagctttttaccgctacctatctgtatcattttgcgccacgtcagtgcgtgcatatagagatagacgcagggagcccagataaattccagcggagtcagcttgcccgtgtagacaaaccagaagcagagcagcacggcggcgatgcccagtgccagatacatattctcaccgaacttcttgccgtagcgtaccaccagcgtacacttgccgctcacggcatcctgctcgcggtcgcgatagttgttcaccatcagcaaggtgtctatggcgaggccactgacgagcgacagcaccaccacatccatattcagcgtataggcctgcacgtagtaggtgccgcatacgggcacgaagccgaagaacaccagcaccagtacgtcgccccagccccgataggagagcagcgtggtatagaggaaagcaaacagtatgcacaccacgcccagcaccaccagttcccagcctccgtggggcagctgcccccagacggtgaacagcactgccagccctgccaggcacgacagtgtcagtgcgatgccgatgccggttttcatggctgccggcgtaatccaaccttcggcgcaggcgcgctgtggccccagccggtcttcccgacggtcggtccctttctggaagtcgaagaggtcgttgataaagttggcggcaatctgcatgccgcaggcaaagagggcgcacagcagggcgggtgcggtcttgaactgtccgtcgctgaaggtaagggcactgcccagcaataccgggatgatggctcccgtcaacgtcttggggcgggcggcgagaaaccatgcgtagggtgaattctgtttaatctcgttcatcgtagttccaatttagttcggcatctgccagcaaaaatactgaaaatccctatatttgtacccacttatgatgaagaagttagtctacatatccattctttctctgctgctcttgtcttcctgccgttccaagcggatgattaccgtgtcgttgccgcagccagtcatgcaggcagacagcacgcagcttggcgatactatcgggttgcctgcccgcctttcgccgatgttcacctttgaccagtctgatttgcgtaatgtccgccgccagccggcgaagggcgaggtaaagaaacagcagataaagaaaacggcaccggtacaaaaggtaattgtgcagcgaggtacaagaatcacatcgaaaaccacccacgtaggctcggcctataagggcgtcagccgcattaagacgtacgacttcacgcatcgcgacgtgcctgccgccttcgagggcttccgcatcgcctttgtctccgacctgcactacaaaagcctgctgaaggaggagggattgaaggacctggtccgcctgctcatagaccagaaggccgacgtgctgctgattggcggtgactttcacgaaggctgccagtacgtgccgcccgtcatggctgccctggcgcaagtgaagacgccgttgggcacctatgccgtgcttggcaacaatgactacgaggcttgctatgacgacatcgtgcgcgaaatgaggcattatggcatgcatctgctggagcataaggtggacaccctgcggcgtggcggtgagcggattcttgtggcgggcgtgcgcaatcctttcgacttgggcaagaacggcacatcgcccacactcggcctttcgcccgacgatttcgtaatcctgctgacgcatacgccagactatgccgaggacgtcccggtgacaaactccgatctcatcctggccggacacacgcatggcgggcaggtgacgctgttcgggctttatgcaccgatagtcccctcgcactacgggcagcggttcctctccgggctgaagtacaactcaaagaacatcccgatgattgtcaccaacggcatcggcacttcgcagaaagccatccgcatgtttgctcccgcagaggtggtgatgattgtgctgcaccggctgacggactga

SEQ ID NO: 375 - DNA, 27334 bp, unidentified
  source 1..27334: mol_type = unassigned DNA
  misc_difference 18138: note = a, c, g, or t
  misc_difference 18139: note = a, c, g, or t
  misc_difference 18140: note = a, c, g, or t
  misc_difference 18141: note = a, c, g, or t
  misc_difference 18142: note = a, c, g, or t
  misc_difference 18143: note = a, c, g, or t
  misc_difference 18144: note = a, c, g, or t
  misc_difference 18145: note = a, c, g, or t
  misc_difference 18146: note = a, c, g, or t
  misc_difference 18147: note = a, c, g, or t
ggtgccggactgttcgccccccatctggaggaatgcgacggtctgattaccgccgtccccggccttgccctggtggtgttcaccgccgactgcacccccctgctgttctgggacgaaaaaaccggggcggtgggcgctgcccactccggctggcggggcacggtcagcggtatcggcgctcgggtggtggaagccatggagcgggagttcggctcccgtccccaggacatccacgccgccattggccccaacatcggcctttgtcattttgaaaccgacgaggacgtaccccaggccttccgtgccgcctacggcagccagatggatccttggattaccgctgacggaaaaaaataccacctggatttgaaagccatcaaccgtcagattctgctgaacgccggtgtcacccaggtggaagtcagcaccgaatgcacccaatgcagcccccagcgcttctggtcccaccgtgtcaccggcggagagcgtggctcccagggtgccatcatcgtctgtcaggaggtgtcccgatgaaaaagcatatctgtttcctgctgattacggcgctgctgtgttcctccctgtccggctgtgtcagcaccgcggtgggggatgacgattttgttcccaagggcggcgaaatgctgatggaaggcgaggagccggaggatttgtccctccaggacgaggagctccagtccctgaacctgacctacttccccaaccgctccatgaaccccctgatcggcaacaacatcacaaaccgggtgctgttctccctgatttatcaggggctgttcagcgtggaccggaacaacaatcccgtgcccattctctgctcctactatcaggccacctcggataaccgcaactataccatctatattgaaaccggtgcccggttctccgacggttcccccctgaccgtggccgacgtgctggcaacctacgaggccgccaaaaacagcgactactacggaggccgcttcacctacatcgacagtgtggtgcagggtgagaacaattccgtggtgttccacctgaccactgcctatgaaaatctggcgctgctgctggacatccccatcgtcaaggtggggcacaccgccgatgactaccccctgggcaccggaccctactccttccaggccaccaacaccggcgcacggctgcaaaaggtgaccgactggtggtgctccgcaaagctccccaccaatgccgaaacaatcaccctcaccgaagcgaccagtcaggcgcaggtgcgggatgagtttgaatttgacgaactgggacttgccatctccaatcccatgtccgactcctacgcagaataccgctgcgactatgagctgtgggaagtggacagcggcctgttcctgtatatcggtgtcaacgcgctgtggagcgaatttttcaaggatgggaaaaatgacgaactgcgcaaggcgctgacctacgccatcgaccgggataccatcatcgattcctactatcggggccgcgcctatgccagcaccctgccggtttctcccaattcgccctactacagtgagagtctggcttcccgctatacctatgatcctttgcggtttgtcagtgccattcagaatatgtatatcccgaagaacaccaagggtgagccaaagaaattcctgctgctggtcaactgcgatgattccgcccggctgcgtaccgcccggtacattgcaaagcagctgacggagctgggtctggaaaccggcacactggaatacggtgccagcaccggaaccacctatgagcaggtgctgcgggcaggcagctatgacatctatctggggcaaaccaagctctctgccaactatgacctgtcgcagttcttcaagggctggggcaacctgggctggggcggcattgccgacaacaccctgctggggatgtgcaaggaagcgctggcaaactccggcaactactataacctgtgcaagatggttgccgatgacggaaaaatcattcccgtgctctttggctattacgaggtatacgccgagcgcggccagctgcttgatctatccccctcccgggacaatgtattcttctacaccctgggcaaaaccatggaaagcgcccgtctcgccacgcagtatggctaaagcgcagcgcgctttcccagtgacgctgcggacgttgtacaaaacggtagttcccgaacccgcccggtaacgataccacacgccaaaccatcgtactgataccattcaaccacggcgcgaagcgccatcaattcaccaaccgaaagaggtctttacacatgaaaaaatggattgccctttttctgacgttcagcctatgcctgagcggctgtatgctgattccgccgaagagcaccctgcccccggaaacggaagcacccactccggctgccacccagccggagacggaagcgcccaccgagccgccggtatactacaatcccctcaccggcgttcagatgcgggagcctcagacgaaacggatttacgccgtttccatcagcaatatccccgatgccatgccccgcattggtgtgtgtctggcggacatttatatggaaatgtacgtcaatgactccattgtccggggtctggcgctgtacaccgacccctccatcgcccagcagattggcccggtgcgcagcacccgcctgatgttcaacgatttagccacgcattatgacaccatcgttgcccatgccggcggctccaattacgttctgaacaatgccagagaactgggggtggagggcttcaacatcgatacctgggactccaccgactattccttccgggataaaacccgcacccagaaccactacacctgggagcacgttttgtttgcccggggcgagggactggaggcaaaggccgaggaggaaggcttccgcaccaccattaacccggatattgactaccgcctccgctttcagcccgacggcacgccggaaaacggcgaggatgccagccgcatcgacctggtgctgaccttccacaacagcaagaaggactgcggttttgtgtatgagcctgaggtaggccgctacgtttactggcaatacgggaaagaaatgcgcgatggtctcaccgacgagaaggagacctatgacaacgtgattgtcatgttccccacggacattcacattgtcaacagcggctatcaggttgccaattttgaggacggcggtgacggctactacgccagcggcggaaaaatcatccccatcaagtggggctgcgatgacgagcatagccccttctggttcaccaccacagcgggcgagcagctggtcatgacccaggggcgcaccttcatcgccattaccgaggtcggctcccagataacctgggaatgatttgatacaccccctcacccgctgtaggcaggtcgagggggtgttcttcgttggttgctgtaggcgcatggtttccaccgcacccgtaggggaggctcttagcctcccgaagcggcgcagccgccttggctccacctctggggggttgcagagcgcagcgaatctttcaaaattatgattgccgggggcaatcattccatgattaaaagccggcagcccgaatgggctgactgagggggtgtagtacgctggttgctgcaagccaaagatattctgagttccgtaggggaagtgccaacttggcgacccctgcaaaacgccgaaaatagggacgaatctccgcttccccgtgagaaaacttctaaatgtatgaaactattttgtgtaattcaaagtttttttgcatattttaccctttacaaccgctggatattattgtataatgaaattgtgtgagaatgcagaaagaatcacactatatccgtagaatactgcttcatgcagtaatattgaaatggaggaaattccaatgtctgttaaagttgcaatcaatggctttggccgtatcggccgtctggctttccgtcagatgttcggcgcagagggcttcgagatcgttgccatcaacgacctgacctcccccaagatgctggctcacctgctgaagtacgactccacccagggcaactacgctgctcagggccacgttgtcgaggctggcgaagacaacatcgttgttgacggcaagaagattaccatttacgcaaaggccaacgctgctgagctgccctggggcgagctgggtgttgacgttgtcctggagtgcactggcttctacacttccaaggcgaaggctcaggctcacatcgatgccggtgccaagaaggtcgtcatctccgctcccgctggcaacgacctgcccaccatcgtttacaacgtcaaccacaacaccctgaccaaggatgaccacatcatctccgctgcttcctgcaccaccaactgcctggctcccatggctaaggctctgaacgatggctggaagattcagtccggcattatgtgcaccatccacgcttacaccggcgaccagatgatcctggacggcccccagcgtaagggtgacctgcgccgctcccgcgctggtgctgtgaacatcgttcccaactccaccggtgctgctaaggccattggtctggttatccccgagctgaacggcaagctgatcggcgctgcacagcgcgttcccactcccaccggctccaccaccatcctgaacgctgttgtggaaggcaatcccaccaaggaagagatcaacgctcagatgaaggctcaggctaccgagtccttcggctacaacgaggacgagatcgtttcctccgacatcatcggtatgcgctttggctccctgtttgatgccactcagaccatggtcatcaacctgggcaacggcaccagccaggttcaggtcgtgtcttggtacgacaacgagaactcctatgtttctcagatgtgccgcaccatcaagcacttcgctaccctgctgtaatttcagattacgcgcataaatttgccgcactccttttggagtgcggcttttttaataatggtaccagcaaaagtccgggcgggctagggtagggcaccaatgtatccgtaccgtgtccgtgcgtcatcgcctgatggcgcaggccgtcactgcatccgctttttcatgcgcttgattctggccttcagatgtcttctcctccgatggcgctgaatctggcgcttcagccacagcaggaaaactgccagcagcacaatcagcgcaatcacaatcagtgtacgcactgccgggggcaagtcctccatctgcaccggtctgccttgcagcagctctgagagggtgaacgcctccccccgttccttgtggggctgggtcagggtcagctctccatccggcagccgcagctccccgatgctggcgtacaccgccaccttcacccgctcccgcctctccccttcccagtccagcggttccagtgcaaaactgatgtcgtccaccgattctcccgccgggatgagatagaacagcttctgattggcagccggggtaaatgcccctagctccagggagccaaccacccgctccccggtgaccttcacccgggaatagtgggaaaagccatagtccatcagctggtgggtgtccctgtacttgtcctccagcagcggggatttcagggtaaccgccaccagcgtcacatcccccttctgcaccacagcagcaaaggtaccctgagcgctgctggtccagccggtttttgccatctccaccccatcgtagtaatattgcccgccgggcagcagccgatccttgttgttaaagctccgggcggcagaaagattggtggccgggagggtgtaggtaacggtgctgaaatattttttcagcccctcctgtttccaggctgcggcagtaatcagcgccatgtcataggccgtggtagtatggctgctgtcgggcagcccgttggcattggcaaagtgggtatttttcgcccccagctgcgccgccgtctccgtcatcagctgggcaaacccctccaggctgccactcaccgcctccgccaacacattggcggcatcgttggccgactccatgccaatggcatacagtgcctgctccactgtaagccgctccccggccttgagggaaatatgggacgaggtgcggggcaccgcatttaccgccgtctgagagacggtgagcaccgtctccggctgcaaattctgtactgccagcagtgccgtcatgatttttgtaatgctggcagggtacagcacctggtgcatattcttctggtacagcaccgcaccggtttctgcgtccagcagcaccgccgcttgggaggccaggttcagctcctcctcagcggaagctggcagcaccccgcaaagcagcattgccgccaaaaaaagcgtcaatagccgccgactccattttatcatttttgctgctccattccttctgggttaaaaaagtattttacaacatttcccccgaaaatggaataggtttttataaaaattcaggacgattgcacgagttaaaagtgtatgaacacattgtcggtagaatgagcgacgtaggggaggctcttagcctcccgctggcacgaagtgcccttggctccacctctgggggagctggcagcccgaatgggctgactgagggggtgtagtacgttggctgctgtaggctcacggtttccaccgcactcgtaggggcggctcgaagccgcccgctgcggcgcagccgctcagcattcaacgaaccgctcaattgcgtaagcttcgggaggctaagagcctcccctaccaggcgtgggcatatgagctaccctatcatcatttacaaattgtttactcgtgcaatcgtcctgataaaaattcacgttttttcattcgtttacataaaaacagcgcccagcctccacgataccatggatgcgccaggcgctgttttgcgtcagtcccacatatgcctttccaggtattgctccaggtcatagtcatagcggaatcgaacattttgaatggactctccccccaaaatggaaagataagccttctggtggatggcattctgctcctggttgcccatggacagatggttcgccaccatcagtgcaaacgctgcatcgggatagcggcactccacatcgtctcgcttttccggcggtgtgcgcagcaactccgtcatcccggggattttgttgaacgcagcacgctcccgggctgcaaactccgcccgctgctgccgtgttctgttgatacactgcatctcatcatactccttgaagccaaactcgacgggcatcataccatgaaacccaggaaaatacaagtcttgacaagcctctttccggctccaaggttcgtagaattttgagggcagaatttgtacatcttttttcggtgcttatcttccgctgcggatgtccaggagcttgtttttcagctcgttttccatctttgccatttccgcctcggcagccaaacgctgggtgcgtccgttttcctgaatctttaccacatcatccagggtttgaatcaattccgcattggtctttttcagggtttcaatgtccacaattccccgctcggcctccttcgccgtctccacagaggcggtgtgcagccgcttggcgttggcttgcagcagggcgttggtcacgtcattgacctggcgctgcgccgctgccgcctcgctggcgtgggcgatgcccagggtaatcaccatctgatttttccacagggggatggtattgaccagggtggtctgaatcttctccaccatcacattgtcattgttctgaatcatgcgaatctggggggcagtttgcagggagatggctctggtcagctccaaatcatagattttcttttcaaaccgctggcacttgtccgccaaatcctttgccgcctgcacatcctccgcaagaccggtgcggtgggcggtatcttccagctgttgcagcttgccggtgcgaacctcctccagcttttgcttgcctgccaggatatacatggtcagctctttgaaatatgccaggttctgctcatacatctggtccagcatggcagagtccttcatcagccgcacctgatgctgctgcaaggcatcgctgatcttggtgacgctgacctccgccttgtcatagcggtttttcatcatttccagcttattggcctgctttttgaagaagccgaagaaacccttgtcctcctcggtgtcgaagcccttcagctctcccaccacattgacaatcagctcgcccacctcgcccaaatcctgggcgcggacgtttgccagcgctgcatcggagaaatccgccatttttttctgcgtccctgcaccgtactgcataatttgggcagtattctccacgtcaatcttggcagcgaactcccggacaatctgctgctcctccggggtgagcaccggctcaggaatcttgggtgtttcggccaccggggcggcagccacgacggtttcggatttttcctccaaatccggttccagggtcaggctgggcatggcaatcttgtcgttttccatatagcgtcatcctttctcatttggtaaaagcagggtctttccccgccattaaagctcccgctctttacgcagacgggtcagctcatcatccgtcagtccctcctgggcaagcagagtgttcaacaccgaaatatcactggaaacatccagggctgttgttttgaaaatagaatccagcagcttttcaaaggcagtattcagggtgtccagcgtggcttcaatctcccgcttggaattttgaatattctctccctgcaccggctgggcatccatatccgcataggctttcagcagcttgacggtcatcggcaggtaatagtccatgagctttttcagctccggcactacctcggggtgctcctctacccggtcaaaaatcttgcgcaccagcgtctccatccgggaaatcttgtcggaaatttcctggccggggatggcatcgttgcaggcgcggatgtcccggataaaggcgttgcccctgtccagcacctcctgcacccgtgcgtcccgcttctgttcttcggcatcatcctgctgcttcttggtttccacggcctcttgctggcgctgcaccgcctgcttctgtctgacttccaggtagtggacataggaatcatcgctggtgataagactggtttcttcctcgtccagatggccttccaggaacattccgtcttcaatcatgccctttaattccttgcggacgaacttgggggacttgcccaccatgcgcgccagctggttcagctcgcaatgggtcttgccgcccagggctttcagatatttttcaaaccgccccacccgcgtaatggagcggatgccgctggtcagcagccacacgccgccgcccaacaccgcggcggaacatacgccaataacggatagcacaccacccagtcccgtaaacatcgccgcaatgccgctgctgagcacactggctccaccggccagggtcataatgccgccgcccacggttttcaggatgccccacaccagcttcccggtgggattctggtacagtaccggaagcctcttatcccgctgggcgcgcccggcacgggtggagccaagggtgctgctgtagatattcacattgggctgctctgggcgcttgctgccgggaacgtacagcggctcatcctcccgggcatccaccaccttacgccgggcggcacttttgcgggtggccgtgtgcgcagcgcggcgcacagcctcggagccggtatccacggcggaattcacagccttgcggatggtttcatccaaattctgaaaatctttggaattgatggcgcgatcgatgatggcatcaatggcatccccaaggtcatccaaactgtcgttataggacataaactccctccccagagcaaacaaaccatacttttgatttcaatctgttattatatcgctgtttgggaaaaaatacaagttttttcgtaatgttaagaaaattcaatttttaatcaatttacaccatgccgcgggtgcttcgcgcctacaagtcggtaaattgttgttcctgcaatttatttatatatttccatctgctttttcaaaaaaacggcattgtcacagtcccaatcctccttttggaagcaggggtgttccaaaatcaaccttgccgccgccgtcacgtcccctctgggaacacaagcaccaaaatgtccggcgctttccgggctgccgccggtttcataggtaatcaccggcgtgccgcagctgatggcttccagattggtggtggggtaggtgtcctgataggtcaggttcaggaagtaatccgcaatgccataatacattgccagctcctgcacattggcggtgcgctccatgcccattatattcggcggcagcgcttccagctggcttttggtcaggccaatcatcacaagctgctggcactgggtgagcattccggcaagcttcacaaaatcggatagccccttttggtcattccatacagaggcaacccccagaagaacctccttgcccagtagccccgccacctttttgcagctccaatagccctcttgaacatcctctgccggaaagggcagccgggatatttccgccgcagaagccaggtctgctttgtcatagaccggcgtatccgccccgaaaagggactggaaagacttcccctccccggtcagatccaccacggcatccgcttgacggcacagcgtttccagctcccgcccggagaagtcctcgccgtaaaccacatggagtgacccatccccggtcagggggctgttttttgccgcctcttttccgaagcacagcaccaggcgcttcccctcagcgcccaaaaaatggcgggtatcatccccttgggggcggaactgcgccgtgttgatgccgttgtgaatcaccgtcaccgggtactgtcccaaaaaggactgcctcagttggtcagccagccattgggacggagcaatcagctgcactcccggaataccggtaaacagcgcctttttccgctgccagttccgggcggagccgtccacacaggcggcagggaactggtgctgcatggggcagtgatggcacccctgctgccagcgggtgcatccggcgctgtcgcaatacaccgagtgaccggtgaacgcccagcagtcatggtgggtccagtagatgggcttgccgcagcttctcaaataccggaacagcacccccaggtggatatagtacccgcacaaattgtgcaggtgaatgatgtccgggtcaaattcctccacccagcggatgaacgcctgggtctggagacggctgccgaagcccgcttcatccaggagccttgcccgcagcacatgaccatatacgcccactgcatttccgatgcggtgggcgtatttctggaactgctccggcacatcgtcccgcccgtatgcaattttaacctcatgcccctgggcttccaaagcttgcgccaaatccgtgcagatgcgcccggtgctgccagtgccacaggatacatttatcatcaaaatcttcatattatcctctttttgggcaaagctcctccaactgccgctccagctgagcggtgaatatatccagcgaaaaatgcttttcaaagtattccctgccccgcttgcccatctgcgccgcctggctgggctgctccatgaattgggtcatgatggctgccagctcctccggcttgcccggctgggcgcacagaccgcagccggactgggcaatcacctgagcggcaccgccgccaatggcagcaatcaccggctttccggcgctcatgtagccttgcagcttgccggggatggtcagtccggcggcggtgtctgcatacagcgtcagcaggcaagcgtccgccaagcggtaaaagtccggcattttgtccaggggatgacgaccgtggaaccggaaatggtctgctacccccagctgcgccacggtctttttcaggttttccaaatccgggccgatgcccacaatgtgtactaggaaaggctgggcggtgtgaatcaggctgacggctcttgccacgttctccaaatcctgggcaacgcccacgttgcccataaacacaaagtccgtcaccccgttgtctgctgcttccaggctgccccaccggagcatatcttcgccgtgctggggaagataggtgatgttttccctgggaaccaggcatatttcatggagataatcctggaatgccggggaggtgacgccgattttggctgcgccgttatagagcttctggcaccagtgggtgagcagccggtaaggcagggaatcggtattcggaatgttatcccgcatggactccggccacaaatccaggcagtacagatacaccggcaccccgtgctttttgtgataacgcagggcggggactgccatggtcaccggggaaagctgatacacaagaacagcgtcaaaatccccggggagctgacccacccggaaccaggcgcgggtcatatagctcaggtagttccatgccagacggactgcgccctgcttccggggggcaatctggcagcggagaatctccacgccctcatgctcctcccgcttcagatgctcatagccggggtagacttccccctccgggtaattggggcggccggtcagcaccgttattttgtgtccccggcgcaccagctcggcgcaaacctcgttgatgcggaattgctccgggtaataatattgactgatgacaagtagtttcatggctgttcctgttggggcatctgaatgacatccagatagcggcgcttcagatgcgccccgtattctacctttacctccggcagcgtctctcccagcagctgcttcacccgcagatagggcaggttcagcccgcctgccagatacagcacaatggtggcggtgattctggggtttaaatccgtgagcacggggcggtcgttttcgtccagcataaagtcaaagccgatgttgccatccagcttgagaagctgaatgatttggcggcacagggcgaaggcttcctccttcggctccatgcgggatgccatggcaatgctcatgctgctttcgtagttccgtctgccggcgatgtacagcgtctccccccggtcagccagcaggtcaacggtgtattcgcagccgggcaaatattccatgaccagcaaatccggcattggttggcattcatccagcgtgcggcacatttcctccatggagatgttcagggagctgggcttgctgtggagaaaggcatctgctctggacaggtctgcccgcaccacccgcacgccgcggcttccgctgctctctgctgccttgaccaccaccgggcggtcgggatagcccagcaggggggcatatttcttcaaatcctggctgctggaaatggggtagaaggcgggggtgggcagtccaccggcagccatggcttcataaagcttgcgtttgttgttggcaaccaggagggtctggctgtcggtgatggcaacccgaacgcccagctggcggaattccgcaatccgtgccaggatgatgggcagctctgtggaaatatggggaaaaaatacatccacccgttcccgccggcagatgtccagcagctgctccacatagccgggagcggtacacgcgcccacttgatagtagccgtccagcagctgccccatcatggggtcggctgccatgtccacgccgatgattttgatgcggcgctcgccgttttccttcaggcagcggaaaaatccaggcataaacatggcggcacaggcggttgtcagtacagtgatgtccttcatttctgcccctcctccgggaaaacgaattttgagaacacgtcctcaaaggtttcttcccgcatgatttcccgtaccgttccgtccggctccaccgccaccatggcgcagttgggtcggatgaactggggcttcgacacaatggagtagccgccaacattttggaaagccagcacatccccgggacacagagggccgctgtagccctccagcatcaaatcctgctccaagcaggtatagcccatcaaatccactgacgcatatacttgccccgccccggcggtgacatggcataggggcagctttttcatggtgcaaatctcaccgaggttttcgtagctgccatccagagtggcaatggtgcggctgtgcaccgtcttgatgtccagcacccgggtgacgaagctgagatagcgtgccaccaccgtggtgcccggctcggtaaacacaatgggctgcgcctggggatagcgctggatgaagggcttcatggcagcctgggcgtattcttcataggtgggaacctgaccgaactgcgcccgcagaacttcgtccatgtcagcgaacattccgctgcccaggctgatgtattccggcgttccgtccacataccggtcggcggcatccaccatgatttgcgcccgcttttcccaggcggggagccagcggttgcggctgatgtgacagtgcagccccacgattttaacattttcgtggcggtgcagcagattgatggcttcggttagctccgggctgcccacgctcatgccgaagcgggagacaaagcccagatccatgttgatgcgcaggccaatcttgatggtgcattccgggcaggcagcagccagcttggccacccgtgccgcctcggcggggttatccacattggagatgccgccgctgcgcagatgctcctccatacagctgcccttggcaggaccgttgtaaacaatccgactgttctcatagcccagctttttggcaagccggtattccatgtccgaaaccacctcggcatagccgcccagggattttaccaggttgcagatatagggggtgtagttggttttataggaatatgccacccggtaattggggtacacctgctgcatggctgcttgcagcgcttgatagttctcaataaagccctgggtatcaaacacataaaagggggtgctgcgctcccccagcagactgcgatataccgatttttccacggctgctcactccttcttgtccatatccttgcgataaacattcaaatgggggcgatccatctgggcaccgtagccggtggtgactctgccccacaaaatccgaaaggtggtgtatatcaccttgatatccagcagaaaggacagatgctcggcatagtagcattcataggcaaactgttcttcataggtggtgtaggttttgccggaaaggctgtccggcggaatcagtccgccccgtaccgtgtggcgcttgcgctcctccggcagaaaataaggcccataataggtgggcagcgggcggggacccacaaaggacatctttccggtgaagatgcaccacagctccggcagctcgtccagggaggaggaacgcagcagcttgccgaatttcgtcatccgctgctcctcgggcagatattgcccctgggcatccttttcgttggtcatggagcggaatttatacagccgaaagggcttttcatcctttccgatgcgctcctgagagaacagcaccggggcacccatctggatgcgaaccatcagcccaatcagcaaatacacaggagagaatatcacaatccccatggcggacagcacaatgtccagcagacgcttgacgaacaaccgatacatcatcgcacctcaaacacaatctggaaggcttctgccagattcacccctgccatggcaccccggtaagctgccagcccccggtaggcctcgggagaacgggggtggggataggggcgcatgactcccttgtattctgccagcgcccggagcttggcatccagcccgtcttccccaatctcaatgaagcagttggggataaagcggttggcggcgctgtccagcgaccactctgtggcggagggagtttccatgtacatgaacagccgcagccgatagctgcactgcttgcgctggaacagccggcaggccgcctgggctgccccgctggtcatcacatggtcattgttggtgtcggtggggtgatgggtgacaatggcctctgcctgaaaatcgtcaatgcagtgctcaatgaactgcaccagctccagatgggggacggtgttcattttgatgttgggaaagtctgcatggtacaccttttccacacccagaatcgccagcgctttttcctcgtcggtggctagggtatcggacaggttccggcgggcggcagcctggctgaccataatggcaaccgccacatgatgcccctgggacaccagcttggcaatggtgccgccggcggcatcggactcgtcatccgggtgtgcaacaacaaacaggtaattcatcgtactatctcctctgttatccgtctatgatgggtgccggactgcatgggccgctttggggcagcaccggtttttttccgtccagcaggtcttggctcagggcaatcagccgccgggcggcgcagctgctgttccattcttctgtaatggtgcggtaggcttcctcgcccatttgctgccgctgccggggatgctccaacaggaagcgggtttgtgccgccagtcccgtcgggtcgcccacctcaaacagcagaccgtttttgccgctttcaatcaggaaaggggcagcccccaccccgcggcaggccaccacggcgcagccgctgttcatggcttcgttgaccacggctccccagccctcgttctggtcggaggtcaccaggaagatggcagcgcgttccatttttcggcgcacctgctccggggtacagacaccggtgagcttcacctgcgcctgtagcccttctttggcaaccaggcgctccatttcctgctgcaattcgccgttgcccaccagctccatggtaaaggcgcagccccactggcgcagctgcttggcaacgccgatggcatactccgggtgcttccagggaatcatccgtgccgcccacaaaatgccggtgggatttttctctgtcatcagctgaggcaggtcatacccaatggtctgggggaaatagccccagcgcagcgctttgccccggaactcgtgcagccgtgcatggtcggcggctgtataagcgctgctggcaagcaaatagtgatttttctgcggcggacggtaaaacagtccatatttgatggcgcgtccccagaatccaaagccggacagtccctctttgaaaatccgctcggaatagcaaaaggtcagcttgtgcgccagcagccggggcagaatcagcccataggggcagctgccccaaatcaccacatccgcctcccgaatcagcttccggcattttttccgctgggcagggtcgtacgcttgcagcacataggccggaatgtcggtggttccccaccccatatttttccgctcctgctccatttccatggtctcaatgaaaaagaaggagtgtcccgtcatctcatccagtgccttactgagatagcgctggtgatgattaaagtaattcgatgcaataacaatggtcgttccactcaccccttccgaaaattgcatatcttctattattataccagaaaagtttcatatttcaataacatgatttggcgcagtgccgcctttccggtgacgctgcgaaccctgtaccaatacatcggttccctaacccgcccagtgacggcgcacagaggaaaccatgggattttggcagcgcttccttgaatggcacacgcctacagtccgttcccacgcccatataaaaacggggcacatcgcattttccggcgacataccccgttttgtaatatttttccttgcagtttgtcgaattttgtgctaatctgtccgtggtgctaccggcaccccggtaggcggttcccccctcgacttttccccagggggtaatcctctttatttacccccaatcaacatagagagggggctgacagatatgtacgtttcatggaacgatttatttgcgttctgtacggtcattctgactgtcattcttgttgtttatcagatgacaaataaagagaagtaaccgccctgcctccaagcgtgcgattacttctcgtcatgcatttgggggagccgcctgctggtagcaccctttgtatttatactataccccatttgggggattttgtcaacgccctctgccatcagcgcaggggattttttcacccatcgggtaaaatgcatccctgtagtagagcgaatctcttaaaactacacaaaaaaatcgcccctccgcttgcgcgnnnnnnnnnnacacgacgctcttccgatcttgcgcggaggggcaactcatattcagcgaagtaacaattaccaagccatgcaaacagcgtaagcgccattgccgggcagagcaacatcagcaacttccttctggccggcttcgccctgagccagaatggtccactcggttgcgccctcagcacggaacaggacgacagcggagttgcgcttgccaacggtccacagcttgaaggttgcggtctcgccagcggtgacattggaaatgtttctctgcttgaagacggtcaggttgttcaggccctcggtagcctcacagatagcattcatttccttcacggtgatggcttccttgcaagcggtgtaggtggaacgaacgcccttgggcagcttcaccttggtgtagctggagacggtagctgcggtctgagcgagctcagccatgttgtagacctcaccagcaacaggccgaccttttgcatcaaacttaaactcatagcgcaaaccagcagttttgtagctgaaaacggagttggtgtagccaaggccagcagccccaacgttgttaccgcccaagttattgttgacaaaattattccagacggagcattcgtcatgagcgtgaccaacgctggcagcacttgcggaaacggccagagaagcggtcagggcagcagccatagcaacggaagcaactttcttcatattcataacaatttcctcttttcagtgaaaaaatttatctagcagccagcggctggtaaatacgattaaagcatcattcgttatcatcaagcgcatagaaaaacaatctgttgaagcaaaatctcttaacagctcgttcacatattcgaagtatacatcgtttgcgatttcttgtcaagtattatttttgtaaaaatctttttctatttctgcaaatttcgtcacaatgacgtatttctattttttctccgtattcaggtaaatggaagcgatgctgcaattgatttccggcaggacggaatcctttttgtaaacgtaaatgaactccaggattttcccctcaggcagcgcggtagcagccacccggcagaacacgccctcattttccggttcatcgtaaattgcgaagtccacatcgttgaccttctgaatctccgcagaaggagaaacgctttcctgcacccgctttgtgtaatcctccagggagatattttcatccagaagcttcacagaaagcatacagtccagcccaatactcgccatcagatacccctgcgattgcccttcttccgttatctccacatcaagcatggtatcgcgataccacatggtgaaatccgtgccggggatgtccgcctgatagccgtcataccgatacaaatccgtcagccggtcggcttcttccagggtatattctttcatttccgccgccattgcccccggaatcaggctggcactcagcgccagagtagcagctgctgcaatccacttgttcttcataggcaactttcgcgtaccaaaaaaggcgcgccgctcctttcgcccgctcggtaaattctatactgtttgcaggtgtatttcatccgtctaggatgattgtaccacgagttattcttttgtgtaatcatttttataaaaatcgttattgtacacaaattcaagttccactttttgtaaatagtgctgtacagtgcttccgtcatattgaatagtatgttgaattttgtcgagcggaatttagttatatcgcacaattccgtggtcacacgtcaccctaccctttcacccagccgctgcaccgtcccataaaaaatcgcccctccgcgcaaagcggaggggcaacacaagagattccatttttaccagccaacggcaatggcatagtcgccgtctgcatagaagcggccttcaatcacgtccagctccccggcatagcaggaaatcagctcccactcgtccgtgcccgtggcgcggaagaacaggccggtggtacggttcacggtagaccagaccttaaaggtgacatcatacacctctctgccgccggtcacggagccggtgcgcagcagcgtgacccggccaggctggaaggtggctccggcagggatcacgccctccgccgcattttctaccgcgctgtccagctcctcctgggagacggcaaccgcatcctcgccaaaggtggtgccgggagtagacatgagaaccttgaccaaatcgcgggtgttttcagcgaagcaagccacgctgaagcaggacaccgccagcaaagccgccagcagcattgcaaaaaacttcttcattttgatacctccggcaaaaatttttcaggaaaaactgtcccgatacacatttcattataggctggcaaaagcgaaatgtcaaggcattttcaccttacgttttggcaagtctgaaacattacagcggatgcagaagccagaaatgttgttataacgtcatggagttgatgttattttctatagggacttatcgcttagctgtgaacgagcggctcagactccccctttaaggcagagcgaacctctgcaaaagttgggacagattcagcagctccgggtcttgtgatacacagagctgccgcaacggttgcggcatacagtgcatcctggtagggatatccagccgctatcatgccaatcaaatagccggtgaagcaatcccctgccccggtggtatccacaggcgttacagggaaagcccgctgggaaataatctgcccatcaatccagcagtacgcaccgtccttgcccatggtgacaataatattgcagttcggatatttttgatgaagttgctgcggcatcttttcattggattccgctccaagaatctgctgacattcgatctcattgaccagcaaccaggataccttctttatatcacatttcagaatgctgccattaaacggcgaaggattcagcacaatttccataccgatgccatatgcccgatcaatcagatacggcagctcgtttatctcattttgcagcaccaagtaatcgccgcggtcaaattcagataaaacgcgatcaatatccaacttttcctgcctctgattggccccaccaaagagaacgatactgttctccccttcctcgcttacctggatcactgcatgacctgttttgcaatctggaatcgttttcaccaatttcgtatggattcccagcttgctgcaagcatccaagaacggttcgccatccattccaatgcaacctgccagccaaacctctacgccgctcttgcacgccgccaccgcctggttgtagcctttgccgcccaggcgaatcttcatatccgtggaggcctgcgtttctccaggtgctgtgatgtgggaaacccggtaaatattgtcaaaattcagtgagccaaaaaccaggatttttttcatatagccttttctcctaataaaaatgaagcaattcccgagattgcgttcacaatacaccttgctgcaagcaaacgcaatcccgggtttctttgagttttggtcattcattcgtccagggttttccataccccatcaggaagccccctgaataaatgatcccacattctaatatttttgcaatttaagcaaattttgcggaatacaagaaaaaatgctcgcccacatggattttaggcttttcaacccttattccaaaaagaaaacccatttccattttggttgcagaaactcctctaccagaaattgcaagcaaattccctttgttactcatttttcctgctgccaggccttaataatacgattaaccgcatccagacgtgcctggtcggacgctgccagtgcacttgtcttttcatcataccatgcagcattttccttgaccttacgttgggcggaaaccaactgagcagccatggctttcggcccggttccgcctacgacttcgcgaacctttacaaaatggtctggatcgatggattgggcaatgggtgcaaagtcgaaggtaaatggttcgtggaagtattcctcataagtatcagcgaaatacttttcctccaccactcgcaaatcgtacccctctgctctcgcctttttcaccaaataggacacaaagccatgcgccttgcggaacgggatgccataagagcgatacatttcgtccgccatctccgtcaccacagagaagctctcgaacgctcgctgccgcagcaggggtttgttcacatcaatcgttgccataaccgagtcaaacaccttcaggcagcgtttgagcatactaaatgcggaaaacagtgagctatccatatcctcataatcgcagatatcgccgtagggggtgcggaaacaggctgtctggacagtatcacccagacccttggcaacaccaacgcaggcacgcaggtgctccatcacgattggattgcgcttctggggcataatagaactgatggaggataggccatccccaaagatgatcattttctcctcctccgttgcccatagtatcatatccgtgatggtcttgctcagatcgatcgcgcacagggttactgcactggccgtcagcgaatagtactcaatgttgccaatagagtcgtaggcattctcaataattccgtcgcagcccagcaactctgccactctctcccgggagatgggataggcagaggttgtggcaacagcagcgcccataggtgagacattggtcatgtcatacgcattcttgaagcgcctgatgcagcgatccagaacatccagaaagccaaggaaataatgccccatgataccgggctgcgcatgctgtgtgtgcgtatggatgacgtacagcgtatctttatgctcctcgcagaacagacgaaccgtgttctgaaattggatcaacgtctccatcacatccaagataccctcgcgcacattcagatgcgtccaggtaatgcacatatcattgcggctcctgccaaggtgcatatttccgccagccccgttgctcttttcgatgatctccttttcttgttggaaatacatatcctcaaattcatcacagtaggtttgagacttgtacccctcatagtctaactcttcaatagccttcaggattgcccctgcctcctggagcttcagaatcccctgttcatagagcataaccacatgagcctcattgacagaacgaatgtatggcatccaacggttaacgctgaccgcaaacttggggattgcgtccaactcgcacaggctcttgttcggaaaatgatttccgttaaccgcaatgctctcccgtcgattctcctgataagtcgtgttcagtttcatatctatattatttctcctctttcattcagtcggtggcacgcaacaaaatgcccgctctcggtttcccgcagctctggcaccggtttttccgcgcagtcctgcgttgcataagggcagcgcttgcagaaacggcagtggggtgccaggttgatcggagacgtgatttcaccgcggatgctctctttcttccgctcccgggtaatctccggcactgggatagcagagagcagcgctttggtgtaaggatgcataggattccggaacaagtcctccaccgccgccttctctaccagggagccgagatacattactgctatttcatccgcgaaatgattgacaacagacaggttgtgtgtgatgaaaatgtacgtcaagtccattttctcctgcaaatccttcaaaagattcaaaatctgagcctgaatggacacatccagcgcggaaacaggctcatcacaaacaataaacttgggattcattgctaacgcacgggcaattccgattctctgccgcctgccaccgtctaactcatgggggtaagtattatacagacgtctggccaatccgacagtttccatcagctccagtactcttgcttcaatccgttcttttttgtcctttccggtgatgagcttattcaggatgattggctctgcaataagttgactgaccgttctgcggggattcagggatgaaaacgggtcctggaagatcatctgcatattcttccgaagctcccgcatttccgcaggtgtcgccttggtgacatccttcccatcaaagatgaccgatccgctggttgcatccagcagccgaaggataacgcgaccggttgtcgacttgccgcagccggattcgcccacgattcccagagtttttcccttttccagcgtcagattcaatccatccacagcatgaaccgtccctttggatgttttgaaatatttttttagatctttgacttccaaaattacttcagacatactcagttacctcttttgatgtggaagtcaccttcctgataccggcagcaggcgactctatgagtgctggatgcctccataaaggcgggctgctctttcctgcatcgcgctgtagcatagggacagcgttccgcaaaggtacagccctccggcaaccgggaaggatccggcatcaagccagggattggcgtcagcttatgcacgcgggcgtggatattgggaagcgaattgaacaggccctcggtatatgggtgcatcgtatggttaaaaatatcctccaaggttccggattccacaatgcggccaccgtacatcaccgccacctcatcgcagatctccgccacaacgcccaagtcatgggtaatgagaatcatggatgtctcatactgctcccgcagatcccgcatcagccttagcacctgatcctggattgtcacatccaatgctgttgtcggttcatcggcgattaggactgtggggcggcaggccaatgcgatggcgattcccacgcgctggcgcatcccgccagagaactgatgggggtattctccagcacggttcgggtcgatgcctacagtcgccaaaacgttctttgcttgctcccacgcttcctttctggtaatatcccggtgaaacagcaaactttcctgaatctgctcgcccactgtcatgactgggtttagggatgtcattggatcctggaaaatcattgcaatctcgctgccgcggacagcactgagttggccgggagtcaagcagcgcatatcgatgccgttaactctaatctggccggatttaatcacaccaggaggattcggaattaggcccatcagtgccagcatggctgtggtctttcctgcgccggtctcgccaaccaaaccaagcgtatgttttttcttcaaggtaagatcgatgccgtttaccgccttcactgttgccttagatgtgtgatactccaccgccagattacggatttccacggcgtttatggttgtttctcgttcaattttatcaatttttgaggtcttttttcggaagaatgccattttacccacctccttaccgtttcaacttgggatccagtgcatcccgtaggccatcgcctaccagattgattgccattaccgtaatcatgattgccagacccgggaagaaacatagataaggtttgtcaatgataaaatccttggaggcattcagcaacgcaccccattccggtgtcggcaccggcacgcccagcccaatatagctcaaaccggcagcactgatgatggtggtgcccatgcgcagcgtcgcctgcaccaaaatgggagaaaaacagtttggcaggatctgtgtcatgatgatgtaaaagccagaacctccaattgccttggcagactctacgtactcattgttgcgaaccgtcatgaccgaggcgcgggtaatccgcgccaggattgggatggagctgatggacagcgccaacatcagattgaacatactggtacccaacaccgtaaccagaataaccgtcagcagaatggatggaatgatggtaatggaatccacaatacgcataaaaatgctgtcaaattttccgcccagatagcctgctgccgcaccgatgggtaggcccagcagcagagccgtaaacacagaggcgaaaccaacaagcaaagaataccgtgtcccgtaacccacgcgagcaaacatatctcttccgaactggtccgtgccgaaccagtgcttcgcactggggccctgcaggcgctccactacactaaagccgataacatcggtcttataatcccaaatctgatctgcaaagatcgaaataaaaatcagaaggatggtgaccatcaggccaatcattgcgcccttatttctgcggaactgacaccaaacctccagaaaatgattttcccttacattttccgtctgttgttcctttttcattccgaccacctcagttcttgacgtattgcgctttcacgcggggatccatatatgcataaataatatccaccaccagcaggaccaaggacacagccactgccagcaggattacaaagcccgtgacaacctcatagtcgctttggagaattgccgttaccagataattgcccacaccaggccatgcaaacacacgctccgtcaccagcgcaccgccaatcagcgccgcgcactgattgccaatctgtgttacgattggaatctgagcattgcgcaatgcgtgcttccagatgaccactcgctccggcgctcctttggatctggccgtccgcagataatcctgacggagtgtatccagcatggcactgcgggtcgttctggtaagcgccgccatattgcctgtcccacaggtgatggcaggaagaatgacgctctcccagccggaagcgccggaggcaggcaaccacttcagttgtacggaaaacagaatgatcagcagcagcccgatccagaagtttggcatggccaaaccgataaaagaaaatgtggaggcagacgtatcccaccaggtattttgctttaccgccgcaataatccctaatggaatcgacatgacaatggttagaataacagaggccaccgccaggatgattgtataacgaaacttggaaaaaaacagattccacacatcctcgccattgtatacgctttgcccgagatccttgtgcaaaacgcctgccatgtagcgcacatatcgcagcggcataggatcgttcaagccatgtgtttcccggtacagctccaattgctctggggttgcctcatcacccaacgccgtaagcgcggggtcgccgggtacaagatccataacgccgtaaacaacaaaggaaacaaacaaaaccactgggataatcattagtattcgcttgagtatgtatttgatcatcgagatccccccgctaaaatcatacaaaaaaggactgcccaccgcccaatcacgggacaacgggca

SEQ ID NO: 376 - DNA, 10572 bp, unidentified
  source 1..10572: mol_type = unassigned DNA
atgctgccggaatccgacagcatgcgcacacaacccgaacaaaagaaggataccactttttccggtggtattcggtatttcatgaaggagaggtcaaacatcgtgagtaagaagtatgtttatctgttttcagagggcaatggctcgatgcgggaactgctcggcggcaagggcgccaatctggcggaaatgaccagcctgggcatgcccgttccccacggcttcaccgtgaccaccgaagcctgcacccggtattatgaagacggcaagaccatcgcccccgagatcgaagcggagatcttcgaatttgtttccaagctggaagcactcgcgggcaagaaactcggcgataaggaaaatccgcttctggtttcggtccgttccggcgccagagcctcgatgcccggcatgatggacactatcctcaacctgggcctcaacgatgaagtggtggaaggcattgccaagctcacccagaacccccggtttgcctatgatacataccgcagatttattcagatgtttgccgatgtcgtggcagaagttcccaaggaatacttcgagcgtgccatcgacctgatgaagcagaagaagggcgtcaagcaggataccgagctggacgctgatgatatgaagcagctggtagagcagttcaaggcgctctacaagggtcacatcggccgtgacttccccaccgatcccaaggtacagctcatggagagcgtcaaggcggtattccgctcctgggataacccccgtgccatctactaccgccgtcagaacggcattccctcgtcctggggtactgctgttaccgtgcagatgatggtattcggcaatatgggcaatgactgcggtaccggtgttgcctttacccgtaaccccgccaccggcgagaagaagttcttcggtgagttcctggtcaacgcccagggcgaagatgttgtagccggtatccgtactccccagagcatcgatgagctcaagcagctcatgcctgaggtttacgatcagttcctggagattgccacccgtctggagcggcactacaaggatatgcaggatatggagttcaccattgagcgcggcaagctgttcatgctccagacccgcaatggtaagcgtactgcccaggccgctatgaagatcgcctgcgatctggtagacgaaggccttattactgaggaacaggctgtcctgctggttgacccctctcagctggatgccttcctccacgatcagttcaatcccgccgagctcaagcgtgccaagatcctggctactgctctgccggcttctcccggtgctgcctgcggtcaggtagtctttgacgccgaaactgccaaggaatgggtagcggaaggcaagaaggtaatcctggtgcgcctggaaacctctcctgaggacattgaaggcatgcacatctccgaaggtatcctcaccgtccgcggcggtatgaccagccatgcggcggttgtagcccgcggcatgggtatctgctgcatctcctcctgcggtgacatcaccatccgcgaaggcgagcactgcttcgaggtggacggcctcatcgtcaacgagggcgattacatctccctggatggctccaccggtcgtgtttacctgggcaagatctccactgtgggcgctggtctcagcggtgattacagccgtctgatgggctgggctgacaagttccgcaagctgcaggtccgtgccaatgctgaaacccctgccgatgccgctcaggcttacaagttcggtgcggagggcatcggtctggtgcgtaccgagcacatgttcttcgatgagcagaagatcaaggctgtccgggaaatgatcctcgccaagacccagacccagcgccagaaggctgtggataagatgcatgtgatgcagcgtgaggacttcatcaaggtattcgaggccatgcagggccagcctgtgaccatccgtctcatcgacccgccgctgcatgagttcctgcccaaggagggcgagaacctggaagctctggctgcagagctggagaccactcccgctgctctggaaaaggccattgtagagctgcatgaggtcaacccgatgatgggtcaccgtggctgccgtctggctgtttcctatccggagatcgccaagatgcagaccgaggccattatcgaggctgccatcactgtaaccgaggctcataaggactggcggtttgtacctgagatcatggttccgctcatcaccgacctcaaggagctcaagtacatcaagagcatcatcgtggctgctgccgaggctgttctcaaggctcacgacagcgacctgaagtacatgatcggcaccatggtggaaactccccgtgctgctctgctggctgatgagatcgccaccgaggctgacttctactccttcggtaccaacgacctgacccagatgaccttcggcctgagccgtgacgatgctgcttcctacctgggcagctactatgacaagaagatctttgacttcgatccctttgctaccctggatctccggggtgtaggccagctcattgagcgtgccaccgaactgggccgctcggtgaagccgaacctcaagctgggcatctgcggtgagcatggcggcgatcccgcttcggtagagttctgccacaaggttggactcaactatgtatcctgctcgccctaccgtgtgccgattgcccgtctggctgcggcacaggctgccatcaagttcccccgggactaaggcatctccccgataaggcataataaaaatccccgtgcagtacgcacggggattttttgcgttccgggaagacccggtcaggacggaatcctggacgcctggcggaagaggatcagccccaccaggaagagcagggcgatcatgcccacgcccaggctgatattgccggtgatctgggagaccacgctcaccaccgtggtgcccatgaaggaggcacccttgccgcagatgtccagcaggccgaagtactcacccgactggctggagggaataatgcgggcaaagtaggaccgggacagcgcctggatgccgccctggaacatgcccaccagtaccgccagcatccagaactgcgcctgagtgcgcaggaacatggcaaagacggcaatgccgaagtaggccaggatacacagagggatcagctgatcgcccgaaaacttccgggccagccgtccgaacaggatggcgaaggggaacgccaccacctgggtgagcagcagcgccagcagcaggccggtgctgtccagtcccagggcttcgccgtaggcggtagccatgtcgatgatggtgtagacgccgtcgatgtagaagaagaaggccagcaggaagaggaagattttcttctcctgccgcacgctggcaagagtccggcccagccgtgcaaagctctcccggatggcatggggctgacgctcgacgaagtgcttctgctcataccggcggagcagcggcagggtgaagcccagccaccacagggcggtgatgccgaaggagagccccatggcagtgaccatggaaagccccagcgcactggagcccagcaccagagccaggcatccggcaaagggaatgcagctgccgatatacccccaggcatagccctgggaggatacatgatccatgcggtcggcatcggtgatgtccgagagcatggaatcgtagaagatcaggctgccggaatagcccacccgggccaccacgaagatcagaaggaaccagagccagtgggcggcaaagcccagggcgatgcagccaatcagtcccacgcccagaaacagcaggaagatgggctttttgtagccctgggtatcggcgagggtaccgaacaccggccccagcaccgccaccagcagggtggcagccgatgccgcatagccccagtaggccaggtactgcacattggaaagcccggcctcctctgccagaaagttgaagtagatgggaatgatggtggcaatgagcagcgtgaatgcggaattgcccacatcatagagaacccagctgcgctccgccggggtgagtttcagtttgttcatgcgtttgctgcctcctgttccggcttgggatcaaaggtgcgcccatagatggggtcctctgcctgaccgctctccaccacccggtcaaagtccccgatgagccgggctgccagctccgctgcctgatcgaaccgccggagcagttccgcattgctgtcctcacaccggggttccggatcagggccgaccaccagcccgcccagcttctcaaactgacctgccaggcgcagggcggtgaagatcacccagcgtttcagagccgaaggcgccaccagcagattcagataaaagaccatgccccggagggaatccaacacctgttcctgtgtgacttccgggaagaaatcggcgatcacggcggcattctcctccgacggcaccagatgtccggtggggcggtggcttgccgggtccagtccgtcccggagcatgagcgcccgctccagctccgattcgatccgggcatggctcaggccgcttgccgcctccttttccgccacatagtcatggctgagggtatccagcgcgaaatggcagaggaacccgtatacataggcccggtgtgccaggctgtccggatgcatctgcagcacccgggcggcccgctcaaaaaaatcccggcccggacggtcatggaattcatggcccaaccggctcaccggatttttcgagagaggcttatagtaaaagaacagatccgggccgtgcagaccgatggaatagagctggggatagcgtgtaatggcctccagcggctccggcgtaagcagccgggcggtttcccgtcccagacaaaagtgtgcgtatgtagatggcaaagtgaaatttctcctttccgacggcagatgccgcccgggaacaattccctggggtcatggtgccgtggggcagcacaccaatcgcctcccaccggaaacactttggcagctgtctgtgcgccatgacagctctccggctgtgatgccgggaaagcctcagcggaattgtatcatcgtccggccataaaatggatcatagccagtccttggttattatatcatttttgggcctgctccgtcacccgcacagcgtaaattgtgtgtaaacagaaacaaaaaagcccgccttaaaaaggcgggctttcatgctgtcagcacaaggggttcggggagaggtatcccgaactgtttctgccgggatttttacttcttgcccgaacgctttgccacaaagttggcgagcatgggggtcaggaaggaagtgataataaccgaagcggctacctgcgcagtggcaatgggagccacagctgcataggaggggtccacagcagccagagcgccggggttggatacaccgctggcggcggtgctggagattgccgcgccagctacgccgttgcctccggtgatcttatccatgaggatggtcacaccgcctactacaaagacggtgatcagacccagcaggataccggacagaccgccctggaacagctgctggatggacattccgcagcccagtgcaaagccgaccacgatgatggacggagtaacaccggcagagagagtctgcttgaaccacggggaaacattacccaggataatgccgaggatcaggggcagaatggagccgatgatcgaccagatggagatgctggcaagaccggcagagctcagggcgatcatggtgacggtggggccgacactcagcgaagtgatggcaacagcgcccttgacggcatcgtcgtcatactgggatacaatgcccgaatagagggcgttgttggcaaccgataccgcgctgatgattgccagcgaggaaagacccaggaagttatcgccgaagaggaaggccacacccaggcccaggattaccgacatggcaaccttggtgccgatgatgacagcaccgatcttgatggccttgggggtacttttaatatcgatggtagcgcccatgaagagcaggaatacaccaaccagtgcgctggtgccggtaaccataccggtgaagaagccgccgatctgcagcacctgcggtacgaaggaattgagcaccacgccgatgagcatcggaacaacgatggtatcaccggggaaacgcttcattttcagtttgctcataaccgtaaaactctcccttatgtgttagtccagaacgataccgccgtcgcagtcgccgatctcgccgtttacaaagcttgcagcatcggaagcgaagaacagaatcatctgagcaggctcgctcgggtcagcagcacggcccagggggatcatgccgattaccttggcgctcttttcagcgtcgtcagacagagccttggtcatgggagttacagtgaaggacgggcatacagcgttgcaggagatgccgtacttgccgccttccttggcgatggccttggtcagaccgttgacaccggccttggaagtggcataggcagctgtacccagcagaccgccgccgatcttaccggcaaccgacgatacattgacaatccggccgcccttcttctcgatgaagtagggatagatagcggagcaggtggtgaaggtaccggtgaggttgatgcgcagggtgcggtcccactcagcatcggttacttcctggaagggaacagtggatacaacgccgccgcagttgatgaggacatccacacgctcaaagtcgcccagaacctttgccataacggcacggatgttgtccttgtcgcccaggtcgatcttgtaaaccgagcagttgcccagctcttcagctgtggccttggccttttcctcattgaggtcgaggattacagcatgaccgccgccgtttacaacgccgcggacaacttccttaccgatgccctgagcaccgcctgtaaccagaactgtttttcctgtgaagtcaaacatgataaatgcctcctgtattcgttcccttccattcttcggaagggatcactttctttattttgttggggtaccgccctgccggcaaagagcgggttttcgattgacaaacaattaactatcaatcttctgcttaagattatagcattgcaggcatcgaaaaaatatggtatcatagcctaaaaagtgaagctgattttaggctgacagcacaaggaggaatcgctatggatgaacagctcaaatgggaactgatccaggccgcgctggatggagaggagctggaccggatcaccgaccgggccgcccattacctgggaagccccctggtggtcatctccaccaccagcaatatcatcgcccattccgcctccctcaccccgccggatgaaacctggctgcacgctgtggagcggggatatatcaccctggaatttgtggcgaccctggcgggctgggacaagcataaagatcacggcacccggtatgagtgcatcaccgttgccatcaacgaccggcgccggcggttctacaagctcaccatccattcccagctgctgggctatctcaatgtcaccgagctggacgggcatttcgatgcggtcagcgaggaggagtaccattttgtggcccagctcatcgccaaggaggtctatgcccggctcaaggggcaggacttctcccgcaaggcccgggacgaggacttcctgctggaactgctccacggcagctttgtgaaccggggccatttcatcgaccggatgcgtctgagcggcttcgatccctcggcccagtaccgggtgctctgcatcgagctgggagacttcctctcctataacgccgatgaagataccttcaagcgggatctgctggaactgctcccgggcagcaccatgatggtcagcgaccaggtactggtgatcctggcctccgaccggctcttcctgccggaacgggccccggcaatgctccggaatctggacagctacctccgctcccagaagctcctctgcggcatcagcgatgccatcggcgacctctactacttctccacttaccgggatcaggcgctcagtgctgcccgctaccgcaagtatctcatcgaccagtccctggcctatacgttctatgatgaggtcaaggtctatgatattctccagcagatcccccacagtgagctgatccactactgttcccggcaggtctatgagatctatcaatatgacgctgcccagcataccgactatatcaccaccctactggcctatctcaaagccaaccgcagcgtgaagtccaccgctgcctatctgcacgttcaccgcaatacggtcaactaccgcattgcccgcatccgggagctgtttggactggatctggacagcttttccactgtccatcaaatcctgctctcctgccagatgatccggctgctccaggattaacccccatgaaacaaaaaatggtgttgtttcccgccattttggggtttgacggcggctcggatttgtgtataatgagtatacaggcagcctgtaatttttttgagattgttactttgtgtatcacacagatgctgccccaggagggttattatgaatattttgattgttggctgcggcgataccggttcccagcttgccaatgtactggatcacatgggcaatcaggtatctgttgtggatcgcaaccccgaaactgctgcggaactttctgactcctttaccggtatgtttacggtgggagttcccattgaccaggatgtgctgcgtcatgccggtatcgaaggctgtgatgttgtaattgcggtcacccgggacgacaataccaacctgatggtcgctcagctggcccgggatatcttcggcgtgcccaaggtaatctcccgggtatccgatccccggcgggaagaggtattcagcagcttcggcctgagtaccatctgtcctaccaacctcacggttgcttcggtggtagccgcactggatgaccgccgcaaacataccgaagaagtttatttcggcagcacccggatctcctttgaacagatggagatcgaccgccggtatctgggtgaatttgccgaagccattgaactgcccaagggtactgccctgatcggtgttctgtcccagagcggcaagctgcggctgcgcggcgaaggcatgcagactgtcatcggtgaaggcgatgtcctggtactggcccgttccatcggctgatgaggaggatcaatcgagatgaatgttattgtagtgggcggcggtaaagtaggctattatctggcagaaaccctgctggaacatggtcacaagccctttgtaattgaaaccgataaggagatctgccggaagatcgccaacaatctggatattccggttatcaacggcgacggcaccaccctgggagccctggaaagcgccggcgtggaacattgcgatgcctttgtcagcgttaccggacaggatcaggtcaatctgatcgcctgtcagctggcaaaaaaacgctatggtgtggaacgcaccgtagcccgggtcaacaaccccaagaacctcaaggtaatgaagcgtctgggcgttgatattcccgtatccagcaccgacaacattgcccggctcatcgaacgggagatcgatgtggcaaccatcaagcgtctgctctcgatcaaccggggcgaagccaccatcagtgaggtggagatccccaagaattattcccgcaacggcaccagcctgatggacttcaaccttcccaatgaatgtgttatcgtatccatcacccgtggggacagcctcatcattccccgaggcaatacccagatcttttcgggcgataagctgattgtcatctgccgcaacgagtacctgcatcagctgctccatgccctgcgcattgaataggaggttccctctgtgaagaataaaaccgttctggtcaccggcgctgccaccggcatcggacgcagcaccgcggaactctttgccgccatgggctatcaggtggcaatcggctgcaaccactcctttgccgagggactgcagtttgcccgggccctgtccgaaatgggcatgagcaccatggcagtcaaggcagacctcagccagcccgatcaggtggacgccatgttccggcagatcgagtcggtatggggcggtgtggatatcctcatcaacaacgccggtattgcccagcagaagctctttaccgacatcaccaacgaggactggaacgccatggtgggcgtgaacctctcgggcgccttttactgctgccgggcagccctgccctatatgatccgccagaaggcgggcagcattgtgaatgtgtcctccatgtggggcatctgcggcgcctcctgtgaggtgcactattccgctgtcaaagccggtgtcatcggcctgaccaaagcgcttgccaaggaagtgggccccagcggcatccgggtcaactgcattgcgcccggcgccattgccacccgcatgaacgacaacctggacgaggaagcagtggccctgctccgggaggaaacccctctgggacggatgggcacaccggaagagatcgccaaggccatcgccttcctggcactggaggacagtgccttcaccaccggacaggtgctcagccccaacggcggactggtgatctga

SEQ ID NO: 377 - DNA, 7584 bp, unidentified
  source 1..7584: mol_type = unassigned DNA
atggattcgaaacaaattgatgtgatggtggctgatgcctcacatgaggtttatgtggacaagattttggataccatccgagaagcagccaaagtacgtggaaccggtatagcagagcgtacccatgaatatgtagctactaaaatgaaagaagggaaagccattatagctttatgcggagaagagtttgccggcttcacctatatagaaagctggggaaacaagcagtatgtagcaacatcaggactcattgtgcaccctgaatatcgtggcttgggactggccaaacgcattaagacggcatctttccgcctggcacgcctgcgatggcctaaagccaagattttcagtctgaccagtggagcagccgtcatgaaaatgaataccgaattaggctatgtacctgttacgttcaatgaactgacagacgacgagtctttctggaaaggttgtgaaggctgcatcaaccacgatatattagtagccaaaaaccggaagttctgcatttgtacagcaatgctctacgacccgaaattacacgaagaagataaaatataaataaatatggaagcaaaaaagaaaaaagtagtagtcgcattcagtggtggtctggacacctcattcacagttatgtacctggcaaaagagaaaggatacgaagtgtatgcggcttgtgccaataccggcggtttcagccctgaacagttgaaaacgaacgaagaaaacgcctacaagctgggcgccgtaaaatatatcactttagacgtaacacaggagtattacgaaaagagtttgaaatacatggtattcggcaatgtattgcgtaacggcacttatcctatatccgtaagttccgaacgtatcttccaggcactggccattgcacgctatgccaacgaaatcggagccgatgccattgcacatggttcaaccggtgcaggcaacgaccagatacgtttcgacatgactttcctcgtcatggctccgggcgtggaaatcatcaccctgacacgcgacatggcattgagccgtcaggaagagatagactacctgaacaaacatggtttcgcagccgacttcgccaaactgaaatattcctataatgtaggtttgtggggcacctccatttgcggcggcgagattctggattccgcacagggacttccggaaagcgcctacctgaaacattgcaccaaagagggcagcgaacagttgcgcctcacctttgagaaaggtgaacttaaggccgtcaacgacgaaacattcgacgatcccatcaaggctattcagaaagtagaggaaatcggtgcggcctacggcatcggacgcgatatgcacgtaggcgacacgattatcggcattaaaggtcgtgtgggttttgaagccgccgctcccatgctgattatcggtgcgcacaagttccttgagaaatacacattgagcaaatggcagcaatactggaaagaccaggtagccaactggtacggcatgttcctgcacgaaagccagtatctggaaccggtaatgcgcgacatcgaggccatgctggaatcttcacaacgcaacgtaaacggtacggcaattctcgaactccacccgctttgtttctctacggtaggcgtggaaagcgaagacgaccttgtgaagaacaaattcggcgaatacggcgaaatgcagaagggatggactgcggaagatgccaagggcttcatcaaggtgacctctaccgcactgcgtgcctattattcaaaccataaagacgaaaaaatctaaatgatgaacgggaaacaaaaattgacacgcccgcgaaacggaagaatgttgtccggcgtatgcgcaggactggcagactttttcgggcttgacgtatcattagtgcgcatcatttatgttttcgcaacagtctttactgcatttgcaggcatactcatatacatcatattattaattataataccagaagaacccaatagatattatcaacatgattaaagtaggaatcatcggcggagccggatacacagcaggcgaattgatacgcctgttattaaatcacccggaagcggaaatcgtattcatcaacagctcaagcaacgccggcaacaaaattaccgacgtacacgaaggactgtacggcgaaacagatttagtattcaccgacgaactgccgttggacgagattgatgtgctctttttctgtacggcacatggcgataccaagaaattcatggaaagccacaacgtaccggaagatttaaagataatcgacctctccatggactaccgcatcaaaagcgacgaccatgactttatttacgggctccccgaactcaaccgccgggccacctgtacggcaaaacatgttgccaaccccggatgcttcgccacctgtatccagctgggactgcttccacttgccaagcatctgatgctgaacggcgacattatggtgaatgccatcaccggcagcaccggcgcaggcgtcaagccgggagcaacgagccacttcagctggcgcaacaacaacatgagtgtgtacaaagccttcgagcaccagcatgtgcccgaaatcaagcagtcgctcaaacagctccaaaacagttttgattcggacattgatttcataccttatcgcggcgattttcctcgtggcatttttaccactatcgtgataaaaaccaaagttgcgttggaagagattgtccgcatgtacgaagaatactatgccaaagactcctttacgcatatcgtcgacaagaacatcgatttgaagcaggttgtcaacaccaacaagtgccttatccatttggaaaagcatggcgacaaacttcttgtcatctcctgcatagacaacttgctgaaaggagccagcggacaagcggtacataatatgaacctgatgttcaacttagaagaaaccgtaggcttacgattaaagccgagtgctttttaatgataactcaggctatctgtcatattctgctttattacgaagaatttcagcaaatagaagatgctattgccagagaaaaggaactgaaaggatggagtagaagtaagaaagatactttaattaaagaaaagaattctacattagaagatttatgtaagtatctgcaatggaatggataagagagtaaatgctttgcttgaaataccaaatggtcttagttatattatcagtaacaacttgattgatacaatctttaaacaaagaagaaaatgaatttattcgacgtataccccctttttgacattaacatcgtcaaaggaaaaggctgccacgtatgggacgataaaggtacggaatacctcgacctctacggcggacatgccgtaatctctatcggacatgcacatccgcattacgtagagatgatcagcaagcaagtggccacacttggattctattccaactcagtcatcaacaagctgcaacaacaagtggcagaacggttgggaaaggtctgcggctacgacgattactccctgttccttatcaacagcggagccgaagccaacgagaatgcactgaagctcgcctcgttctacaacggacggacacgcgtggtatctttctcaaaggcttttcatgggcgtacctcattggccgtagaggttaccaacaatcccaaaatcatcgctcccatcaacgactgcggacacgtcacctatcttccgctgaacgatatagagtccatgaaatccgaactggcaaaaggcgatgtgtgtgcagtgatcatcgaaggcattcagggagtgggcggcatacagttgccaaccgacgaatttatgcaagccctgcgtgaaacctgtacaaagcacaataccatactgattctggacgaaattcagagtggctacggacgtagcggcaaattctttgcccatcagcacaacggcatccaagccgacataatcaccgtagccaaaggcataggcaacggcttcccgatggcaggcgtacttatcagtccgatgttcacccctgtctatggacagcttggaacaactttcggtggaaatcatctggcttgcagcgcagcacttgccgtactggatgttatcgagcaggaaggacttgtggccaatgcagccaaagtaggcgcgtacttactggaagaactgaagaaattcccgcaaatcaaagaagtacgcggacgcggcttgatgatcggtctcgaatttgaagaacccatcaaagaactgcgtttgaagttactgaaagagcagcatgtgtttaccggcgtcagtggaacaaacgtactccgcctcttgccgcccttgtgcctcagcatggacgaagcagacctcttcctggaacgttttaagaaagtactttgatatttgaagaataatcagccgacaaaagagacgaccgaaagaagaataccttcctgtttcggtcgttttttatagaaaatctttacctttgcctaaagacaacattttaaattacaaaacgatatgaaaacagcaattatcggtgcaggaaatatgggcgggtccattgcccgcggtttggctaaaggaaccatcattccggccaacgacatcattgtttctaatcccacgcaacataaattggatgttctgaaggcagagtttcccgctttacagactacccgcgataatcaagaagccgttacgggtgctgaactcattatacttgccgtcaagccatggctgataaaacctgtcgtaagcgaacttaaactgaaaagtaaacagatacttatttccgtagcagccggcataccttttgaggagttggcacactatgtggcagacaaggagatgacaatgttccgtcttatccccaataccgcaatcagcgaaatggagagtatgacactcattgcaagccgcaatgccagcaaggaacaagaacaactgttgctcgacattttcaatcaaatggggcttgccatgctgattcccgaagataaaatcgcagcggccaccgccatgacttcctgcggcatagcctatgtgctgaaatatatccaagcagctatgcaagccggaatagagatgggtatttatcccaaagacgggatgcgcatggtggcccagtctgtgaaaggagccgccgaactgatactgaacaatgatacacatcccagcatagagattgataaagtgtgtacccctggcggaattacaattaaaggcattaatgaactggaacggcaaggattcccctcagccattatcaatgccataaaagcaagtaaataataaaaataatcacttaatactaaccacatggacgaacaaattaaacaaatagccgaacgtctgcaaggattgcgtgaggtattggaattgacagccaaagacatcgcccgcgattgcgatatttcggaagaagaatatcggcttgcagaaacgggagaatttgacatctccgtaagtatgctgcagaaaatagcccgccgttacggcgttgccctggatgcactgatgtttggcgaagagccgaaaatgagcagttacttccttactcgtgccgggaagggaaccagcattgagcgtaccaaggcctacaagtaccaatcgttggccgccggtttcatgaaccgcaacgccgacccgttcatcgtcaccgtcgaacccaaaccgaacgacgaaccgatacactacaacagtcactccggacaagagttcaacctggttctggaaggacgcatgatgctgagtatcgacggcaaagacttaatcctgaacgagggagacagcttgtatttcaactccaaactgccacatggcatgaaagcgttggacggaaagaaagtacgcttccttgctgtaatcatgtaacaacataaatgaagaatggagaacgaagaatgaagaataagctgtacgcttatgccgtacatcaggttcttaattctcaatttccaattcttaattcctaaagttatgatagaaagatttttatcacaaacgtcctttacatctcaagaggactttatcaagaatttaaagattaacgtaccggagaatttcaactttggctatgacgtagtcgatgcctggtctgcagaacagccagacaaacctgcattgctctggaccaatgacaaaggagaacatatccagttctcatttgccgacatgaaacgttatacagatatgacagcctcctatttccaaagcctcggcattggacatggtgatatggtaatgctgattctcaaacgccgttatgaattctggttcagcatcatcgcactgcacaaattgggcgcggttgttattcccgccacacacctgcttactcaaaaggatattatatatcgttgcaatgccgcagacatcaaaatgattgtctgtgcaggtgaaagtgtcattaccgaccacatcaccgctgccatgccaagttctccgagtgtaaagaaactggtcagcgtaggtccggaaatacccgaaggatttgaggactttcataaaggcatagccaatgccgctcctttcacaaagccggaacaccccaacaagaacgacgacatctctttgatgtatttcaccagcggcactaccggcgaaccgaaaatggttgcccacgacttcacctatccactggggcatatcgtaacaggaagtttttggcataatctgcacgaaaacagcctgcacctcaccattgccgatacaggctggggaaaagccgtatggggaaaactatacggacaatggatagccggagccaatatctttgtatatgaccatgaaaagtttactcccgccgatattctgaaaaagatacaggactatcacgtcacctcactttgtgcaccacccactatcttccggttcttaattcacgaggacctgacgaagtataacctttcttctttgcaatactgtaccattgccggcgaagcattgaatcctgccgtattcgatacattcaagaagttgacgggtatcaaactaatggaaggcttcggacagactgagacaactcttaccgtagccaccatgccatggatgaaacccaaaccgggcagcatgggattgcctaatccccaatacgatgtcgacctgatagattatgacggccgttccgtagaagccggagagcaaggacagattgtaattcgtaccgacaaaggcaaaccgcttggcctgttcaaagaatattatcgtgatgccaaccgcacccacgaggcttggcacgataacatctactacaccggtgacgtcgcctggaaagacgaggacggctatctctggtttgtaggacgtgccgacgacgttattaaaagcagtggttaccgcatcggcccattcgaagtggaaagcgccctgatgacgcatccggcagtcatagaatgtgccattaccggagttcccgatgaaattcgaggtcaagttgtaaaagcaaccatcgtattatccaaagagtacaagaaccgcgccggtgaagagctggttaaggagttgcagaaccatgttaaaaaagtaaccgctccttacaaatacccgcgcgttatagaatttgtagaggaacttcctaaaactatcagcggtaaaatccgtcgtgtggaaatccggaagaatgacgagaaataa

SEQ ID NO: 378 - DNA, 9155 bp, unidentified
  source 1..9155: mol_type = unassigned DNA
ttaatcgaccatattatctgtcttcgggcgcaggaagaacaactgaagagccaaagcaaccagaacgatgacactcaacatggcaaagccctgtcccaatccacctccgtcagtccatttgcctaaaagctccgttacggctgcaccggcaaatacgcctgtcatgttcatgattccgtatgccgttccacgatgtttgtctgaaacaaactgacacagaatcggcatattgttggcatcgaagataccgtaacccacaccaaagagcaagccggctcccaccacactcacaaaactgtgtccgaaacccaacagcaacaaggaaggaaccgtcagccccaagccaatggcaccggtataaacacgtccgcggatattcttctgcacccatttatccgacaggacaccacccacaatgacaccgataaatgatgacagagcaatggttatagtagaaatcggacctgcctcagccatggggatattcagactttcggagaataatgtcggaagccagttcttggttgcccatcccggcaaactgggagctgcaaaatagaacaggataatccagaaagcccagttggatagtacaattgccagtccgctgaacacagaccctttcttgcgaggcgtttcttttgcaagtttctctatctttatatgagtaggattttcgtgcaggaacagcaccaataccaatgcatagacaatacccacaataccaaaccaatggaaagtaagctgccaggagaaagcggccgccaccgttgcgccgaaacctccgatagcctgtccggtgtacagaccggtcatgtgaataccgatggccagagagcgggatttatcctgatgccagtcggcaatcagtgaaagtgctgaaggaatatatagagcttcactcacccccatggtggcacgcagccagtaaagttcatggaaatcagtcgcataacccatcaaataagtcacggcagaccatacaaaaaggctaccgacgattaaccatttacgactcacccgatcagcaataacaccggctaccggactcataaagccgtaaatccacaaaaatacagccatcaaagctccaaaagcctcagccttattgagctccacaatgtccactttcattgcttcctgcatagtagaaagcatctggcggtccatatagttgagaagtgccacaacccacaaaagacctaccaccacccaaggatagattttcttgtttttcatttatattaaatcaattcgactgcgcaaatataggaacttaatttaataacacaaatagatttaatgaaatattttacgatataacgattattttttaaacagaggtaagaattaaaacaagatgctgttattgaagccttctttaaggtaaagtaagtataaatcatttaaatttcatacagaataaaagagggaaagaagaccggcatcctgcaaaattcccctccataaaagtataaaaaaaataattcggcgaactattatattaataaatcaccgaacaattcataaattaatttattatatcaggaaagagagtcacttctttgccaaatcgtccattgtcttaccctcgtaagcacaaatcgcctgtttatactcctcggctatctgcttcggctctttggttgcaatatcataacccaccatcactgtacggcactcacattttacctcctgcgtatccgttgtcacagcacgttgcagcaatgtgaagcttttatgccctaactgaacaacagctgtctctattaccaaatggtctgaaaagaatacaggcgcatagaagttggcattgatatttgctactacaatggccatcttattccaatccgcactccccaacacatcttttatataagttgtctttgccaaatcatataaagaaaaataaaccgaattgttcacgtgtccgaactggtctacgtcactgaaccgtatttgtaccggcatcgtatgcctgaattttatttcctctcccatagttatgcttattaatttcattcaaatataatacttttcctaataaaagaacactaaataagagattattcttacttttgcgttcaatttatttaaagtgaaaccattaacttaaagaatagacatggataagaagtttagcaaatccaccctttgcgtacaaggaggatggcagccgaaaaaaggagaaccgcgcgttttgcccatttatcaaagtacaactttcaagtatgataccagcgaacagatggctcgtttattcgaccttgaagatacgggctatttctatacccgcttgcaaaacccgaccaatgacgcagtggcggcaaaaatagctgcattggaaggtggtgtgggcgccatgcttacttcatcgggacaggctgctaatttctatgccattttcaatatctgtcaggcaggtgaccattttgtatgctcgtctaccatctacggcggtactttcaacctcttcggagtcacgttgaagaagcttggcatcgaatgcacttttgtcaatgccgacgcacccgaagaagaaattgacaaggctttccgcccgaacaccaaagcattgttcggagaaaccatctcaaaccccagcatcgatgtgctcgacattgagaagtttgcacgtattgcccacaagcacggggtgcctctgattgtcgacaatactttcgccactcccatcaactgtcgtccgtttgaatggggagccgacattgtgactcactctaccaccaaatatatggacggacatgccaccagtgtaggcggagccatcgtagacagcggcaatttcgattgggaagcgcatgccgacaaattccccggactgactcagccggatgaatcttaccacggactgacttataccaaagcattcggtaaaatggcctatatgaccaaagctaccgcgcaactgatgcgtgacctcggttccattcagtcaccgcaaaatgcgttcctgctgaatttgggactcgaaacacttcatctgcgtgtgccccgtcactgtgaaaacgcacagaaagtggccgaatggctggaagccaatccacaggtgaaatgggtaaactattgcggtctgaaaagcagcaaatattatgaactggcacagaaatatatgccgaacggctcttgcggtgttattgctttcggactgaacggcagccgcgaagaggccatcaagtttatggatgcactgaaactggcctgcatcgtgactcatgtggcagatgcccgcacatgcgtgcttcatcctgccagccatacacaccgccagttaacggacgagcaattgatggaagccggagttgctcccgacttaatccgcctgtcggtaggtatcgaagatgccaacgacatcatcgccgatctggaacaagctttagaacagattaaataagataagccatgtcagtcaaacgggttgttatcatcggagccacttcgggcatcgggctggaagtagccaaaggctacctgaaggccggatggcaggtaggcatagccggacgcagggaagaggaattggaaaagctccgccggactgctcccgaacaggtgtgtgcccaagtcttggacgtcactcacgaagatgcaccctatttgctgaaacaactgatagacgagttgggaggtatggatttatttttgctgagctcaggcattggtaaacaaaacctctctctgacactcgatatcgaattacagactgccgccaccaatgtggagggtttcatccgcatggtgacggcagcctatcattattttgaacagcaagggcacggacatctggctgtgataagttccattgccggaaccaaaggactgggttcggctcccgcctattccgccaccaaacgttttcagaatacttacatcgaggctctcgaccaattggcgcatatcaaccgcctacccattgtgtttactgatatccgtcccggatttgtagccaccccgctactgaaagacgacaaatatcctctgctgatgaacgtttccgcagtcgccgcccacatcatcaatgcactcaacaaaaagaaacgcaccgtcatcatcgaccggcgttatcaagtgctggtgttcttctggaggcttattcccaaatggttatgggtcaagttgcccgtcaagaattaaaaagcgaaaaacctatcacaggcaaccactttcattttaccttgtaataaaaaaggaccggattagaatcctcttccacccggtttaacaattccagcatcttcacggtggtctttgccttgactttcggataagtttcaaccaaagacttcaaactcatcaagcttcctgccatagccacaaagcatatcctttctttttcaccgcccaccggagtataaccgtgcaagttatacccgtattcagactggaatatataatcatatttacgaacagcgtcgtcccattttgacaagatatacaacctatcaaacaagttcgttcggaacaataaatgttcggaagtttcggtcacatccgtcatcaaataaaccaagcctttctctgtggagaatttattcaagtcacggcagtcatacaccttatcctttgcatcctccggaaatgtttcattcataaagtcaatagtataagaaggagataccgattggttttctaacttataaattgtattatcaaatttccgggtaaacagcacaggcgatgaagcactcaactgatgccctgctataaaacaaaatggggcaatttctatcaatggttccaacaagcccgttgtctcttccccgtgaatcgcagttatagaattttccgacaaccggccattggcgtaagtttcattctccaaataaataaaatctccgtccaaagcaatagagtgataataaccgggcaattttcggctactgatgaaattgccttccgcatcaaaacgcagcaacgctgacggttcggtcaacagcaccaactgattttttcgtttgtcaatggcgacatccatcacagcactatactctggccccatcccaacccgatggatagtaaacaaatgtttcccatccatattaaaagccaccacttgtttccccgctttatcaagtatataaaggttccctttccattctatcaacctgttgacacgggcaatcagcgcatcgtctttcgtctctaaggcaataacgcgagaatcatataagaatgtagtatctgctatcgatggctctccttcttctaaaacagccgttgcttcacttccatattgtgaagtagcgcaccctgctccaagcaataacaggaacaacaaaaggaaatattttgtccgcataatatttatgtttctcaaggtcatacagatatatcaacattgaaaaaaggattcaggtcctttttcattaactacttgagatataagcctatactcgcacacagccaaagtgcacaataataaattccttttcataagtatttcaattttaaagttaacaattacactaatatacatcttatattgaatagaaaaaaataattttatgcttttctttgtaacaacattctctctgcttccgtctatctagatgaaagcgcttttaaaaagagaacctgaagtataaacataaacaaaataaaaccatgaaaaagtatatattggcattagcactgttgtttgtctgtcacatcggttttgcccaagaccttaattctctgttcgatgaattcaagaaagagcctaacgcagactgtattagcatttcacctttcatgatggctatcggaaagatgttcatgggcaacgacagcgatgcgaagcttgcccgaaagttcaaatcaataagaattttggatttggaagcctgctcgacaagcgtaaaggaacgcttcagcaaaaagataaacgcacagcgaattaaagactacgaaacgctggttcaggtaaacgatgaaggtgaaaaagtgcacattctggcaaaaagtaagaacgacgtgatacgcgaactgctcatcgtctgcaccgggaacggcgattgcacattggtacagttaaagggaaaagtaagcaaagaaaaaatagccaaactactggcaaaagaagaaatgatgtaacatggacgccgctagttttaaacaacaatttctaccttgccatgccaaactctatcgagtggccttccggctgatgggcaacgttcaggatgccgaggatatggtgcaggaagcgtatctgaaattgtggaaaaagcgcgacgaactttccgaagttgccagcatcgaggcttattgcgtgacgcttatcaagaacttgtgctatgattccctgcgttcctgccgaccggacgaagacagccgactgcccgaagagcttaagcttccgacagacagcaacatcgcccgcgagatagaacaaaaggacgaagcaaggcaggtaaaaagactgattagacagttgccccggtcacagcaacaaatcatcttgctgcgtgacgtgaatgactgttcctacgaagaaatagaacaagtcaccgggcttacagccgtcaatatacgtgtattgctgagccgcgcccgcaaaaagatacgtgaacaatttaatgaaattatgaactatgaaagtaaatgaaatagaagaattactggtccgatattatgacggtgagacgaacgaggccgaagaaaaggaactgaaagagttctttgcccaagcggacgttccggcacatttacttgccgagaagagactcttcatgcagctcgcctcacaacctgaaccggagacacccgaaggactggaaagtaaattaagcggtctgatagacgaatgggacacgcatgaacggcgaagcacgaagataaaaaagcatacacgcatcatccacttacagtgggtaggcagcattgccgccagtctgctcatcttgttctcggtaggaatgtatctgtacaaaccttacactcctcccactccgcaagacacctgctcttctcccaccgaggcatacgcagaagctcagaaggcactgttcatgttctcgtcagcacttaacaagggagtgcaacaaatggaaacggtgcacgaaaccaccgaaaaagtacaaaagaatgtaaaccaacagttgaaacgatttaaaaacttgagacaatgaaacgtacatatattattaccctgctattgtccctttgctcattattcacttatgcgcaagagtctttttttgacaagtatgccgacatggaaggcgttacgtccgtatatatatccaaggcgatgctcagcctgatgcccgatatgaaaacagaggaaatctatatcggagagctggcaagcaagttggacaatattcagattctgaattgcgaaaaagcatctgtcactgcacagataaagaaagatatcagctacatcagtcccaagaacggctatcaagagctgatacgtattaacgatgaaggtgaaaaagttacgattttccagaaacagaataagggaaagcaaaaagaattcgtattgctgtgcgaggaacagaatgagcttaccatcatcatcatcaccggaaacttaacattgcaagaaattcaaagcatcgttaataagaattgacgaaggagtgctcaaaaaagaccttgaggttttgaagaaagaccttgaggtttttgaaaaagatgaaagagtttttttaaaagacccaggtcttttatcagggaactgttatcacgaaaagccttccgcctttttcattataacggttctttgtgacagattttatccatgtaacacgtttcacatcaatccattataaatcaatatattatccccacaatatgtgtgaaacatgatttgtatttatctctgttcaaacacttttgccggaagaaaatccgtaaatatgtacccaaaaggtctcttaagacctttcccaaacaatagggaaagttttctccaatagtagtaacagtcttcaagaacaatacctattgtttgggatataagataccgtcacattatctcagttcttatacttcaccagcataaccaccggattagactcctcatccaatcccgctgtcacctctttcagtcggcccttcaatccatcttcttgataagcctcgacaagctgaccggccgacaatgtctgaacagccgcgattccattattattgattggatgcaaaaacatatccacactgcgtttctttacaaaatcactattgagcacctttgccttataaagctcattggtctgcttatcgtacataaaatcgttcataaagaatcctcgcccggtagtaaaatcaaactctttctttacagtgtgaagaaaataataacgatcggtgacagcccccattgtcagaagtatctccgggtccttggtaggtgctttcacaaagaacggaaccagtttattcttttcgggcacataattatatactgtgtccgaagaacagtcaaccagcagccattctccccgattcggaataatcggacgtacagaagtcatcgccactccgtctccctgatgcacacaaggggtcttgattatatcataaggaagataaatgtcgcgggtaacacttccatctttcttagaaatgagcgaatgataagatttcccttcctctctggactgcccgtccttataataaacagacgcatcataacaaatcagattgtctttgtcataattgagaacatccatgtattcggtatctttgggatgagcgaaagagcgcttgaagtttcccgacaaatcatacacataaatcttcttcgctgcagcgcagttgacaaacatttcatcgttgttttcatccagaataattccgctgataaaattatattcttcggcaccttgtcccttccggtttattttccgtatggctttaccggtttttctgtcataaacaaaaatgtcgccatcgtttgcccagttcttcaccaacagatacttgtcacctatatccatcacgctcccctgagtcacaaattcatcacttgtctccaacggaatgtattccacatccataaaatcctgaagaactacttccttctcggaatgttcggtggcaatatccaccgtgaccatcgttgtctgctctttttccgctccgcatcctacacacacagccaccaagagcagtatcgcaaatagttttttctttttcat

SEQ ID NO: 379 - DNA, 22443 bp, unidentified
  source 1..22443: mol_type = unassigned DNA
ggcctgcgtctcgccgggatagccgaccaagagcgtggtgcgcagcgccagatcggggatggcttcgcgcaggcgtccgatcagcgcataggcgtcggctttggtgtggcgccgctgcatggccgaaagctgggcgtcggagatgtgctggaacggaatgtcgaggtacttgcagattttgggttccgaggccatgacttcgatcacctcgtcggggaatgccgtgggataggcgtagtgcaggcgtatccactcgatgcctccgatgcggcagagccggcgaagcagttcggccagcatccgccggccgtagaggtcgagtccgtagtaggtcgtatcctgcgcgatcacgatcagctccttcacgccgccggccgcgagtttgcgggcctcctcttcgagcctctccatcgggacggagacatgtcctccgcggatgagcggaatggcgcagtagccgcatttccagttgcagccctcggagattttcaggtaggcgtaatgcttcggcgtggtcaggtgccgctcggtctccagcgtcgggtcttcggccgcgcccagcgcccggacgatgccgtcccacgtgcgggcgccgaagaattcgtccacttcgggcagttcggcccgcagctcgtcggcatagcgttccgagagacagccgacgacgaacagccgttcgatctttccggcgtttttggccgcggccgcccgcaggatcatgtcgatcgactcctgcttggcgtcgccgatgaagccgcaggtgttgatcacgacgaccttggcgtcggtgcggtcgctgtcgaagagcaccgcgtaacccgccgcggcgagccgggccatcaggtgctcgctgtccacggtgtttttcgaacagcccagcgttatgacgttgatttttttcatgcgtttcgtatttcctccgcaaaggtatggattattcccggatttatcgcaaaaacagcggcgcactttcggtgcgccgctgctgcagggagtcggtggggtactaccacatcacatggatgccgtaggcttcgatgccgttgccgagcgaggtcgaagcgacgtcgacatagccccagaagcgcgagtcggccagcatgaagatcgtataggccgggcctttcacgatttcgcggacctgaatcgcctcgttcgtattcgcggctgcggactgcagcgcgccgagcaggtcgtttttcacggtgccgatcatcagcaggttctgcttcttgtagtgcagtccgctcagtacgccgttcttgccgccgaaagcgttgatctggtcggcattttcgaaacgcgccgtgttgaagctgatggcgaacgatacgttggtcgtgcccgtgacgttgccgtcctcgtccttgtcggtgcgggtgccgttgagtgtcggtgcgaaaccggtgacgtagcatcccgaaccggagggagtgcccttgacctcggtcgtgggaccgttgaaatagagcatgctgccctgataggagctcttgttggcgatacggttgaatgcgaacgccgtccaacgcttggtgttgagggccgtctgcatcgttttgggcaggttggcgccgtcggcgcggtccagcaccgtcagccacgacttgccgcggccttcgagcgtattgaccatgtagttgtcgatggcggcgtaatccgcatcgctgccggccagcgctccgtcggtcagacgcgatacgaactggatttcggctttgaacttgtccgaagggggagcgatcgtctctcccgacttgtactcgtccagaccgttgtcgcagcccgtgaagaccggggcggcaagggcgagcgccagaaaaatggataaatatctcttcgtgtttttcatctctgtacttttttagctgtttgatacgcgcttaattcttcagtacggccgtgcctgcgatggggtagtggtccgaaatgacattgagccggtcgcccttgacgactttgtagtcgctgcagctccatttgccctgcgggaagctgatgaagtagtccaacttgctgtaaccgccgaacgtgccgtcgttgttgcagagccgggtgcccgtcttctcatactcgcggattgcgctggagctgggaccgcagttcatatcgcccatgatcagcacggggatgttttcggcaacggccggagcgatcgcgtgttcgatgacctctttggcctgacccaagcaggtctcgtcgccgccgaaagcgtcgaggtgggtgcagacgatgcgcaccttcaccccttcgggtttggagtcggtcggaaccagaatgtctgcccagcccgccgaacgctggtcggcgccggtgtacatgcccagcagtaccgaagccgaattgacgatcgggtatttcgacagaatgccgttgccgtaggcgccgttgtccttgttgtaggagaagacgaagaacgggaacatgccgagcgactgtgcgcattcggtcagcttctcgaccgaactcatgcgtccggtcgcggtttcgaactcgttgaagcagacgatgtcggggttttcagccttgatcttttccatggcctcggcgatttcgaaatagactgcattggagttgtcgtcgtattcgaacgacttgatgttccactccatgcacttcagcttgacgtcctgtgcctgtgccgacgcggccgggagcatcatgcagagcagtgcgcctgctccgaggatatatttgttgattttcataatcgtttctgttcttaaatatggtttaataacccttgttctgcttcaggtagaccgtgccggtgaatgcccgctgcggaatggggaacaccttgttgtaagtcggattgaaggtgcggcccggataaacttccacctcttcggcaacgatctggccgttgaccttcttcgaaatgacgctgtacagcggcttggcgtaggtcgtcgtggcgatgccccagcggactacgtcgatatggcggctgggctggaactcgaaggccagctcgcagcggcgctcgttcatcagctgggccttggtggcctgactgttctgcggcagacctgcgcggtcgcggatctggttgagcagctgcttggcctcggcgtcgccctcgcctttggtccagatcagggcttcggccttcatcagcatcacgtcggcatagcgcagcaggcagcagttgagcgagttccagagtttgtcgcgcagcgcggacacctctttgcccttgcagtcggcgccttcccacggggagatgaacttgcggcagatcagacctgccgatacgtggccggtcgtgtagtccgagacgcttccgtcggtgttgtaaccgccgaaggtgatgtcacggcctacgaatttgacgtgctggcccggatagaggatcgttacgtcgcggcgctggtcgccctcttcgaacgcatcccacaaattcttgctaggcgtgaaatacccccacgtgttgtagaggccccagccagcgttgacgaaagttacgccgtggtagcgggcgccgttggtatagtcgccttccagcgagaagatgtactccttggagtggttctgctccttgcgccagaggttggcgtacgagttgagcttgttcgacggatcgatgtagagttcgcgtttgtccgaaccggtaagcgccatgatcttgttgcacatctccagtacgatgtcgtagtatttcgcgtcgtactgcgctgcatagagggctgcgcgggctgcgtatccccaagctgcggccttgtgcggaagtccgatctgcgaggcgtcgagctgcgaaaggtagggaagcatctcgcctgccgtgcgcatgtcggagatgatctggtcgtagttctgcagtacgtgcgccgggcgcggggagtcgatttcggcggcgggagtcgtgtcgaggataatcggaataccgccgttggtgtcgtcgccgtaatagggaaccatccagagcatcgagaaaccgcggaagaaataggcggtgcctacagcctggtttttgtatccctggtccagcttcatgtcggggaccatcttgatgatgttgttggccttggcgacattctggtacatcacctcccaaacacgcgagacgtcgttgtcgttggacggcgacatgcggaattcgcggatttcatcgaccgacggacgggcgcggccgatcagtatgttgtcgctggcgcattcgagccacatatggccgcggccgcagatctcctcgctccaatagggcgagacgaagtggtaaagggcgtagatagcttggtctacatcctctttggtcttccaagtagcgtctttgccgtaaggctccctgtcgaggaaatcggaacaacccgaaaggcagaaagcgcttatggccagacagaggctgaatatggtttttttcatggtcgtagttgttagaagttgatgtttacaccgaagttaaagaagcgcgacgtgggatagataccgctgtcgagaccgtagttgcctacttcggggtcggtgccggagtagccggtgatggtggccacgttgtcgatgctcagatagacgcggaccgaacccttctccatgccgatgtggcggctgatatgcttgggcagcgtgtaacccagcgtgatgttcttcagacgcaggtagtcgcccttttcgaggaagatgtccgaaaccttgaggtagttgccgttcatgtcgtcactgaggccgagtcgcggatatttgctggtcatgggtttgaaatcccatgtgttgtaaacatcggttgttaggttacccaagtcttgacgaccgttcattcccaactgtttcgtgccgttgtagacataattgcctgcgacgccctgaaacataaaactgaagtcaaaacctttccaatcgagcgatcctccaaaagagtaggtttgtttcggagtataggagcgggataatacgcggtcgttgtcgttgattacgccgtcgccgttggtgtcgatgaaacgcaggtcgccgaccttggcatcgggctgcagcatcttgacctcgccggtgtcgggatccttactgatatgacggtcgatctcgtcctgcgagcggaagataccgtccgtgcggtagatatagtaagagtaccatgggtgtcctgctcctgaagcaaaaagctgaatgccgttgaatgtggggtatttgtgcattacaatgggctgggggccgtagtcctctacataacctttgttggtcgagaaagtgccccagacattgtagttgaacttgccttgtgcggcgctgttccgataggatacggagaactcccatcccttgttgattacgtggcccatattacccagcggcgcattctctacacccatctgcggcggaatcgtgaggtaatcgacgaggtccttcgtttccttgttgtaataatcgacgctgacttcgagcgtgttgtggagcattgtcaggtccagaccggcactggtctggacggtggtctcccagcgtgcgtccgtattggggatggtcgccagataggttccgtaatgggtcgtgccgccgataagcgaaccgtccgggtagatggagagcggaatgctggtcgggttgggcaggttgtagaggtctacgttgccgaccttaccccagcctgcacggaatttcacgaggtcgaagaccttgttgagacctgcattctggaagaatttctccgaggagagtttccacgatcccgaaatggccgggaaccagtcgtagttctttgctgcgggcagtttcgacgatgcgtcgcggcggatgctgccggtgaggaaatagcggtcgtcgaacgaatagccgagacgggcaaggaacgagaccatcgagtagtctactatatcttcgttcgggttcttggtccatgagcctgcggcgccccataccagattgtggtcttcgttggagccgtagccctgcgtgcggaagtcgcggaaatgtagtttcttgtagtcggtggtgaaacccgccatggcgctgatgtggtggcgtccgaagacttgcgcgtaggtagccgtcgtttcccaaagatagtggaagttgttgtagttgaactgctcgcggctcgaagtgctcgatccgcccggcacgtcgatgacgggcgagaattcgtcctcctcgcgcatgtcgaggtcggccgtgaactccgatttcagggtcagcgacgtgatcggcttgatttccagcgaggtggtcgagaatatcttggtgcgcgggtagcggcggtgcatggtttcgagctgggcgacgggattcacgatgttgggaccctcgacgccgctggccatgtcggccgacgaagcgataccgccccatttcggtttgccgtcgtttccgtagacgatgttgccgtttgcgtcgcggtcataaaccgatgcggaagcgggaaaccacatggcgccgtagatggggcccgtgtgcgaggtactgatgttgccctgtccgttggagtattcgaagtttacgcgctccgacaatttcagccatttgaccggcttgaattccgtatggagtttcgcacccagcgcttggctccatgtgttgagcagggtgccttcctttttgtcgtaggttaccgagaggatcgacgagagcgtctcgctgccgccggtaatcgacacggcatagtgctgcgtcagacccgtgcggaagatttcgtcgagccagtcggtgcgggtgacgttggcgcctgcatagacctgcgggttggccagattgggcagcgagctgcccggcgagttctcgacggccttgccccagacgtcgcagaactgctgcgcgttgagcatcgtcgggaggttcatggagcgttcgaagccgaccgatacgttgacgttgacgcgggctttacctgcctgcgcctgacgtgtggtgatcagaattacaccgctcgaacctaccgaagcaccgtagatggcggccgaggcggcatctttcaggatggtgatcgtctcgatatcttcggccatgtagggagcgccggggacaccgtccacaacgaccagcacgccgtcgcccgaagtcgggccgatattgtcgcggctgtatgcggcgctcttgtccgtgccgtcgtcgttgcccttcgagccgcgaccgcggacggtgaacgacgctttctgcagcgggtcgcccgactgctggatcgtaacgcccggcatgcggccctgcaggagggttccgagatcggcggcgcggctgcgggccgcatcgtccactttgacggtggagacggccatcgagaggtcctctttacgctgcgagccgtaaccgatggcaacgacttcgccgatcatcgtggcgtcttcttccatcgtgacgttgatttccgtgcggttcatgacggccagcgactgcggtttgtagccgatgaacgaaaagtcgatcacgccgtccggtttcacggaaatctggtagcggccgtcggcatcggtggtgacgccgttggtcgtgcccttttctatgaccgaagcgccgatgagcggagtctggctgctgtcggtcagctgtccggacaccgtgacccgatcctgcgcatgggccggaagaatgagtatgctcagcagcagactcatcagaagaaagcggacgaagcccctgttcttctccgaagttgtcaaattcattttcatagagttaaggttaatattaatagtaattgtgtagagaggctcggtaattctcggttttggcagatatttatttaaatattttaaaaataggcgcggttttggtgtcgatttgcagtatgtgcaaaatcgatattcaaaattatgtatctgtaaattgttggtgggcgtggtttgcgtatttgaatcctcaaattgcgtataattgactgccgcgccggaaaaaaccggacgatacatatatacaaaaaagctccggactctgtcggggagtccggagcgcgatgtttgtgcttttaatatataggtgtcgttccgatatggccgtccgcctattgtgcggaaccgccggcggcccgtcagctttggccggagccgtcgccgaagagcgccttgacgaactctttgcggtcgaatatgcgcagctggtcgatgccttctccaatgccgatgtaacggaccgggatgtggaactggtcgctgatgccgattaccacgccgcctttggccgtgccgtcgagtttggtgatggtgagcgaagtgacctgcgtcgcctgcgtgaactgccgggcctgctcgaaagcgttctgtccggtcgagccgtccagcacgagcatcacctcgtgcggcgcgccggggatcaccttgcccatgacgttgcggattttggtcagctcgttcatcaggttgatcttgttgtgcagacggcccgccgtgtcgatcagcaccacgtcggcgccgttggccttggccgaggtcagcgtgtcgaacgccaccgatgccgggtcagaacccatctcctgacggatcatcgtggctcccgcacggtcggcccagaccttgagctggtcgatggcggcggcgcggaacgtgtcggcggcgccgatccagaccttttgtccggctttggtgagctgggccgcgagtttgccgatggtcgtggtctttccggcgccgttgacgcccacgaccatcaccacgtaaggttcgccctctttggcgtcgagtccgaaatgcttttcggagccgtgcgactcctccatcagcgcggttacctcttcgcgcagaatggactgcagctcggaggtgcccatatacttgtcgcgcgccacgcgctcttcgatgccccggatgattttgacggtggtttccacgcctacgtccgacgagatcagcacctcttccaagtcgtccagtacgtcggcatcgaccgtcgaacggcctgcaacggcgcgggcgagcttcgagaaaagtcccgtcttggtcttctccaacccggcgttaagctcttcctgctgctgtttgcgctcttcggaagcctgcgcggcggagttgtcctgcttctttttgaaaatatcgaaaaatgccatgtctaatatctctatatccgtacaaagataataagaatgtttggaaaaaaacgttatatttgcactatatacattttcaacgatgatgaaaaaaacgattctgctgcttgtggcagcgctttgcggcgtattgacggccgcggctcaggacctgatcgtcaagaccgatgcgacgaaggtcgaggccaaagtaaccgaaataacacccgatgcggtacggtataagcgtttctccaatcccgacggaccgacctatgtgctgcctgtcgccgatatcgactacattcagtatgccaacggcgaaaaggagcgcttccgggctgccgaaaccgtgcctgcggtgccgctgacccctgcgacgccggtcgcagcggctcccgctgcgcaggcgcctgttcagcaggctgcgccggtgcagtatgtggccaaggagtatcagatcggcgagttctacgaccagaacggcgtcaagggcgtggtctgcatgctgacggaggaccgtcggcacggactgattatttcgctcgacgagatatacctgccgtggagcgaattccggaagcccgacctgcgggttgcgggcgccgacgaccggatcgacggcatgggaaatatggagaaggtagccgcctatatcgccgaaaacaaccttgcgtgggatgattttccggctttcaagtggtgccgcgacaagggcgagggctggtacctgccggccatcgacgaactgctgaccatcggacacaactacaacggcggcacgcgcatacattccaaccgtcaggcccgcaaccgtttcaacgacgcgctcaaggataacggcggcaagcgcatggaccgtctggtctactatttctcctcgaccgagaaggacgagaaggaagcctatacgacccatacgggcatcgaacctccctatgtgatcgagattcccaagtacaacaaattcctcgtgcgggcggtgcggaagttttagctttcgtcaattaaagaaaaggagtatcctcgatgggtactccttttttgctttaccggcaatcagatgctttcgatcagggcgctcagtttacggacgatgacttcccaactgtaattctgttcgacataagccggtcctttttcgcttatttcgcgtcgcagccgctcatccgtaaagagtttgtgaagctggcggcagaagtccctgcgtcctttgtagtaaagtgccgcgccgctttgcaggcaatggtccttcagtacttcgctggctccgtttaccaatacgggaacgcggttttgcatggcttcgagcagcagcaaggagagactttcgaaacgcgatggattgaccatcagagttgcgtgccggataatcgcgcttttttcttcttcggaaacgaatcccgtcaaaatgatattcggatcgtcgggatatttgatttccggagacagactcccgaccaaaaccagtttcgactgctgcttgtatgtccggttgtaagtctgaaaatcgggcagcaatgtgtttatcttgccggttgtgacccgtccgagataaagcgcatatttatccggaagattgaatttcgctttgacatgctcccacgctgcggcgggcgcgagttctatgccggtgcctacgatgctgctcggcgccaatcgcggcccgaaaatgcgcaggcatagcctgcgttctgcttcggtgttgaacgcaatatggcgaacctgcgtgaataaccgggtgtaaatggccgggaaaagccatttttccgggtgtgccatcggaatcagtatgcttttttggggaacctgcagccctgcgaaaatggtctgtgcatggaaatagcacatgggaatgaatgccgcataatcgtcccgatgttcttcgatgtagcgcagcaggtcgggggcgtaggagaccgtcgaatgctggtaggcggtttccttgtcgaagccgagattccagaccgggtgaattgccgcaaggagacgcaacacgccggcttgcgacaaccaatagcggagtctgcggacaggtttggatttctgaagcagccggcggctttccctgccgttgaagccgggatgcggtacaaaccgccggatggttattccgctttcatggctttcgcctgcaggatattggtccgaggggttgttgaagtccttgagcgtcgtggtcaatacctcgacgtcatatttatcccgcagtctttctgcaagcatccggcaatgcacttccgatccgccgttgatgccggctccgtagcgcacgttgataaatgctatttttttcatgggtttacatttcgttgaaaaggctgagccattggttgccgatattttccagatcgtatctgcgggaagcttccagcgcgcgcgtccgcatacgttcctgaagttccgtgtccgcaagcgccgcattcagcagcgcggcgtatttgcgcaggctgtaggagggaaccatgattccgcacgctccgtcgcaggtgatttccctaattccggcataggagtcgaacgataccggaatgacgccgtattgctggccttccatcagactcatgggcagccctttgaaattagaggtcaggcacatgaatgtcgccctgcggtagaatggcgttacatcggcatgatagccggcgaattcggcccgctgcaaccgtagtcttacggctaatttgcgcaggttctcgtcttcctcgccgcatccgaccagaatcagcttccagtctggattcctgcgttcgacggttttccatattttcagcaggcgatcgacccgtttgtgagctctgtggaagcgtcctacgtacaggacgatcttttctttgggcgatacgggggcggccgccgcaggcaggagcggattgagtatggctccgtatttcgatgcgggagcgtcgcttccgggatggcctgaagccttgagcgcctgcatgaagtcctctttgtattggtcgcagaggagcagcatgcgatccagatggggcatcatgccggcgtacattttctctgtccggtgcaggcgtttgcgggtaatgcggtcgagcggccggcgcaggaacagaaattccagccggcgcagaaatgtcggattggggatttccgtggatttgagttcgcgccatgcgtactcttcccagaagggaatgttgtgcagacagaaaatcatccggcaccgggtcctgcgtttgatctctgcgaacggaatggcatctatgccttggacgatgatgcaatctacgctctcctcttggagagaccggcaaaggaaatcgacgttcgccggttttttcggatcgggtccggccggcagctccctgaattgaaatattgcccgctcttcatcacataataattcgcggttcaacttctcgatatacagaattatgcggtaaccctgtttgtgaaagaaggaggcgagattgtgcgttaccgtttccgctccgccgtatggataaagccaattgaagaaagcgatggtttgcagttgcattgtcgtgtatttttgaccaaagttactcttttcgccctgaaatagcaaacggacatccgaatttgtgcttttcttcggagagtataaatacaaagggcaccctgtcggatgccctttgtatttaagatcgctcttaaaatacttatttcttctcctcgaagaattctttgacttggtcgttggggatgatgccttccttgaacatgtaagcaccggttttgtccgacttgaccatcttgatgcacttcgtaaagttcttacccgtgccggttttcagtgttgcgactactttctttgccatagagcttcaaaactatttaatttcacggtgaacggtgacctttttcagaaacgggttgtatttcttgcgctccagacggtcgggggtgttcttcttgttttttgtcgtgatgtaacgggacattcccggaactccgctctctttctgttcggtgcattcgaggatgacctgaactctgttgcctttctttgccatttgttacttcggtgttttagtaaacggacttaggtgcggcagcctcgcgcagagcgactgcaagacccttcttgttgattgttttcatgccggcagccgataccttcagggtaatccagcggccctcctgctcagaccagaaacgcttggttttcagattgggactgaatttgcgtttggtcttgtggtgcgagtgcgagacgttgtttcccacgatcgccaccttgcctgtgatttcgcaaactttcatttttgttttcgataatattaatattattcccgtaagggagtgcaaatataaggaaaaaatgagaactaaagattcagttgcccgattaatttttaatgctgaatgttattgtgttgatagtcaatgtttaaacgattggaattgtgagcgtgaaacgcgccccttccgtgtaggaagtgtcgagttcgaccccgccgcccaatgcgccggcgatcagccggcagacggcgaagcccagtcccatgccctgcgagaacgggtcgagtttgacgaaacggtcgaagatgcgcccggcttctgcggtggggatgccggggccacggtccgtgaccgtgaaggcgatccgctttttgtacgagatcagggtgtaggcgagcgtgatccggccgtcgggggcgaagcgtgctgcattgcgcagcagttcggtcagggccttggagagcagcaggcaggaggtgttgaccggaagttgtgcgcattcgggttcgaagcggatgtcgagtttgcggaggctgtagtccctgacggtctgaatgcactgcatgcagcagacgttgatgtccaccggacccaatgcgggcggggggtcggaggattcgaggcctgcgatatagagcacgtcgtccacgagtttctggaggtagccgctgttttcccggatgatctcgatgtaggactgacgcttttcgtcgtccgcgtccggggccgcggccagctcggcgaaacctacgatggaattgagcggggtgttgatctcgtgcgtgatgttgcggatgaagacgcctttcatccggttgctcgcttccgcggcccgtttggcatgcgccagacgacggttcatgcgcgccgtgaagacaagaaagaggaccgtcagcagcaggatgacgctcagcgccgcgatgcccagttgcgtgcggtgcaggcgcacttcctgtgtctgccgctgcagctccgccttttcgacgtcgagacggctgacgtcgagcagcgtggcgaattcgccgaggtttctttcgttgtcgtcgccgacctttttccggtagaggtcgaggtagtgtttctgacttttgtaggcggcttcgtaattgccggtttcggcataggtttccgcacgggtttggaacagtttgtagaaataggtttcgctgtgcccggtctctttggacaggccgatcagtttgtcgagcgtggtcagcgccctgccgaattcgtgctcggcgaggttgatggcaagctgcgcttcggtgaggctggccgtcgtaaggtatccgtcgtgtccctgccggatctggtcgaacagcgtgcgggcttcggcgctccggccggtccggctgtagaggatcacctgtttgagtttcagcggccagatgtattcgggcagggtgagccgcgccttgcctttttcgagttcttcggcggcttcttcgtaccgttcggtgtcgatgaggacggtggccagttcggaatagagaatcggcagcgagaatttgttgaggttgttctcttcgatgaagccgatcgccttgcggtagtagtcggcggcggtctctttgagtccgcgggttcggtagatgtggcctaactgcttgtaggcttcggcgatggcgggcttgtagtcgtcctgctcggcctgcgccatgtagcgttccagctcgtactgcgccagcgtgtattgcccgtgtttcgtgtagtagagaataagccgcgaccaagtgaaaaaatagtaggtcggctgctcgtttgcgcgtgcgaaggcctgcacgcggggaatccacgccttgagggaatccagttcgttgttgaagtaatagtggtcggccttgaacgagagggcgacggcctgcatgcggatgtcgttcttttcgcccgccagccggaacagcgtgtcggccttgagcaggacgaccgaatcgcggatgttgttgttgcaccagcggtaataggcgtaaagcgtgctgtctacgtttttgtaggtttcggtctgcgcgtggccggacggaatccgggtaaacagcatcaataaaagcagggcttttttcattagtttttgagctgaatagttgcaaagatatgtaaatatatgctataaagcaaactattcagtctattgatagggctaattagcctgatttgccgcccgcaattcttcttcgagcagttcgatggccgccgttccggctttccggatgacggcgtttcggctgccgccggcacgaatcaggcgggtcgtggtgcgcagcggggagctgacggcgatccataccgagccgacgggatattcgggcgttccgcccgtagggcctgcgatgccggtcgtggcgacggcatagtgcgaattcgaagcccggcgtacgccttcggccatctgacggacgacctgctcgctgacggcgccgtagcgggcgatcgtgtcgcagctgatttgcaggatctcctgcttggtgtcgaggctgtatgccacgacgccgcatttgaagtaggccgaagcgccgggcagggccgtaaagcgcgcggcgatcgtgccgcccgtacaactctcggcgacggccagcgtctggatgcggtcggtcaggatgcggtgcacccgtttttccggagcgtggctgctgcaggcggtcagcgagagaatgaatgcggttgcggttgagagcaggattttattcatcggggcgtcttttattttccgttgagttcgtcgcgcagcagaccgagggcgaaggcgccggcgcggtcgatgatctgtccgcggtcggagccgcactgtttgagcagggcgaccgtgcggcgggggcctgcgacggcgatccataccgtgccgacgggcttttcggccgtaccgcccgcggggcctgcgatgccggtggtcgagacggcgtagtcggcgccgctgatgcgtcgcgccccttcggccatctgtcgggcgacctgttcgctgacggcgccgtaacgggcgatcgtgtcgggatcgactcccagcacagcctgcttcgacgcgttgctgtacgaaaccacgccgcagaggaagtaggctgaagcgcccggcatggccgtaaagcgcgcggcgatggtgccgcccgtgcagctctcggctgtggcgagggtctgtcgccgttcggtgagcagcttgtgtatcaactcctgcatggtggccgtttcgtagccgatgatgttgtggggaatgatcctgcgcagcgcttcgaactgccgttcgatctccttcgatacgctttctccctcgacctcgtaggctgacagccggagccgcacggcgcccggattgggcaggtaggccagcttcaggtagggcggcagggcgttttcccacgtttcgatcgctttggcgagcatcgattcgggcagtccggcggtgatcatcgtgcggtgtacgatctggcgcagttcgaagtgcgccttgagccgcggcatgacctcgtcctgcatcagatgctccatttcgtagggtacgcccggcagcgagacgaccactttgccgccgcgttcgaaccacatgcccggcgccgtgccgtgcgcgttgaacaacaccgtgcagcaggccggaaccagagcctgtccgcggttgaggtcgttgaattcgatgccccgctcttcgagcatccgttttacatggtcggagacggtttggttcaggatgagttcgctgccgaacatttcggccagcgtctttttggtgatgtcgtccttggtggggccgagtccgccggtgatgattgcgatgtccgactggccgagggcgcgttccacgcacccgacgatctgcgcgctgtcatcgccgatcgagactttttcatgcacgacgatgcctgcggcgttgaggtggcgggcgatggatacggaattggtatccacgatctgaccgatgaggatttcatcgccgatagtgatgatcgttgctttcataagcggtgtttttgactcaggactccggctgttctgctccggcttgctctgcggaaagctgttttgtcgcgggctgttccgccgcagcctgctgcactgcgggctgttctgctgtcgcctgcgccgctgcggccttttccgctgcggctttcgcttcggcgtcggcgacgagggcgcggcagatgtcacgcaccagtccgggaccgttgtagatatagccggtgtagagctgcaacaggtcggctccggcgtcgagcatcgctttcgcgtcgtcgggggtcatgatgccgcccacgccgatgatcggaaaattgccgcccgaacgggtgtggatgcggcgcacgacctccacggcccgctgcgtgagcggtgcgccgctcagccggccgctgccgatcttgtcgagcgtcgtgcggctggtgtgcagcccttcgcggttgtgcgtgccgttggtcgccacgatgccgtcgaggggcgtttcgagcagaatgtcgctgatttcgtcgatcacggcgtccggcatgtcgggcgataccttgagcatgatcgggcggtattggttctgtccccggcggaagtcgaacagcgggtcgagaatccgcaggatatgttcgcgcgtatgcgtcgcgccttcgcggcacgagttgtcgcagctgatgttcacagtgaagtaatccgcgtactggtagaggttgcggaagagtttgaggtagtcggccgcggcgttttcggcgagggtagcggtgttgcggccgatgttgcagccgacgatgaatccttcgtggggccggcgcaggtgctggatggtcttttcgagaccgcggttcgaaagcccgatgcggttgatgatcgcctcgtccttcgggagccggaagacgcgggggcgggggttgcccgcctgcgggcgcggcgtcacggtgccgacttcgacgaatccgaaaccgagggccgccagttcgcggaacgcctcgccgttgcggtcgaaacctgcggccagcccgacggggttggcgaatttgatgccgaagacctcgcgttcgagcgcggggtgttccacggcgtaacacttgcggagcagccaccgtccgccgggaatcagcccgatggcgcgcagcagtatcagtacgacgcggtgcgcccgctcgatggtgagcgagaagaggatgggctttatgatgctacggtacatggtctcaagtggcggtttcgcttatggccgcaaaggtactaaaaaagaattgatttcgctaaaagtattcgcggcggtagcggtaatggtcgcgcatcggctcgaaatcctccggccgggccttcaggctgcggctctgggcctcgatgtcgaacgcgcccccgatggtggtgcaaagctcctgccacgaaatcggccggggcgtcgaaggggcggcctgaggcgggtaccatccggcgaggggcaggccgaagaaacgggccagcgtatcgaccgacatggccgtggcattggctttgccctgctcggaatagcccgcgatgtgcggcgtggcgagcagtgtgcgggtgagcagccggcggtcgatggcgggttcgtgctcccagacgtcgagtacgcaggcaaggccacttcgcagcagggccgcgccgtccacgacctcgccgcgcgaggagttcaggattacggcgccgggtttcatccgtgcaaaaagggcgtcgccggccatgcggcgcgtcgtgtcgtcgagcggcgtgtggaacgtcaggatgtcggcttggcgggcgacctcctccagcggcaggaagccgcagtgttcgcgcgcctcgcgcggcgggtcgcagcagaggacccggaaaccccatgtttcggcatactccttcacgagcgatccgacgtgtcccacgccgacgacgcccagcgtacgcccggcgggctgccagccctgcgtgcgggcgaggtgggccagcaccgcccccgcccattggagtacgcctctggcgttgcagccggcggccgtgcagacgcggatgccgtgcgccgcgcaccacgccgtgtcgatgtggtcgaaaccgatggtcgccgtggcgatcagacggacgcgggagccgccgagcagccgctcgtcgcagcgggtgcgcgtgcggataaggagggcgtcggcgtcgcgcacctcctccggcgcgatttccgcccccggaagataacgcacctcggcccacggttcgaggaccccctgcaggaagggtatggcgctgtcggcgatgattttcatggctgatggctttttcctgatttctactctttacgggaagcaaatatagggaaaaattaaaatttttgtacctttgacatttaaaacggatcttatggaacagaaaacgttcgatcccgacggggtcggtgtggataacgggacctatttcgggctgcctttcgaaccggagacggccgagctggtgatcgtctcggcgccttgggacgtgacggtatcctacggggcggggacggcttacgctcccgatgccattatcgaggcctcgacgcagctcgatttccacgaaccgctggctcccggcgcatggcgccgcggcatcgccacggccgacgtggactattcgctgctggacgaatcgcagcgcctgcgcggcgatgcggcgaaggtgatcgacctcctcgaagggggcggcagtcctgaggacgactatgtggtgcgcaaaatctgccgcgtgaacgaagggtgtgcggccatgaacgccaatatcggggcgcaggccgcgcgctggctcgatgcgggaaaactcgtcgggctggtcggcggcgaccattcgacgccttacggcctgatccgcgcgctcggcgagcggcatgcggagttcggaatcctgcatatcgacgcccactgcgacctgcgggacgcctacgaggggttcgagttttcgcacgcttcgatcatgttcaacgtgctgcgcgacgtgcctgcggtgacgaagatcgcccaagtcgccgtgcgcgacttcagcgagcgggaggcggcgctggccgcgtcgtcgggccgtgtcgtcctgttcgacgatctgtcgctggcggccgccgggtttcgcggcgaaacgtgggatgcgcagtgtctgcgtatcgtcgaaacgcttccgcaggaggtctacgtgagtttcgacatcgacggactctcctacgagaactgtccccacacggggactcccgtcgcgggcggactgggtttcaaccaagccgtctggctgctggacaccctcgtgcgttcgggccgccgcatcgtcgggttcgacgtggtggaggtcactccggcccgcgaggagcggatcgacgccataacgggcgcacgggtattgtggaagttgtgtaatttaactttaaaatcaaacgttcgataaatgcgactattttcgatgtaccgctgggtgcgcgagcgccacatgatcggtatacgcggccgtaatttcatggaggccccttgggccgggggcatcgtgctgctcggatgcgtgatcatcgccatgctgctggccaatctgcctgcgacttcgctctattaccgtcatctgctggagaccgacctctcgctgatggtgcatagccccgacgggctgatcgactgggtgttcccgcgcgggatgaccgtcgagaaactgatcaacgacggcctgatggtgattttcttcttcgccgtggggcttgagataaaacgcgagatcgtctgcggacagctttcgtcggccaaaaaggccctcctcccggtgctggccgcggcgggcggcatgctcttcccggcgatcatcttcaccgccttcaaccacggtacgatggccgccaacggctggggtattccgaccgccaccgacatcgccttcgccatcggcatcctctcgatgctcggcgaccgggtccccgtgtcgctcaagatattcctcacggcgctggctatcgccgacgacctcggagccattctggtcatcgcgctcttctacggcgggcaggtgcagatcggatgtctgctggcggcgctggccatcatgctcggcgtctacttcatgaaggagatgggcgagaagcgcatgttcttctatctggtgccggccgtggtggtgtgggggctgttctactattcgggcgtccactcgaccatttcgggcgtggcgatggccatgctgattccgatgacgccacgctacagcaaggagtatttcgtgcacaagatgcgccacctgaaggcgctgatgctcgccgccggcacttcgggcgacgatttccccaacgaaaaccaccggttctacctgcgccgcatgcgtaatctcgcggccgactcagtgggcatgagctaccggctggagcatgcgctggcgccttcggtgaccttcctcgtgatgccgattttcgcgctggcgaacgccggggtcgagatatcgtcgctcgaatacctcaatattttccatatgtcgcccgatatcggatcggtggggatgggcgtcttcttcggactgctcgtgggaaaaccgctgggtatatttcttgcgagctggggcgccgtgaagtcggggctggccgaactgcccgaaggggcgacgtggcgcatgctcttcgccgtggggtgtctgggcggtatcggattcacgatgtcgctgttcgtcgatgcgctggcctacaccgaaaccgacctgatcgaccggggcaaaatcgcgatcctgatgggctcgacggccgccgccgtcgcgggcagcctgctgatactgattttttcgaaaaaacgaacctgatatgcgtaagacattagttgtcctgacggccgcggcgctgctggccggggcctgctccaaaaagacgggcgggggcgtgaagctcaagaccgacaccgattcggtggcctatgtgatcggtatgaacgtgggcatgaacctgatgaagatggattcgacgatcaacgtgaacgccgtatgcgaaggcatccgcgacgtgttccgccaagggaccagattctcggctgccgacgccgaagttttctacctgcgctatatgaattacgcgctgccggagaaagcccgcgcctacgaggagcagttcctgcaggatatcctcaaggcgaaccgcaactacgcccgcaccgcatcgggcgtgacctatacggtcgaggtgctgggcgatcaggagcagatacccgcttcggaccgcgacagcatcgcgctccgctacctgatccgcactgccgacgggcaggaagtctactcatcctacgagcggggcgatacgctgcgcacgacgctcggcggcctgctcaagggcatgaaggagagcgtcaaactggtcggcaggggcggaaagatcaacgcgtggattc

SEQ ID NO: 380 - DNA, 15003 bp, unidentified
  source 1..15003: mol_type = unassigned DNA
ttaagcctgctttgcagcagcctcagccttgatgcggccgatctcagcctggatctcttccatcttctccttggtcaggggatagaagtgcatggcaacaacgttgcacagccagccaacgatgggcagcaggacaaagcagccgatggttgcccagaagatgccgtcagagtacggagtcagggtgtcgggcagagcgtccttgaagccgaccatggagtagaacagggccaccagagtggttgccagagaagagaccagcttatccacaaagctgaacagggtacccatcaggccggggacgtacttgccggtacggtagacttcgtagtcggcgcagtcagcggtcatggtgataacgatggaggaggacagagcctgcacaccacgccatgcgatgatcagcaggatgaagatcaggccggtagcagtccagccgttgaacagggtgccccaggtgtcgggacggatgatacggaatgcaggcagcgcaaacttggtagcatcgcccttggggttcacaaagaccaggaacagggtgatgatgacagaaccgatgatgccgccataggtaccggtcatcatggatgccttctggcccatctgacgtgcgatcttgttcatcagcaggatggagatcagagcgatggggatagaggtgatctgagagtagctggagaatgcggcatagttgccgaagatgatgccgaacaggcagatcataacagtggagttgctcatggtggacatgaacagcttatcggtagatgcggagaccaccagcatctggatggcgcggttgtgagccagggtgtcaacgtaatccttcacgccgaccttctgggcggtgcccagaccgaagtacttggagttatccttacgccacagggcaatgatggcgcagactgcaaacactgcagacaggccgccgaacatcagctgcatggtggtgaacaggccggggttgtagaaagcggacaggctgccgccggacttctccacgatgcctgccagagcggggttctgtgccaccagagaagcgatctctgcagcgttgttctcagcagtcagggtgaacttgggaaccaggctgtcggtaacgatgacagggatgacaatgttcatcaggatgatgttgtacacggtatcgcacattgcgaagatggggcgctgcttgggatcgttggtcaggcaggtctgagcagacttggtgacaacgcactggcaggtgtagcccaggatgtagatcatgtagatgatgatgaacgcaacaaagcggacaccagtgcccatcttggggatgaagttgaacatcacgaaggtggtgacgaacatgatgatctgaccgatgacaatgaacggacggtttttgccgaacttgccgttggtcttatcgaccatcataccaacgaacgggtcggtgacaccgtcccagatacgcatgatggtaacaatggaaccggccagcacggatgccagaccgacgataccgatcaggaagtagctgatgtaaccgaccaccatcatgtaggtgttggtggaggtgttgttcagagcgtacatcatgatctcccacattttcgctctgtggatgccgttttcttcaagcggctgtttgacctttgccatagagaagctctcctttcaattctgcggccggtgtgctgccactcactccggcctttcattcggtcccccgtgggctgcggctgccacatcgcgaaccgggggatttttatgtatacattatgaactatccatcaaatttctgttagtaaaattttgtgggaaaacaggacaattttactctccttgggcgaaatcaacagttttaaaaaacagcgttcgtcattttgcacatgattgcaagatactagtacagcacattccacaaaacagacttgtattccaaccgcgcgcaaaaaaagaatacaaggaaagtgcggaaatatccaaaaaattttctagttgttccgcgcggcggcctattataataggtatagcatctgcggctctgtggcatgggccgctgcgttcaaaagaaaaggagaaaacactatggcagtgaaagcatccgagcgtgtaaagcgctaccagaaccccaacggccccaccatcagcaccgtggagcgcaaggtcatcgagcaggacggcctgtatttcaaggacatcgacggcaccggcaccgtcagcgcagtcaacgactggcgcttgaccccagctgagcgcgccgaggcctatgtcaaggttctgaccaccagcgagaagatcggccagatcttcacctccgactggcgcatgggccccaagtatccttccccccgtctggcagccaacggccacaagcccgtggcggacgaaagcggcctgctggacgaggcacccgtgaacgtctccgacagcatcttcggctcccagtccctgcccagcacctctgacatggtcaagaagagcttcaaccgccacgtcatcctgcgcgagagccccacgcccgaggatctggcagattacctgaaccagctgcagtacctgaccgagacctgtgatcactttgttcccatgcaggtcatgtccaacagccgcaacgagaacggcgaggtcgtgttcggcatgaacgatgccaccggcgtgtttgccacttatcccggcaccctgggcattgctgctgccgtcaagggcaccgcacgcatcgacatcatcgacaagttcgccgacaccatccgccgcgagtggaacgcctgcggcctgaagaagggctacatgtacatggccgactgcgtcaccgacccccgttggcagcgcaccttcggtacctttggcgaggaccccgcactgatcgaggagatcttcgaccacctgatccccggcatccagggcggcagcaacggcgttacccccgagggtgtttccatgactgtgaagcacttccccggcggcggtgcccgtgagaacggctttgacccccactatgcagcaggccagtggaacatctacgccacccccggctccctgcagaagtaccacatcccggcattccgcgcagccatccgccacaatgccgagtccatcatgccctactactccaagcccagcgccgagaagagcgctccgcaggaggacttcaacggcaaccccatcgaactccagccctacggctttgcctacaacaaggtgttcatcgacggcctgctgcgcggccagatgggcttcaagggttacatcaactccgacaccggcattgtccacaacatgtgctggggcgttgacatgctggacgagcccgagcgcatcggctatgctgtcacccagagcggcgtggacctgatctccggcctgctggacaacgagctgggcgaggagagctacgcccgcggcaccaacgactactacgacacccacgcagtgcccgccggcttcaagaaggaagatctggtgctgaccgatgccagcctgaaccgcgctgtcagccgcaccctgaccgagctgttccgtcagggcatgttcgaggacacctacgccgaccccaggaaggccgccgaggtcgttgccaccaaggccgactgggaggaagcttcccgcgtgcaccgcgagtccgttgtcctgctgaagaacgacggcaccctgcccctgaaggacggcaccaaggtctacgctgaggcctttggcaagagcgccgaggccggtgaggccgccaccaaggccctgcgcgagatgctgggcaatgtcactctggtggacacccccgatgaggcccaggtggccctgctgatggtcagcccccagtccggtgcatacttcaacgccaccccgggctacctggagctggacatctgcgaggacaagactgtctgcaacgtggatgagagcggcaagcccaccaccgagacccacaaggagaccactctggtgggcgcaaaccgtctggccggtatcgctgctgcggtccacgcccacggcggcaaggtcgtttccaacatcaactgcccgctggcctgggaggtcggcaatgtggaaaaggtctccgacgctctgaccgttggctttgacacctacccctccgcaacgctggatgtgatgttcggccgctttgctcccgttggcaagctgcccctgaccctgcccaagggcgacgaggtgctggctgtgaacgcggacggtgtctgcatcagccccaacgacgtgcccggctttgcaaaggatgcctacatgcccgacagcatgaaggacgagaacggcaaggcttacgcctaccgtgatgccgcaggcaactactacgagatgaacttcggcctgacgttctgagggcagccctctccgtcttgctcaaaccaaaggagacactttccatggcacaaacgcagaaaaaacagcaggatatgggcacgggtgacgtgaaaaagctcctgctccagctgatgatccccgccgttgtggcgcaggtggtcaacctgctgtacaacatcgtggaccgcatttacatcggccacatctcggggatcggcgcggcggctctgaccggcgtgggcctgtttacccccatcctgatgctcctgaacgcctttgccatgctcatcggctccggcggcgcgccccgcaccgccatcgccatgggccagggcgacaagaagcaggcagaaaagatcgtcagcaacagctttaccatgctgctgctcttctcggtcgtcctgaccatcgtcttttacgccgccgcacccaccctgctgcggctgtttggtgccagtgacaccaccctgccctacgctctggcttacagccgcatctacattctgggcaccatctgcgtgctgatcgtgcttggcatgaacaccttcatcactgcgcagggctttgccaagatcagtatgctgaccaccgttatcggcgcggtcatcaacatcgtgctggaccccatcctcatctttgggctgggcatgggcgtaaagggtgctgccattgccaccgtgctgagccaggcagtgggtgccatctgggtcatccgcttcctcaccggccccaagaccatcctcaagatccgcaaagaggacatgaagctggaagggaagatcatcatgcccgtgctggcactgggcatttccaccttcgtcatgctctccaccgagagcctgctgtccatcagtttcagctccagcctggcccgctacggcggtgacgtggccgtgggtgccatgaccgtgatcaccagcgcctcccagctgtgcaccatgcccatctcgggcatctgccagggcggccagccggtgatgagcttcaacttcggcgcaggcaagaaagaccgcgtcaagcaggcattccgcttccagctgatcctctgcctgagctacaccaccatcttctggctgctgatgatgctggttcccggtgcagtggctggcatcttcacctcggatgcctccctgatcgattacaccacctgggccatgcgcatctacatggcgggcatcttctccaccggtgtccagatcgcctgccagcagagctttatggcgctgggtcaggccaaggtcagcctgctgctggcctgcctgcgcaagctcatcctgctcatcccgctcatcttcatcctgccccatgtggtcgcgaaccccgtgttcggcgtgttccttgccgagcccgtcagtgacatcatcgccgctgccgtgaccgccaccaccttcttcctccagttcaataagatcctggacaagggcgctggcagggtctgatgccttgtccgcctgaaaataatcatccgtatcaccacaaccatctgatcaaaaaaggagtatcctcgtggaaaagaatgttctgaacaccgacctgtccggcaaggttgccgtggtcaccggtgccagcggcaccctttgttccattttcgccaaggctctggcccgggcaggagccaaagtggctctgctgggccgcaacatggagaagctgaaggagctggccaatgcgatcgaggcagaaggcggcgtggccaagggctacacctgcaacgttatgaacaaggccaactgcctgcaggtggcagaggaggtgatggcggatctgggtccctgcgacattctggtgaacggtgccggcggcaacaacccccgggccaacaccgacaaggaattcttcgagatggcggatctggacgatgacaccgtgaccttcttcgatctggacgagagcggcgtggagatggtgttcaacctgaacttcatcggcaccctgctgcccacgcaggcctttgcccgacagatggtgggccgccccggctgcaacatcatgaacatctccagcatgaacgcctacctgcccctgaccaagatcccggcctactccggctccaaggctgccgtcaccaacttcacccagtggctggcagtgcacttcagcaaggtgggcatccgggtcaacgccattgccccgggcttctttgccagcgagcagaacgcacggctcctctacaacgaggacggcacccccaccgcccgcaccgaaaagatcctggctgccacccccatgggccgcttcggcgacagcgaaaaggatctggtgggtgccctgctgttcctgctgaacaacgaggctgccggcttcatcaccggcatctgcctgcccattgacggcggcttctccgcctactctggtgtctgatgagggccccggcctgagctgcagaccctgagagaaacaataagagccccggagctgcagtttccatgcagctccggggctctttctcgttttttacagaccggccagcaggatggccagcacggctttctgcacatggagacggttctcggcctcgtcaaagatctcgtcggcgtgctcttcaaagacagcggtggagatctcctcgccccggtgcgcaggcaggcagtggaggagcatggcatcgggctttgcgccctccatcagcctgctggtcacctgaaagcccgcgaagtcccgcagacggcgctcactttcgggggtgccgggggccgtgttccatgcggcggtcaccaccacatcggcatccttcacaccctcggcggggtcggtgagcaggtggaacttttcgccatacttgtgggcgaacatcagcacgtcggcggcagggcggtagccctcggggcagacacaggtcacacgcatccctgccagcaggccgcccacgataaggctgtttgccatgctgcagccatccccgatgaagcagagcttctggccctccagcgtgccccggcgctcccggatggtcatcaggtcggccagcacctggcagggatgggcgtagtcggtcaggccgttgatcacgggcacaccggccagctcggcaaactcttccagatcgcactggcggtaggtgcgccagaccacgcagtcgtagtagcggcccagcacccgggcggtgtccttgaggggctcgccccggccggactgcagctcggtggcggcgttcatgtaattgcccagaccgcccagctggtagacacccacctcaaagctggtgcgggtgcgggtggaatttttggagaacatcagcgccacgctcctacccttgagcagcgccggggtcgtcccggccttctgctctgccttgagctcctccgccacatcaaggatgtggtggagctcagcgggggagaggtcgctcattttcagcagatgtttcatgcctgctcctttggagccttctgctccatctcggtcagcacctcgttcaggatgcccagagccttttccacatcgtgggcggtcagggtcagcgggggcagcagacgcaggcggctcttggccgtgagcaccagcaggcccttttcgcggcaggcagccagcacgtccgcggcctggatgccgccaaagaactcgatgcccaccatcaggccaatgccggaaaggttcttgaccatgggcagcttggccagaccagcacgcagctggacggcccgctcactgacattggccaggaagctctgatccatccgatccaccaccacattggcaccggcgcagaccaccgggttgccgccaaaggtggatccgtggctgccggggcccatgccctcggcggtcttttcgttcagcagaacggcaccgatgggcaggccgccgcccaggcccttggccagcgtgacgatatcgggcttgaggttgtagtgctcacagcacaggaaggtgccggtgcggcccacgccggtctgcacctcgtccacgatgaggacaaggtccttttcatcacagagggcgcgcacagcctgcacatactcagggtccagcgccatcacgccgccctcgccctggatcagctccagcataatggcgcaggtatggcggtccaccagttcccggaggccttcgatgtcaccggcggtggtatagacaaaaccctcgttgaaggggccgaagtagttgtggaacacctcctgaccggtggcggtcagggtggcaatggtgcggccatggaagctgttgaccagcgtgatcacaacatcgcggcccttgccgtagtgatcaaagctgtacttgcgggcagccttgatggcaccctcgttggcctcggcaccggaatttccaaagaacaccttgttcatgccggtgcgcttgcacagctttttggccagcttgccgcagggggcagtatagtaaaggttggaggtgtgctgcagcttgtgggcctgctcggagacagcctcggcccaggtcaggtcgcagtagcccaggctgttcacgccgatgccgctggtgaaatccagatacttctggccctcggggccctcggcatacaggccgtggcccttttccagtgcaatggggttgcggttataggtgtgcaggacatattcgttgtcccgcttgatgactttttcggaatccatagatataccctccttggttagcgtcctcgccctctcagtctcgcattcgctcgccagcccaggttgtggctcccagcagctgcttcgtgcaattgcactcgcaccttgctggccactgccccaacaactcctccctcaatccgccactggcggcggtcgtcgtcgttgcccccaaagggggagcctattcatctttattatatcgcccgatataattttcagcaagccttattcctgatggctgcggcggtagaaccgggtgccggagccccggttggagaacagctccagcaggatggagtggggcacacggccatcgatgatgaccgcctcgtggactccctgatagatggcatcggccatgccgccgattttggggatcatgccgcccgcaatgatgccggcagccttgtagccctcgatctcgctgacctccacctcggggatcagggtagtctcatcgtccttatcccgcagcaggccggcgatatcggtcatggaaaccagcttctcggccttgagggcaatggcgatctgtgcggcagcggtgtcggcgttgacattataggcctggcccagatcgtccatgcccaccgttgcgatcacggggatatagccgccatccagcagggtagagatcagggtggggtccacatggatgatctcgcccacatggcccagcgcggggtccagctcggtgcagcggagcatctggccgtccatgccgcacaggcccacgccgcggccgcgcagctttgccacaaggtccttgttcaccttaccggccagcacctgctgaacgatctccatggtagcgtcatcggtcacgcgcagaccgttgttgaaatggctctccacgccgacttttttcaacatctcgttgatggccgggccgccgccgtgcaccagcaccacccgcacccccagcagggtcagggtgacaaggtcgttcatcacggcgtttttcagcgtctcgttgatcatggcgttgccgccgtatttgatgaccatggtcttgccatggtatttctggatgtaaggggtcgcctccgaaaacaggagggccatttcttcgtttttcatatactctccttgccgccagcacacttgctccggcattcattttccaccagacaaactccttccgtcatcgctgcgcgatgccacctccctcaaagagggaggctttcagaccccttccttgagggggctgtcgccgcaggcgactgggggagttttatcaggtccgataatccccgttgatcttcacataatcataagtcagatcacagccccatgccttggcgctggcatcgccggtacccatatccaccttgacaaggatatcatgctccgccagaactttggcagcctcgtcctcgctgtaggggtggtaggcggcgttctcgcagacatagacctcacctgcggcactgctcagccagacacagaccttgtcgatggagaaatctccgggggtgtagccgatggcgcagaggatgcggccccagttggcatcgcggccaaagacagcagccttgaacaggttggagcagaccacgctgcggctgacggcacgggccgttttcaggtcgggggcgtgggtcacctcgcaggtgatgaggtgggtggcaccctcgccgtcaccggcgtgctcggcgcacatgtgctcagcaatggcggtcagggccgccacaaaagcatcgtagtcggcgttctcttcgcagatctcggggtttccggccagaccggaagccatgatgatcagggtatcgttggtggaggtgtccagatccacgctcatctggttgtaggtaccgggcaccacggtcttgagggccttttccagcagagcgggggaaacggcggcatcggtggtgtagaaggccagcatggtggccatgttgggggcgatcatgccgctgcccttgccaatggcacccacggtgcaggtcttgccgcccagctcaaactggatggcgtactcctttttgtgggtatcggtggtcataatggccgtggccgcatcggtgctgccctgcgcagtggccgccagctttgcggcagcggcagggattccccgggcaaaggggtcaatgaccatgggctggccaatgacaccggtggaggcgggcagcacatcctcggcagggatgtgcagtgcctcgcccaccagcgcacagcactcctcggccagagccacgccgttggcggcgcaggtgttggcgttgccgctgttcacaaggatggcctgtgcatagccgtccttcaggtgggcgcggtccaccttgatgggcgcaccacagaccttattggtggtgtagacaccggcggcggcacagcgcacctccgccttgatgagtgccagatcgtatttttcattatggtttgcgcggatgccgcaatgcacgccagccgctgcaaagcccttgggggcacagatgccgcccgcaacttccttatactgcataacgattttcctttcccacaaagaaatactccctcagtcacggcattcgccgtgccagctccctcacggagggagcctttgcgtaaccgtcagctgcaaaagcctccctcttcgagggaggtggatgcaaacaccgtgagcagacgaagggagtttttattccaacccctgggtctccggcagacccagcatcagattcatacactggactgccgcgccggacgagcccttgcccagattatcaaacagggagaccagcatcatctgatccccggcggcgttcacggtgctgtacagctccatgcggtcggtaccggccatggcattggaatacaggccgttctcgggcagcggctcgttcagggcgtgtaccttgatggtggcggcatccctgtaatactccgccagccctgcggccaccttttcggcaccgccccagaccggctggaagggcaccagcacctgcatcccgctgtaataatcgcagaccacaggcacaaaggcgggcgggtttgccagcccgctgatcttctgcatctcgggcagatgcttatgggcaaggctcagaccgtagctcttgggtgcatccagcttgctgtgggccggacggtcggggctttcgtaatcagcgatcatctttttgccgccgccggaatagccggaaataccggtgcagctgtaaaaatcacccgctccggcaaggcccagctccaccagaggccgcatgatgctgataaacccgctggcatagcagcctggcaccgccacgcggcaggcgtttttgatcttttccttctggcccctgagttccgggaagccgtagacccagttgggatccgtgcggaaagccgtggaagtatccagcaccttgacatccggacggagcaggggcatgacctctctggaggcggcatccggcaggcagaggaaggcgaggtcagccgaattgatgacctttgcccgctcgttcacgtccttgcggccctcctcggagatggagagcagttcaatttcgggccgggcagccagacggtcggcaatgcgcagacccgtggtgcctgcggagccgtcgataaagacctttacgctcatgcgttgttcgcctcccatgcggccagctggtccatggccagccggatctggttgttgacgcttgcctcgctggggccgccgtagctggtgcggccctcacagcacttgatgaggtcgatggcatcatagatatcgttctcgaacagggcgctgtatcccttgaactcgtcaagggtcagttcctccagggtcttatcctttgcgatgcagtcggagaccatgcagccggtcagcttgtaggcatcccggaagggcatccccttcttggtcaggtagtcggcgcagtcggtggcgttgataaagcccttggcggcagcgcggcgcatgttggcaggcagggtcttcatggtgtccagcatgggggtgacggtcttgaggcacagctccagcgtatccactgcatcgaagatggcttccttgtcctcctgcatatccttgttgtaggccagaggaatgcccttcatcatcaccagcagggtgttcaggtcaccgtagacgcggccggtcttgccgcggatcagctcggtgacatcggggttcttcttctggggcatgatggaggagccggtggtaaaggcatcgtccagctcgatgaacttgaactcccagctgcaccagaggatgatctcctcggaaaggcgggacagatgcatcatgcagatggagatggcgttggccagctcgatgcagaagtcacggtcagaaacgccgtccaggctgttggcacagggtgcggcaaagcccagcttttcggcggtgaactgacgatccagcgggtaggtggtaccggccagagcgccggagcccagcgggcactgggcatccatgcgggcggtggcatcctcaaagcgctgcaggtcgcgcaggagcatggaggcgtaggccatcagcgcatggccaaaggtgatgggctgggcgcgctgcaggtgggtgtagccgggcatgacagcggtggtattctccgcggccttcctgcagatgaccttgatgagctccacgatgtaagcctgcagggtgtggctgtagtcccgcagggtcaggcggatatccagcgccacctgatcgttgcgactgcggccggtgtgcaggcgcttgcctgcatcgccgatgcgggcggtcagggtctgctccacgaaggtatgcacatcctcggcgttggggtcgatctccagcgcaccgcttgccagatcgtcggcaatggaggccagcccgctgaggatatcctcgcagtccttttcggagatgatgccctgcttggccagcatggcggcgtggaccccgctgccgcgcatatcctgcgcgatcatccgctggtcaaagcggatggaggagttgaaatcattgacgcgcgaatcgaccgccttggagaagcggcccttccagagttgttctgccatcgttattgtccctctatctcgtaaagtatctttatcttacggaaagcttttcctccgtacaacctctccgtcatcttcgctttgctcgatgccacctctcctagtaggagaggccttggcataccatcgcgttttcgggggttggcgcttcgctcctgtttgccctgcggcaggcattggctttggagcgtcagtgattattgcgaaaaataaatcttctgccaagggctcccctactaggggagctgccaagcgccagcgaaggctgagaggttgtacagagacgggcctgaccacaagcatacatttcctttataaacggcaaagccgccgcaggggaaaacgctcctgcggcggtgccgccggcaactatgccggttttggaactccgttgtgaaagtgtagaaaacacaccggagagaaagttggctttgtgtgatcccggtggatcagccgcttagtcctcgatcttcggccagctcttggacagctttgcgcgctccttgatggacaggccgaacaggttgatgaagcctgctgcatctgcctggttgtaatcctcgtcctcaccaaaggaagcggtctgctcatcgtacagggtgaacggagaggtgacaccagcgttgatcatgttgcccttgtacagcttcagcttcacatcgccagtcacggtctttgccaggctgttggcaaaagcatccagagcctcacgcagcggggtgaaccactggccgttgtagacgatgtcggcatacttctgagccagctgctccttgaggtgtgcgctctccttgtccagggtgatggtctccagaacattgatggccttgtacaggatggcaccgccgggggtctcgtacacgccgcggctcttcatgcccaccagacggttctccacgatatccagcaggccgatgccgttctcgccgcccagcttgttcaggtactccaccagctccacagcgcccatctccttgccgtccacggcagtgggaacgcccttttcaaagtggatggtcacataggtcggggtgtcgggagcctgctcagggctgacacccagctccaggaaaccggggtggttgtactggggctcgttggcggggctctccagatccaggccctcgtggctcagatgccacaggttcttgtccttggagtagttggtctcgcggttgatcttcagggg

SEQ ID NO: 381 - DNA, 14272 bp, unidentified
  source 1..14272: mol_type = unassigned DNA
atgggtgttatagattttcattcacacatactgccgggtatagacgacggcagcaggaatgtcgagacatctataggcatgctttggatgtgcaaagagcacggcgtggatactatgatagcgacgccgcacttttatgctgattcaaatactgtggagaggttcattgattcaagacagaaagcatatgataaagtcatggctgagaatacggacataccgcagattataatgggggcagaggtcgcgttctttgcaggaataagcagagcggagaaaacggacgcactaaaagtagaaggaactgatatcatgttgctggagatgccgtttgtgacatggagtgattcggtagtgcaggaagtacgagacttaattgagaagagacatttccatatcatactagctcatatagagcgattcttacagataccaggcaacaagccatatgtgagacagatccttgaactgccagttacggtgcaggtgaatgcggagacacttctggatttcagacagaagggcaaaatgctcaagatgttcaagaaaggacaggcacacatcataggaagcgactgccatggtatgcatcacagggtgccaaacttgtggctgggccgcgaggtgttggagaagaagctgggacatgaattcctggagaacatggacagctacggaacaaagctcctgaaagaacatcagatacacccataatcagcaataacaacgaaacatgtaaaagataaacagatagatggaggacaacaacatgtctaagaagacagcgataatcatcagtattgtgctgttcataatactgtgtggtcttattgtgtgcgagaagaagtggcctacagcgggaacagacctgcttatgctgaacgttctgagatagcacattacattccgaagaggtgatacatatgtcatacaggaacagaacactatcagaaaaaaagagaatatacaagaagcttggacttgtgatcacagccatactggtcgtatgcattgcactggcgatagcactcagaccgacaaaaggaaatgcatcacacaatgcatcgggcacacaggcggtcgaaggcatgatcgaggtggacggagtcaaatacgttcccaagaagaatatagaaacatatctttttatgggaatcgacaacatgggcaaggttcagaaagtcaccgattatgagggggcaggccgatgcgatgtggtcatgctgatggtcagagacctgacagatggaacatacaagacgctgagcatagacagaaataccatagtggagcaggatacactggatcccgacggaacctatgttgcaacgagcccggcacagcttgctctggcacatgagaatggtgacggaatggagataagctgcgagaacgtggtcaaggcggtgtcaaacttccttggcggccagaagatagacggatacgcagcggtgaatatgggggccataggaaccatcaacaatctggctggcggagtcacggttaccatagaggatgatttctccaaggtggataagaccatgaagcagggagagaccatcacactgaccgatgagcaggcagtacattttatccatgacagattcgatgtgggagatgaatccaacacccagcgaatgaagcgtcaggaggtgtacaaggcaggactcaaggataacctggcggcaaagtgcagcgaggataacacatatccactgaccatatatgacgccctgggagattacatggtgactgacatcagctcacagaagttctccaagctggcgctacttgttctcaaggaaaaggatgccggaacggtgtcgatagctggaacagagaccatagatgatctcggatttgtcgaggtggagccggatgcggacagccttcagcgggcgatcgtagagctgttttacaaggaatataactagcatcacacatttgatgcaggggatatagatacaaaaaaacggatggagggaatatatgaattccaacaagaaaatggctgctgtgcaggatgagaccacacatatagccgcagtgaacacatacaagaatacagaggatgatgaaaccgaaatcgatctactggacatgggaatggcgcttcttgagaagctcccatacatcatactgtgcttcctgatcggtgcggtgctgttcaacgcatttgcatacttcctgatcaagccgacataccagtcgacagccaagctgtatgtggtatcagcatcagatgattccatagtaaatctccaggatctgaacatcggttcatccctgaccaaggattacgaagacctgatactcagctatccggttctcgaccaggtcatcgaaaagctcggccttgacatggactcagaggggcttgccaagatgataacccttgagaatccttcagacacacgagtcctgaagatcacggtcacaagcactgacaagcagcaggcatgtgacattgcaaatacactggcaaacgtgtcgatagagtatctcccggataccatgagcacaagcgcacctaacatagcccaggttgcaagggtagcagaccagaaagtcggaccaagctaccttaagtacaccgccataggtgcattgcttggagcactcatctactgcctgatcgtcattgtgggatacctgatggatgacacgatccactcagcagacgacatggagaagtatttcggaatagtaccgctcacgacaatacctgagagcgaccagttcaggacagacgacacagaggatgaatttggaaagaaacacaacaggaaagagagggtcagagcatgaagaagcttaacatagagtttcaggaactcccatatgcagtggaggaggcgatgaaccgtctcaggatcaacataaagttctgtggcaagaacacaagaaagatactcataaccagcagcatgccaaatgagggcaagagcagcgtagcgatcaacctgtggaagatgctcgctgaggcaggattccctgcagtgctggtggatgtggatcttcgtaagtcagtcataaaggacagacatcacataaaggatgctgacaagcttccggatcttggatatttcctttcgggacagtccgagatggaggatgtcatctatgaaacacaggtagaaaatgcatacatcgtaccttgtatgaaccttctggagaatccatcggctcttctggaggatgctagatttgcagagcttcttgacaagctggcagagacatataggtatgtcattatagactcgccaccgcttggcagtgtggcggatgccgctcagatcgcatcactgtgcgatggcgcagctctggtagtcagagcaggtgagacatcaagaagtctcatcaaacagtcattccagcagcttgaccaggtaggttgtacgctgcttggagtcatactcaacagagcccagacaacggggagagcatacaagaaatactacggcaagtatggcaaatactatagccagtacggctatggttatggcacttacggcaaagaggctgcagccgccagcgacagcaccccgtcaaaataattcactttggatataacgccatgtatagtggcgtgcagggcgttttatcatatattcaatacaatagaactttttgggaaggaggaatttattgtgaagaatttaaagaagcttttggctatagttgtatgtatcgcaatgatggtgccaacagttgcatttgcagctacatcatcaccaactaaggtaaacgttaagtctgctacagcaaagtcgcttacatacaatgcaaagagccagacaacaacaattgttgttaacggtaagacacttaccctgaacaaggatttcaaagtcgtttcaggaagccttaaggcaacaaaggctggtacatacacagttaagatcaagggaataggtaactattcaggcgatacaacagttaagtacacagttaacgcacagcagagctacaaggctactgctgctgcaaagacatacaatgctaagaatcagacaaccaaggttacagttaagtatggtaacacagttctcaagagaggtactgattacaagattactggtgtaactagggctaagaacgctggcaagtataagattaccgtaaagggtatcaacaactacaagggtacaaagacaatttactacacaattaacaaggctgctcagaagtctgttaaggttaaggtaaatgcttctaagaagaagatcactgtatctggtgttaaggcaaaggcaaaggttacttacaagtcagccaataagaaggtcaaggttaagaatggcaagattactgttggtaagggtgtcaagaagggcacaaaggtaagaatcactgttaaggttgctgcaacaaagaactacaaggcatacagcaagtcaattatttacaaggttaaataatcaacctgctatgttaaatagttccaagccctagccggtggcgcaaaacgaatgtccatgccacaggacgttccgcgccgccagtgtgggtgataaataacagaccgtttaatgagtaacatggtttacagatgaaaaggttcagccgacaatcacacgggctgagtcatttcatgtatgaatcaacagaccgggtcatgcgggcacaaatatgaccctgacgacagaggatgaggagagaaaattatgtatcagaaaggcgcaaaaggctggctgaagcactttgacttcatgctgctggatcttatagtacttcaattgtcatttcttgtggcattccagatcagacacggcatggtaaatccgtatgcgaacagagactatctcgcgctggctatcatcacggagctggcggatatagtagccatgatatttctgaatacatatgagggcgtcatcagaagaggatacttcaaggaattcatatccagcttcaagaacggtttcgtgatcgttgcactgctccttctgtatgtgtttgtcctcaaggatacatctatatattccagaactactatactgctcatgtgggccatatacgtatatgctacatttgcagtgaggagcctgtggaagaagcatctcgagaaatatgcagagcatggcaagggcaagaagctcctggtcatgaccaccagacatgtagcagatgaagtggtggcaggcctcaaggagaagaactactccgggtttgatatagtaggagtcatggtgatagatgccaatctcgtcggtcaggagattcagggagtgccggtggtggcggattacaacaccgcagttgactatgtgagaaccgcatgggtggacgagatatacgtggatgtgcgcggagcatacggatatgcgaacaccctgatagaggcatttgtcgagggcggcatcacggttcacatgtgtatatcatccatcgtgaagacccacggcgacaagcagctcatccagaagataaatggtgagaccgtggtcacgaccatgatgaactacgcaacaccgaagcagatgctgctcaagagaacggcagatataataggtggtctggtgggcagcgtattcacgctcatcctcaccatatttataggacctatcatatacatcaagtccccaggaccgatcttcttcaagcaggagagagtgggacttaatggcaagatattcaagatgtacaagttccgaagcatgtacatggacgctgaggagcgcaagaaggaactcatggcgcagaacaccatgagcgattctaagatgttcaagatggactttgatccgagagtcataggcaacaagatcctgtcggacggcaccaagaagaagggaatcggccagtatatcagggacttctccatagacgagttcccacagttcttcaatgtgctaaaaggggatctgtcactggttggaaccaggccgcctctcatctctgaggtggagcagtacgagatgcaccacaagagccgtcttgctacgaaaccgggtatcaccggaatgtggcaggtgagcggccgaagcgacatcacggacttcgaggaggtcgtgagactggatacggagtatatagaaaactggagctttggactggatgtgaagatagtgctgaagactatcaaggtggtgcttggtagggaagggtcgaagtaagaggcacatactggaatgacaccgacgataggtcacaggcgcgtcagcgagtgtggctacgtcgttacggctcgttgtgccatgaagattagaggaaaaagaatgcactatctgcaaacagcggatgcgtagatagataatttgggaaaataattatagcggaggaatacgtatgagcatagttactttagataaaaaaacgattttagtcacaggtgcagctggttttatcggctccaaccttgtgaaaaggatctatcaggaggatccttctgctacagtcataggcattgacaacatgaatgcctactatgatgtggcattgaaagagttccggctgaacgagctggccaagtatcccacatttacttttgttaaaggcaacatcgctgataagacactgatcactgagatgtttgagatgtacaagccatcagtggtcgttaaccttgcagcacaggcaggtgtgcgttactccatcaccaacccggatgcttatgtggaatctaacttggtcggctttttcaatatccttgaagcctgtcgacattgtgagaatctagagcatttggtatatgcttcttcttcctcagtatatggttccaacaagaaggttccgtacagtacggatgataaggttgacaatccagtttccctatatgcagccaccaagaaatctaatgaactgatggcacatgcctactcgaaactctacaacattccttccactggtttgcgcttcttcactgtgtatggtcctgttggtcgtcctgatatggcttactttggttttacaaacaagctagtgaatggtgagaccatcaagattttcaactacggtaactgcaagcgcgactttacttatgtggatgatattgttgagggcgttgttcgtgtgatgaggaaggctccggacaaaaagaacggcgaggatggtctgccgattccaccgtatgcggtttataacattggtaaccaaaacccggaaaatttgctggatttcgtgcagattctgagtgaggaactggttcgtgcaaaggtgctaccagaggattacaatttcgaggcccacaaggagctagttccaatgcaacctggtgatgtacctgtgacctatgcagataccagtgcactggagcgtgacttcggatacaagccaagtacaagtctgcggactggtctgagaaaattcgctgagtggtacgctgagttttataagtaaaagaattagagggacagagaaatgagagattttaagaatttaaaaattgctgttgctggaacgggatatgttggcctttccattgctacgttgttatcgcagcaccacaaggtgactgctgtggacattgttccagagaaagtggaactgattaataacaagaagtctccgattcaggacgaatacattgaaaaatacctgacagaaaaaggactggatttgaccgcgactctggacgcgagggaagcatactctgatgctgattttgtagtaatcgctgctcctacaaattacgatagcaagaagaacttttttgatacaagtgcagttgaagctgttataaagctggttatcgagtacaacccagaagctattatggtgattaagtccacgatcccagttggctatacagcctctattcgtaaaaagttccactgcgacaatatcatctttagtccggaatttttgagagagagcaaggcactgtacgataacctttatccttctcgtatcattgtcggtacagatgtggataatgtccgtctggtgaatgcagcacatacttttgcagagctcctgcaggaaggcgctatcaaggagaatatcgacactctgtttatgggattcactgaggcagaggcggttaaactgtttgctaacacctatttggctctgcgtgttagctacttcaacgagctggatacctatgctgagatgaaaggtttgaacacacagcagatcatcaatggtgtctgtctcgatcctcgtatcggtactcattataacaatccgtcctttggctacggtggctattgtttgccgaaggatacgaagcaactgttggcgaactatgctgatgtgccggaaaatttgattgaagcaatcgttgaaagtaatagaacaagaaaagacttcattgctgaccgtgtgcttgaaatcgctggtgcttatgaagcaaatgacagttgggatgagagcaaggagaaagaagttgttgttggtgtttatcgcctgactatgaagagcaatagcgataactttcgtcaaagttccattcagggtgtcatgaagcgcatcaaagctaaaggagcaacggtcatcatttacgagccgactctgaaaaatggcgagaagttctttggtagcgttgttgtaaatgatttagaggagtttaagaagcagagtcaggccatcattgcaaaccgctatgacaagtgcctggatgatgtaaaagataaggtgtacacgagggacattttccagcgtgactaagtagaaccaaggaagattagaggagaaagtcagatgaaaaacaaagaaaatataaaggtgtgcttggtgggttcatctggcggtcatttaacccacctttatatgttaaagccattttggaaaaacaaggatcatttttgggtaacttttgataaggaggatgcaagaagcctgctcgaaggtgaaaaaatgtatccctgctattatccgaccaatagaagcctgaaagcccttataaaaaacaccaaaattgcatggaatgtgttgcacaaagagaagccggatttgattatttcctgtggtgcagcagttgcggttccattcttctacatcggaaagatgatgggagcaaaattagtttacattgaggtttttgatcgaatcgataaaccgacaatgacaggaaagatggtttatcccattgtggacaagtttgttgtgcagtgggaagaacagaaaaaggtttatcagaaggcagttaatcttggcagcatattctaagttgaggatgggaaaatgatctttgtgacggtaggaacacatgagcaaccgtttaatcggctgattcagaaaatagatgaattaaagaaagatggcacaattcaggatgatgtgattatccaaacgggctttagcacatatgagccgaagtattgccagtggagcaagttgattccatatcagcagatggtaaaaaatgtggccgatgcccgtattgtaatcactcacggtggtccggcaagttttattatgccactacagataggtaagactcctattgttgtgccgcgccagcatcagttcaatgaacatgtgaatgaccatcaagttgagttcgcaaggaatgtggcgcagagaatggaaacgattattccggtggaggacattaatacactgggagatatcataacgaactatgatcagattgttgccggcatggggcatggtatgagtagtaataatgccaagtttaatgaagaacttgagaaactggtaaacgaattgtattgaggatgaatggatgagaaaagttggaatcatgtcgatgcagcgtattgcaaactacggatcgtttttgcaggcatatgcattaaagcagctgattgaagaattgggctgtaaagtagagtttgtagactaccatgtaggcgcacccgtaattatggaaaatgctgacagcaaaaacaaatttgtccgtaaggtcgaaaaagggctggaaacttttcaatatcaggctccatttgcgcataagttgtcgttcattcgttataagcagactttttcaaaaaagtatatgccacttttaggaattacggatgaaatgaactataacccgacattggattgccttgtgattggtagcgatgaggttttcaactgcattcagaaaaattccaatgtgggttattcgctggaattgtttggaaaagataatcatgcgaagagacttctcacttatgcagcgtctttcggcaatactacattggaaaagctgaaaaagtataaaaagactgaagaagtcggagcattgttgaagaaattcgatgcgatttctgtacgagatgctaattcaggaactattgtagagcagcttactgggaaagaaccagtgtacaatcttgatccggttctgacctatgattatatgaactgctgcgacaaaatcccacgagttcagactcatgagaagtatttgattctgtacgcgtatgcaggtcgtatttctaatgaagaggcagaatggatttctgactatgcaaagaaaaagaaactaaaggtttatgcaatcggcggtattcagaaatgtgcagaccgctttgtggattgctctccgtttgaagttctggcctatttcagaaatgcagaagaagtcattaccgatactttccacggcagtatcttctcagttatcacgcatcggccatttacgacattgattcgcaagagcgtgggtaatagctatggtaatgaagaaaaattgagtgatttgctggagcggttggaattggcgaatcggatgacaacgaaaattgaagatgcagaaaacatcaatgaaaaggcgattgattacgcgaaagttgatgagcggttgaaagcacatagagaagtggcgaaggagtatctgagaaaaaaaatagagggataaaatggagaacatatcgaggataaaagagaaatgtgtgggatgtaaaagctgtgagcaaagctgcccaaaacactgtatctctatggtagaaaacaaagagggattttggtatccgtctgttgatgaaaaaagctgcatcgagtgcaaggtgtgcttgaaaaagtgtccagtagaaaatacggaatttcatcggaatgagccacataaagtttgggcgtggcgcaataaaaatgatgtggatattatgcgctctgcatctggcggtgcggcggatagtgcagcgaaaactgtactgcaaatgggcggtgcggtttatggtgctgcctatgatgagcagctggcagtaagccacattgaagtgacagatgaagcagaaagagagaaactacagtcctctaagtatgttcagtctgacccgaaagatagctacgcaaaggtcaaacagcgtttgtctgagggaaaaacggtactttttacaggaactccctgccagattgcaggtctgtatgtttttttgggtggcaatccagaaaatctatatacagttgacctgatttgccacggtgtgccctcgccgaagttcttcaaaaagtatctggaataccagaacaagaagacggctggcagagtaatctatttcaacttccgttccaaagacaagagaggttggggaacacaatacctgctaaaaacaaagacagagacaaagacaaagacaaagacaaagacaaagacactctcccttgatcgctatggaaaacattttatgtatggcgactgctatagggagagctgttatcagtgtgcttatgcgaatacgagccgtgtgggagatttgacagtgggtgatttctggggaattgcaaagagccatccgaacttcaattctccaaagggcgtgtctagtgtatttgtaaataccgaaaaaggccaaaagctctttgaaatgatgcgggttcttgcagaagtggaagaagcaacattggaagagggcgtggtgaaacagggaaatcttgtaaaaccgagtataaggccgaacgatagaaatatattttacgagaaaattgatgaggatgattttatggataacttaaaggttggtatacaaccaaaggaacggcttaaagcagtaatcccggctggggcggttagactcctcaaaaaaatgggggcaggtaacagaagataattataaagtatctgttatagtgcccttatataatgtagagcctttcctggagaagtgtgtggattctattctggcgcaaacgtggaattttatagagattattttggttgatgatggctcaactgataattctggctttatatgtgaccggatgcaacaaaaggatgatcgagtaaaggtacttcataagagcaatggcggtgtgagtgctgctcggaattcaggaatagaaatggcaagcggtggctttatttgctttgtcgatggcgatgactatgtgatgcccgattatattgaatatatgatggagcagataatcaaaaataatgctgatatcacactgacaacacagatgttcgggaattttgatgaaaaacaagttaagaaggatgaaattaaaacttggaatggagaggatgcagtagaaacaattctatgctaccaagttccaataggatgctactgtaaattgttcagagtaaagtttttaaaggatatccgttttatccctgaaatgtttataggtgagggatttaatttcaacgtgatggcttttcagaaagcagaaaaggttattgcagggaaaagaaaaaactattattatcgccgcgataatccaacaagtgccatgacaaagttctcgattaaaaagtgtgaatgtggtttatgggcacttgaggtaataaaacagaatttgacgattcattcggatcgaatccatgaggcgtgtaaatatgcaaactggagaacacactcggatttttacgatatgtgtattcttgccggggtagaaatagaatattcagaaatgtataaaaaatgcttgaaagtaacacaaaaagatgctttgagtgcattacatgtaccgatatctaaacaaaacaaattaagagcagtcattatgtggatatgtctagcagctattccgattgctatgaggtttagaaaaataaaataccatgttaatgtaagcaatcgctagactttcaatggatttgtgactgtgaggataatgtaaatgaataataaaaagattaaagtggcaatggtcacaaatcattttggaattaccggaattggaacggtaataatgaattactgtaaagcgttggacaaggaaaagtatgatttaactattcttgctggacaaccaatatcagaaaaatatgaaaaggaatgcctggagaacgatatccatttagtgacacttccatcacggcatggaaacccaaaggaccattatattgcgctgtggaaagcattaagagccggacactatgatattgtacatgatcacggtagcagttcgatgatggcaatagaactgacgattgcaaaactggcaggtgtaaaaagtcgaattgcccatagccataatagtaattgtcccaacatgaaggtgcataaattgctaaatccgtattttagaacagtttatacaaaagcactggcttgtggacaattagcgggaaactggttgtttggagaaaataattttgaagttttgccgaacggttttcatacagacgattttacattttctaaaaaggaacgagatgcagtaagaaataaattgggggtagaaaatcaattacttattggacatatcggacgcatcaacgaacaaaagaaccaagaatacttattggacatatttgaagaagtagctgcggaacgagacgatgcgcttcttcttattgtgggaacgggaccggatgaagaaaaaataaaaacttgtgtcaaggagcatccatataagaatcgcattattctatatggtgaaacagataattcaacggctctctattcggcaatggacatatttgtttttccatctaagtatgagggacttccggtagtattgctggaagcgcaaatttctggcttgccatgcgttgtatcggataagatcacaagagaagttgacttaggtgatcttatctgggaatctatcgacgatgctccaaaacagtgggcaaaggccgtgctttcagttgaatgccgatcagaaaaagaacgaatctcatatagagaaaatcatttaaaaacgatacggagttatgatattacacagtcggtaaagcaactggataagatatatgttgctctgataaatggtaagggaaaggaagatatgcaatgcctacatatgaaggactgagacttaaaatattaaaatattggcggattggttttgcggattatagaaaaaagaagctaaagtctacagactttacaataatctctaataactgttggggcggcatgatttatgaaagctacaacctgcccaaagaatctcctacggtggggatgttctttat

SEQ ID NO: 382 - DNA, 18759 bp, unidentified
  source 1..18759: mol_type = unassigned DNA
aatgtcaaaactgctttttcgtttaccccatcatcgattgtaacctaaagaattttcttaattcttcatcgctggtttttttcttttccaattaatcagtagaccaatcgtggaaataacaaaaattaatgccgatgttaaagaaataattccatcagtaaccacaaatatgataaacgtggctaatggaatataattaagaatacttttcaaaattttcatgtccaatcctcccttatatttcataataggtttttctttattttaccacatgacaaagggtattggtattgttattttcgttctttgatgactgattctatgatatttatttcttcatcagtaaggttgtattcttcgtaaagctcttggtctgtaaatatatgcttatttccacctgccttataactaccttttatgatataatctaaaaatcttaaaattttttgtaacaaaacaatcctttctacgtctaacctatgaacaaaggaggtgacagttctggattatgagaaattgtacaattcctattacttgcaagtatactcatatgtaatgacaattgtaaaaaatcaacatcaggctgaggaaattacccagaatactttttataaggccatgaccgcaaagaaggcatattccggcaaatcaagcgaacagacctggctttgcagcatagcaagaaatctggcaatggacgaatgccgaaaaagcacaaaatttacagagcttgacgaagagcagctcgaacaacccgataatatggtaaaaagcctagaaaataaagataccgctcttcagattcatcttatactgcaccagcttgatgagccctacaaggaggtctttcagcttagaatatttggtgaattgccattctcccacataggtatgatatttggaaaaacagagaactgggcacgggtaacttaccatagggccaaactgaaaatcaaagaaaggatggatagaaatgaataatccaattacacaatcaaccgatgaaacctgcaatatagttcaggatttactcccactatactatgacgaagtatgcagtccctcaagcaaaaggcttgttgaaaaacaccttaagacttgtgaaaaatgtcaaaatacatacaatgagctaaaaaacgattctattgattcaatgataaaaaaagaggctgacagtgtattaaagcaacatgagaaaaaagaaaaaactgctgcttacaaggccggagtcataatagccggattactgcttatcccaatactcatcacattcatagtgtgcctgtcaaatggcggtggtttaaatacctttgcggtggtaacagcatctatgcttcttgtagctgcaatgacagttgttccacttatggcacagcagaaaaaactgaccaaatgcataatctgcggtatttttgctctgcttttgatattcttttttgttgacagaatgtatagttcaaatgaatttatgctttggtctgttccaactatatttggattatcaattgttctttttccgtttgtcatcagaagaattgagcttccacctgctttatcagacaaaaaagctcttatcactatgctgtgggataccttatggcttttcctcacaatcattgaggtgtgtggtcatacaaacgatgttgccggaatgaaggccggctgtattatagcatttgtctttgtacttgcagcctggctcatattttttgatgcacgatatttaaacgcaaacggatttataaaatccgcaattatagttttgacagcttcggtttggacagcttttgccgatgacatatgcgagtttttaatttttggcaccagacaaatcactataaagtccgtgaatttttctgactggacttccaatatctgcgtgaatgccaatgtttacgctattgtacttgtgtccggcgttattatcgcctctatacttttcgtagcaggcggtatcaaagcatttgctaataaaaaataaattagttttctcttttatatattattacaaaacccctcccacagacttctatctgtgggaggggtttttatagtcattattcaataagtgcctacagattagcaaacaccctgtgcaagcatagcgtcaactactttctcaaagcctgcgatatttgcacctgcaacatagtcagtctttccaccaactgttgcattgtatctcttagcagcatcactgatgttagcgtagattgtctccatgatacccttgagctttccgtcaacctcttcgaatgtccatgaaagtctctcagagttctggctcatctcaagtgctgatgtagcaacaccacctgcattggcagctttaccacctacgaagagtactccgttctcctgaaggtattttgtagcctcaagagttgtaggcatgttagcaccctctgttacagatgtaacaccgttagcaacgagcatcttggcatcctcaatgtctaactcattctgagtcgcacatggaagagcaagatctaccttgtactgccatacaccgtgctcaccgttctgctttgcatgatactcagcagttgacttagcagctgcatactcagtaagacgggcacgcttaacttccttaacttccttaagaagagcaacatcaattccgtttggatcataaatccatcctgtagaatcagaacatgttacaaccttaacacctaactcctgtgccttctcgattgcgtagatagcaacgttaccagatccggaaactgctgctgtctttccctcaaggctcataccatgatctttccataatgcgttagtaagatataacagaccatatccggtagcctgtgtacgtgcaagagatccaccataggtaagacccttaccagtcagcacaccttcgtatgatccacgaattctcttatactgtccaaataagaagccgatctctcttgcacctgttccgatatctccggccggtacgtcaacgtctgctccgatatatttgcaaagttctgtcatgaagctctggcagaatgccatgatctctctgtcagatttacccttaggatcgaaatcagaaccacctttaccaccaccgattggaagtgttgtaagagaattcttaaatacctgctcgaaacctaagaacttgataatacccaggtttacagaaggatgaagtcttaaacctcccttgtatggtccaatggaattattgaactgtacacggaaacctctgtttacctgaacctgtccgttgtcatctacccaaggaacacggaacatgatctgacgatcaggctctgtgattctctcaagaatcgcattctttctgtataattcctcatttgcatcgatcacaggtcttaaagaatcaagaacctctgttactgcctgtaagaactcaggctgatctgcgtttttcttctttactacttcgagtacttcatcaacatagctcatttttatatctcctttacaaaattatttttcacatcaacaagtttattttatataaatctattgctataatcaagtaatttttgaaagttttatataaaaaaaattcattttatttattatcttcatttatattatcccagttttggtactgattctcctcatcatcggaatataccaccttgaaataatccgagagttttgcaagtgaagttataagaactttcatttcgtcatccgaaagatcgtcctttatatgctctatcatatgacggtgaaactgctcatgatgatagtatgcactctttcccttgccggtgagtgagagctttaccacacgcttatcctcctcactgcggatacggttcacgtatcccttgcgggtgagaccatctattgcctttgtcagtgtgcccagagtgatagacataagcttggctacggttccggagcgctttggctcatcgactcctattgcctctattatatgcatatcgttgatagaaatatcagaaaattcgtctgttatcagacatctgccctctatctctgtcaaatccttgaacagacacaccaataattcatttaaagtttcatctgccgtcataaatacctctttctattgccactctatggcgcaagctccccatgtaagtcctgctccaaagcctgataaaattattttttcctcatgctttatcataccatctttgcggactttatcaagcaaaatcggcacacttgccgcagaaatatttccacactgctgtaaattggtcggaaatttgtccataggctgcttaagcctcttggcaaccgactcaataatacgtatattggcctgatgcaacacatagacatccacatcatctgcgctccagccgatttcatcaagcagctcatttatagcctttggcactgtctttaccgcaaacttgtatacagcaggaccgtccatgatgacatagccaccgagtgcagactgctttccattgtcggtaaacggattgactacgggacggttgtctccgtcaagcgcctcaccgccttttccgtcagaaccctgtacaaagcccttgaaggcatcgccctcgtctgtcacaacggctgctcctgctccgtctccgaagagtacacaggtgcttctgtcgttccagtccattatttttgaaagaacctctgctcccactacgactgccttgtgaaacctgccggtcttaaaatatgcatccgctgtggcaagcccgaataaaaagcctgaacatgcggcatttatgtcaaatgccactgcactgcctgcacctatctcagcctgaatctgacatgcgagcgatggaacgattttgtctgtggatacgcttgccgctattatcaagtctatctcacttccgtcaatccccgcatcctgcagcgcactttttactgcatcacaggcaagtgaggtggttgtctcagtcgttgcaatgtgtctgtttcttattcctgtacgcgagctgatccactcgtcagatgtgtccattatggctgccaggtcatcgtttgagaccactctctgtggcaggcagcttcctgttccaactatcttcatagaatttcctttccgggactagaacttgcggaaacgcttgtatctttcctccaagagctggtcctttgtcaatttgctttctttttccaagaatttcttcatgttgcccttcatgtagtttccgattgatgaaagggcatcctcgtcggctccgccaaactcaggtattatatcatccacgacatcaagctcctttaagtcgtgtgctgtaatcttcattacctctgcggcttcctttgcacgctttccgtccttccagaggatagatgcaaagccttctggcgaaaggattgagtatgtggcattttccatcatccacacttcatttcctacagaaagagctaaagctccgccgcttccgccttctcctatcatgagacaaaggattggcaccttgatgccgctcatctcataaaggtttcttgcgattgcctcaccctgtccgttttcctctgcttccattcccggataagctcctgatgtattgacaaaggttatgatcggacggttgaatttctctgcctgcttcatgaggcgcagtgccttgcggtagccctccggtgatggcataccatagtttctctttgcgcagtcctcaaggtcttttcccttgtggacaccgataactgtaaccggctggccgtctaaatatgcgattccgcctacgatagccgggtcatcgcggaaatatctgtctccgtgcagctccataaactcatcaaagatatagtccatatagtcaaccgatgcaagtctcttaatctgtcttgcggcgctgaccttgtcccataccttaaatggcttagcctttgcctcgcgctccttcataagctctgtcggctcgtaattgtcgtctgagtgaagcgggtcaaaattggcatagcctgtggtaggtctgtgagcacgtaaaatcttgtaaagagtcttctttaaatcctcacgctcaactatcatatctacaaagccgtgctcaagctggaactctgccctctggaagccctcaggcagcttctgtccgatggtctgctcgataacacgaggacccgcaaagccgataagtgcctttggctctgcaagaatgatgtctccaagcattgcaaagctggctgtcacaccacctgttgtaggatctgtgagtacaggcacatataaaagtcctgcctctgaatgacgttttgctgcggctgaggtctttgccatctgcatcagcgaaatgataccctcctgcattctggcaccgcctgaacagcagaataatataaccggaagtctttcctctgtggcacgctcaaatgcgcttgtgattttctcaccaaccacatggcccatgcttcccatcataaatcttgaatcaattacaccaagcactgtctcctcgccgtaaatctttgtcttaccgatgacaataccctcagaaagtcctgttttctcctgagtctttgcaattttctcctcatactcagggaaattgagaggatttcctgttgtaagctctgtaaaccatggctcaaatgcttccttgtcggaaaccattctgattctgtttttagcacgcacacggaaataataattacactcatagcagacgtatttgtgctgttttacaactgatttgagcacagtcttgccacacttgggacaaacgattgtctcaggggcatcctcttttgtttcctgtgctacaccggcatttttgccatctgcggctgttttttcgctctcagcgttcttggctaaagtctcttcagcctctatatttttatctttcttcttgaataacttcatcatgtctccttatgcaattaacctattgcaaatgtaagctccgccatacaggcaaccttgccatttaccctggcaacagccttgcccacaccgataggacccttaacctttataatctcagtggtcagctccagcgtatctcccggaaccaccttctgcttgaacttggcattattgatgcctgcaaaatatgcagtcttgcccttccactcatcctgacaaagaatggcaactgcacctgtctgcgccaaagcctcaataataagcactcccggcatcaccggatttcccggaaaatgtcccataaaatgtggctcattcatagtcacattcttcttagccacacactttacgcccggctgcagctcctcaaccgtatcaatgagaagaaacggactgcggtgcggcagaatatccataatctgctgcgtattcataattgacatatacatctatcctttctcaatttactccaaactatctacacgcttcgcgctcaataacgtggagccgggaagcgcacagtgtgttctgaatgaaaaatatgaactgtcacggcgttccatccgctcaaatagcatgaagtgctaacaccatatcacagcctgtccgtgcaaaatgccgtgactgacttcatattttttatgaggaatatactgtgtgctccaccggacctcacagcctaaatgcgcgaagcccctaaaaaagcataagctatttatttataagccttgagcagaatacttgcattatgtccaccaaatcccagtgaattgctcagtgcatactcaacaggctcctcatagctgtccttgcagtaattgaggtcaatctcctcatcaggagtctcatagccaacagtcttatgtataaatccatcctggatttccttcacacatgttataaactcaacagctcccgctgctccgagcagatgtcctatcatagactttgttgaattgattttaagatctgcagcctcatcaccgaatgcaagcttgattgctcttgtctcaaagagatcattgtgatgtgtgcctgttccgtgagcattgatgtattttacatctgccggtgtgacacctgcatcgctcatggcattggtcatggctcttgctgcacctgcgccatcctcctgcggagatgtgatatggtatgcatccgatgagcagccgtatccgactacctctgcataaatctttgcacctcttgcctttgcatgctcaagctcttcaaggataacaactcctgcgccctcacccattacaaagccgcttctgtttttgtcaaacggaagtgaacactttgccggatcatctactgtagaaagcgctgtaagtgctgtaaatcctgcgattccgataggacatacactgccctctgtaccaccggctaccatcacgtcagcctcaccgtactggatgcttctgtatgcctcaccgattgtgtttgttcctgtagcgcaggctgttacatcattgatactctttcccttgagtccgaactggatggaaacatttcctgctgccatgttacagatcataagcggaacaagcagaggattgactctgtttggtcccttttcataaagcttttgtgtctcgcgctccatagcctgaagacttccgatacctgaaccaatggcacatccaaccatgtatggatcttccttttcgatatcaagtccgctgtcatcaattgcctgctttgctgcagccacagcgtactgtgagaatggctccattctctttgcagcctttctgtccataaaatcctgtgggttaaagtccttaagctctgctgcaatgtgacatttataatctgttgtgtcaaattttgtgatgtggtcaaatccgatttttccggcctttaccgatgtccagaaatcgtccacattatttccgattggtgttactgctccaagtcctgttacaactactcttctactcatattgccattcctccgtcaacagacagcacctggcctgtgatgtagcctgctgcatctgatgctaaaaataatactgcgtttgcgatatcctttgtgtttcccggtctgccaagcggaatctgtgataaaagattctcctttgccgcatcggcaagcacatctgtcatctctgtctctacaaagcccggtgccactgcgtttgctgtgattccccggctggcaagctctctggctacagcctttgtgagtcctataactcctgccttgctggcgctgtagttggcctgtcctgcatttccgagtataccggaaactgatgaaatattgataattcttcctgatttctgcttcaagaaatagcgtgacatatgacggattgtgttgaacgcacccttaaggtttgtatcgagcactgcgtcatagtctgcctcgctcatcttcatgatgagaccgtctcttgtgattcctgcgttgtttacgaggatatctatgtgcttgtactccttgatgagcgctgttatcatattctggcactcgtcaaaatcagatacattgcactgataagaaactgcatcaccgcctgctgcctttatctctgcaacaacggcatctgccttttcctttgaaccattataatttactattacaaaggcgtgtgctgcggcaagtgtaagagctatctgtcttccaattccgcggcttgcgccagtaaccagggcatttttacctgttaacatacttttcaaaatcctccagtttgtctatgtttacgacttttacgtccctatttatctttctcataaatccgctgagtgagcgtcccggtccgatttccacaaactcatctgcaccgtctgcgataagacgctcgatggtctgctgccagcgcactgacgatgaaacctgctttgtcagataatccttgacgtctgccggtgacttcacatagtctgctgtgacatttgtgatatatggcaccttgatatcgtggatttctacactctcaagtgcatctgcgagcttttcgcctgcacccttaagcattgctgagtggaaaggtccgctgaccttgagcggtacgcatctcttggcgcctgcctcgctgcatgctgctgcggcggtatctactgctgccttttctcctgtgataacaatctgtccagggcagttatagttggctaccgataccactgaatttgtctcatctgctgtctttttgcagatatcctcaatgacctgcggatcaagtcctaaaaccgctgtcatggctccacctgtaggaactgcctcctgcatgtagattcctctttttctgacaactgcaaatgcatctgccatagtcatggctcctgatgcgatgagagcaccatattccccaaggcttaagcctgctgtgacatcaggtgtgatacctttgtcaatgattgcctgatatatagctgcctcaactgcaagcatacatatctgtgtgtactctgtaatgttgagcttgtcattttcctcaaagcataatgccggaatatccaagcctgtctgttcactggcaaggtcgattactgcctttgcatttggcattgtatcgtaaaactccttacccattcctatatactgtgagccctgtccgggaaacataaatactctcttacccattttcggtttctccttatttctgacaggataccgtaagccactctttgcaggcggcccggtatccttaaatttgcatgtaaaagtgaatactgtctatttgttcagtcccactacatcctcaatgatttctttgcaggtttcctctttctttacgaggcctgcgctctgacctgccatgacgctgccatatacggtatctccgtctacaacggcttttctgagtgcgccaagtgtcattttttcgagctcttcaaatggagctccttccttttccagcttgagatattgtctggtcatcttgtttctgagcactctgatcggatggcctgtgctcattcctgtaacctcggaatctatatccttggccttaatgaccttctgcttatagttttcatgtactatcgattcttttgcggtgacaaagcgtgtacccatctggactgcctccgcaccgagtgcaaatgctgcattgaagcctctgttgtctgcaattccgcctgctgcgataacagggatgctcactgcatcaacaacctgtggcacaagtgtcatggtagtctgtgctccgatatgtccgcctgactccattccctcggcgattactgcacttgccccgcctctctccatgagctttgcgagtgctacgcttgcaactacagggattacgatgacgcctgcttctttccacatgtccatgtactttgcagggtttcctgcgccggtggtgactacctttaccttttcctcggcgatgatttttgctatctcatcggcctctggattcataagcatgaggttgactccgaacggcttatctgtctccttctttgcagcgactatctgctcctttacccatgaagccggggctccgcctgctccgatgatgccaagtccgcctgcattggacacagcgctggcaagctcatgggttgctacccatgccatgccaccctgaatgaccggatatttgattccaagaagctttgttattcttgtctccatgtcttttaagcctctacacctttgttcttaagatactcaatgatgtcgttaactgttgcgattttctctaaatcctctgaagggatttctactccgtactcctcctcgagtgccattacaagctcgaaaagatctaatgaatctgcctcaagatcctccttgaagtttgactctaatttgatatcatcctcgtcgattcctaactgatctgctacgatttccttgattttctccaacatatttctgttctcctttttctgtgtttattttcggttttgtgtgctggtatatttgcactagtttgcatgtcaaatattttcattatcaaatcatttgacagtgaaagtatatcacattttaaatagttgtcaagtcaaagtatttttatttttcattttttatatggtacgggagcaggtgggcagaaaattacccatccaaaacgtctcctaccagcagccaagaggctgtaagaattgtaagtcaggttttctatgcctgacgcagccggcttttacgcgccgtccttggcgcggtaacgcctcgcccgtgcttccatgcacgtgcgctgctgtgtacctattacaattccaacagcctctaagcagcttcgtacaaactcattggatgggcaattttctgcccgcctgctcccttacactgtgacaataatatacaataaaaaacagactgtaattatgagtggtcagctcaattttacagtctgctctatattaatctctcaaacacccaaccggcacaacccgaactcctgactccgtggtatatgccatggttgcatttgcgcaaatcacaatcagtgccgatggttctttatatacatcacgtggatgtttttctttttccaatgctttctcattatattttaagataatatccttgaatcgcagcaaggatttttccgcttccggaatcttgttcactccggtttttatttcaataagcgcataacggccgtcctccaactgatagactgcatctgcttctacgcccatatcatctgtataatgcatcactctggcattgtgcttttcagcaaatacaagtaaatctctaagcaccatattttcaaatacatgcccaaatagatccaaatcgttgataaaatagtccggattaacaccaagcgcagccaatcctatagagggatcaacaaatatatgctttttggcagctctgatagctgttttcgaacgcaaatgcggtgtccaggcatctatatcctttacaacatacaatagctccagagcatctatatatgaagaaagcgttacatctgtaacattctgtgtggcttttacatctgaaaatatattcttgcgttttgctgtagtagccatatttctggcatacgaccaaagcagtgtccttgcccattccggatttctgtttactccatcaatcgctgatatgtccttctgataaatctgcctataataatccttagctatttcaagctttgcactgtcctttgaaagtgccatgcatctcggccatccacctctacagaccgcaaaaaacaaatcctcaagctttatatctgtggtaagtccatcaatatcatatgcttcatcttctaataatttaaacaacgatatgcttccgtttgattctcctgtctcaaacaaagtcatagggtacatcgtaacctctgttattcgtcctgtacctgtatggggtgtattaatcttcttacttgatgagcctgtcagataaaactctcctacactctccggattgtcatcgcacgcttttcttattgttccccatatctttggggcatcctgccactcgtcaaacagtattggcttaggattctttaaaaagagcttaggtgcagtttctgctactgcaagatacccctctctcttgtcttcatcctgaaattcaataacagttttacatcgttctcttgctgttcttgtctttccacatccttttggtcctgtgatgctcactgcattaaatgcctctgtttttctatctatcacatcatcaacaattctgcttatatattccataaatatctgctcccttcatggttattataccatttaattcacagattatacaaggttattttatgtttttcgagtgttttattttatgtttttcgagtgttttattttatatttttcgagtgttttattttacttttttcgaatactaaaaagagcaggacaagtatttctacctattctgctcttttttacatattttaattatttaaatatagattatctaccggctgttcgccatctgcttcacatagtcgagtgccttcttaaccggtgggattgatatcactatgattgtgataattccttctactacaagatatgagccgttgtaagtcactgaatatatgagcgcatctatcgtcttgtttcctatcgtgacaggtgcgtatgctgcaaagaacacaactcccgacagcactgcaaagaaaaatctactgggctgctccgcctccggtgttaccaccggtagctccacctgtattaccaccggtgttatctccggtatttccacctgttgtaccacctgtgttgccaccgttgttttctccggtatttccgcctgtattgccaccgttgttttgtccaccatttccgcctgtgttaccaccgttgttttctccggtatttccgcctgttgttccgtctgtattgtctccggtatttccacctgtgttgccaccagcagcatctgtcttattcgggtctgttgtggtctgatccggtgtggtggttcctgcatcaggtgtggtcacagtctgatctgtaggattattctgcgtctggtcatcggcaggtgtatcctggctgtcctgataatcatccgatatttgggcatatggcaggaaatctattggtgtaaggtcagcatgtatctgatccatgtagttcttccatatttctgccgggtaagagcttcctgtcagttttttgactgtctcaggcatatcgcagcctacccatacacatgtggtgtagtatctggtaaagccacagaaccagccatccttcttatcgtttgtggttccggttttgccggcgcaaggcatgccattgtccagattagcgctacgtccggttcctgatttcataacatctgtcatgacatctgtcatcatacgtgatgctgtctctgtatatatgacggtatccttctgcgatgatgtatatatgatattgttgtcagaatccacaatcgacttaatacatgtcggattcctatacattccatcgttctcaagtgttgaatatgcagatgccatctccagtgtggatacacctgttgtaaaacctccaagtgctgttgctgtgacatagtcatcctttacaatattggtaaaattcatatccttgagatactgtaagcctacctttggcgtgagctcatcatatagctgccatgctacagtattcagtgatttttgaacggcaaacctgatagtcacatcaccgtaatatgaatcacccgagttagacggtcctccatcaaacttgtggtcatttacgatggtatccggtgtcttaccacgctcaaatgatggtgtatacacaatgagcggcttgattgagcttcccggctgacgatggctttggaaagcacggtttagcgtatgactgaccgcatcctggcttcgtccaccaactattgcaaccacctcgcctgtgtcgttgtctatacaggttgcagcactctgcagcttaaatgtgccatcatcggtcgtgtctgtaaagtccaaaagcgtcaggtcaattgaatcctgaagctgctgttgcatagtcagatcaatcgatgtataaatcttgtaaccgtctgagtagagctttttctgacaatatgaatacatctcatcatatgaagcatcatactccttttcttcatcgtctgagtcaaagtaatacttgaacttgaagccctcattctccatgagcgccctcgtagcgcagtaatatgcataggtatccacataattgtacttgaccgtgtcatccttctcaggcatattgagggttatctcctcgtttatggcagactcatattcctgttgtgtgattttgccgtcttcccttaggtttttcaatatgagattgcgacgcgtcagtgtatgatccttattatttatcgggtcatagtacgtcgggctgttcggaatcgcacacaaaaaggcagtctgcgacaaatcaagatccgaaagctcacagttaaaatagccatggcacgctgcctgaataccataatatccgttcatgaaatagacattattcaggtagaattccataatatcattcttggaatatttcttttcaagcgccatcgctatgaacatttccttgacttttcgctgccagttcttgttcgtatccagataaatatttcgggcgagctgcatcgtgatggtactgccaccctgggtaattctcttgttttttataattgactttgcggcacgcactattgcctttaggtccacaccattgtgcttatagaacttcttgtcctcgatactgaccatgcagtttacgaagttctgtgggatatcctcatactttacatagtcagcctttttggtagtggccgtctcggatatctcatcaccgtttgtatcgtagagtgtactcgtcctcgccggtaaaaatgtgtttttgtcagatttctgcacgagctctaccgcctctgagtgaagcttcgcaaccttgtctgcatagcctccaaagtaataaaagcataatccaccgagaatcagtaccatcagaaaaatctgaagctttatgaaaaaccagaaaacgcgatgctgctttttcttctttttctttttctgttttgccatttctaaacgttacctccaaactatcggtataccattgtatatcggcatactttatagataattgacaactatatccaatatgtactgtctattatactacaatgcctctacatcagataattaataattgcttaattttctattatacctttatagcacaaaaggaagccatctgctccctttatctcgctattttacatctttattactgttgtagtcaagtaaatagttttttacaatgctttttgctatctctagccaagctggtcagccagaaattctgctgctgcacccgccagcttttcggcaatctcagacttatcggctttttcatcgtaaacacacagtataacggctcccgcgctatcaccatcatgcactattactgctattgcctgcgcttcacagtcagctttatcgtcctttaccacaggtatcagggtatcgtcttttttactgtacaatgcactttttctcttatccataatattctcgagctcttttgacaaagccttgcctatataatttttgtggtttttgccggctgccgctattatctcatccctatccgccacacataccatggctcctgttacctttgacaggctctgggcatatgcctgtgatatattcttcaggcttcccacctgcgaatacttctttagcactatcgtctcgtccgcatccatatatatttccagtgggcttccctcttttatatgcagcatcctgcgaagctcctttggtatgactattctgccgagggaatctactcttctggtcaatcctgtgattttcactttattgtcctccggttacttttttgcatttgcattcatgctttggaggtagtatatgggaatttgaataaaatatacattcgatatgcactgatacagtgctctttcataatagcttttataatgtcacggtatgttttgaatttgataaggtatctatatccgtcagctcacgctcatctgcgatatccacatatacacagtcatacttctttgccacacttctgccacccttatcaccctccagtgataaaagctgcgggataagcgatgaatgaaatacacacggattacctacggtatctccacagcgaagtgaaaaacctgatttcatatttcctttattttcaagcactttatctattaatttaatcacgctttgactttttaaatatggctggtcagctactgcaaacatgtagtagtccttcataccagtctttttctgctcctgcaccgccataattcctgcttttatggtgtaggctatgcctttttcgctgtccggacttaagactgcatggcaatccgggatacatgcgcagtagtccagtatttcccgataacgtgtaacaacggttatatctatgaccgggttattcgattctgcattttttaatttattatatctatccttaatttctatcaagtggtcaagcagatgcctgtacataggttttccgtccagctcataaaacagcttgttacttccaaaacggcggctgtttccagccgccatgtatatgatatgaatcatttcactcttaggtccttttcgtgccagtcagggtctgccattcccataagtattttctctggggtaaacggaactgtcctgtgccatacgcctgttgcgcgataaatggcatgtgccagcgcaggagccggtgtattgataactatctcgccgattgacttgactccaaatgggcctgaaggctcatagcttgtctcaaattcgacgttgatatgtcccacatcctgtcgtgtcggtatcttgtactgcatgaaatcattttctgcgattttaccaccggcattgtaggtgacattctcataaagtgccatgccgattccctgacctatgccaccctctgtctgtacacgcgcaaggtttggattgaccgggattccacagtccacgacagcctgataatcaagtattttaactgctcctgtctccttatcaagctctatctcgaccatgcctaccatgtacggtggcggtgagacaggtgatgaatatgtggcggtgacatctacaggtatcgtgttgttgacctgtgattttgttgctatatcggaaagacttacggaaactgccccattgtctgcaccgtccggatttatgatatacacctctttaccatcgaaatccacctctgatgcagcacagcccagcagctgtgcaccgattttctttatattttcacgaagctcaagtgctgcattctgtgtggccattcctgtgatgtaggtggttgatgaggcatatgaacccgagtcataaggagaagcatctgtatccgctccaaacactgttatatcatccggctcgcagtcaagtacctcagccgccatctgcgcaagtattgtatcacagcctgttcccatgtctgccgcacctatcatcatattgtaggtgccacagtctgaaagctttaaggtacacgagccgacatct

SEQ ID NO: 383 - DNA, 9191 bp, unidentified
  source 1..9191: mol_type = unassigned DNA
atgtactgcacgagaaaggtaaatgacgattacacgtgggtaggcgccgacgggcggcggctggccatgtttgagggtgtgttcgatgtacccaacggcatctccttcaacagctatctgctgagggatgaaaagaccgtactgtttgacacggcggatgcggcggtgcgccgcaccttccgggaaaacctcctccatgcgctggaggggcggtcgctggactacgtggtggtacaccacatggagccggatcacacggcggagctggaggagctggtgctgcgcttcccggaggtgcagatctattgcagcgccatggccaagaccatgatgacccaattcttcggcaccggccttcaggagcgcatccatgtggtgaaggagggggataccctctgcaccgggcggcacacgctgcgctttatagcggcccccatggtccactggccggaggtgctgatgacctatgatgagacggatcgtctgctgctgacggcggatgccttcggctgcttcggggccttgaatggccggctgtttgccgatgaggtggacttcgaccgggattatctggacgaggcccggcgctactacaccaatatcgtgggcaaatacggctctcaggtacaggcggtgctgaagaaggcggcggagctggacatcgccatgctgctgcccctccacggctttgtgtggcggaaggagttggggtatctcctgcacaagtacgacctctggagccgctacgagccggaggagcggggggtgctcatcgcctatgcctccgtgtatggcaacacggagaacgccgccaacattctggcctgccgactgtcggagcggggtgtgaaggtgcagatgttcgatacctccgtgacgcctacctcttacattctgtcggcggccttccgttacagccatctggtgtttgctgccaccacctacaatgccggggtgttcatcaccatggaggagctgctccacgatatcgctgcccacaatctccagaatcgccgggtggtgctgctggagaacggctcctgggccccggccagcggcaaggagatgcagaagatcctccagcctctgaaggggtggcagcagatggaggacacctttaccatccgctccgccctgcgggaggatcagaccatgcagctggagcggctggcggccacgctggcggcggacgtacaggctgcggccccggcggaggagaagccggaggggcagcaccggtatgtgtgcaaggtctgcggctatgtatacgagggggactccctgccggaggattataagtgccccctgtgcggcgccggtgcggagtatttcaagcaggagtcgtaaagagcgcttttccccatgaaaaaaacagcaggatggcaataccatcctgctgttcttatatcattctacggaagaagcttccaccggagcagcctccgcaggttcctcctccggctccgtccacggctccatggtagccacgcagcggttgatgttcttccccagctcatagaacttggcctcgtagtccgtcatgactcccacggggccgttggcgtggaggttacgggtcacctccgacagggtaaagccatactgggggatctcctccacggaccactggaacagcttgtcgttgtcggttttgaagtgaatctgcccgcccataggcagcacctgccggtagcacttgagaaaattgccgtgggtcagacggcggcgcttctggttgctcttgggccacgggtcgcagaaattgatgtacagccggtccacctccgccggggcaaacatatccggcagcagggcggcgtcccccaccacgaagaatacgttgtgcagccccgccgcttgcgcccgttccatggccaccaccatggcgtccggcaccttctccacggcgatgagcagaacatccggctccgcttgggccgtacccacggtgaagcgccccttgccgcagcccagttctacccgcagctcacgggcatcgggcatcagctcccgccagtggccccgcatggcgaaggggtcctgtacctgacaggcccggcaggcctccatccggggcagtagattcttctttttccgcatacgcatggtgtcgttcctcctgaaaaacgccgcatggcgatggtatccgactacccaatataccggttttccggtgaaaaagcaagaggaaacgccggaaaatctctcccggcaagggagagccgccgaagcgacgttttcgtaggacggcgcatcgaagaacaggtgcggcaaaaagctggaaaagtaccaaaaaatccgacgaaatttgtgacttcctctaaaaagcaaaaagccgggtgagaagtgcttgataaattttagacgaacgtctataatggataaggtatatgagaaggcgcattttgcgggtgaaacacccctgtagaaagcgctttttcccatgacgctgccgctgcttcggcggcggctgccacagtaaggaggaaccattgtgacgaacgtactgttggagaaaaaaggtccatatgccgtggccaccatccaccgtccggaggcgctgaacgccctgaattctcaggtgctggcggatctggcggagctgctggacaccgtggaggccgacgaggagatccgtgtactggtcatcaccggcgccggggagaaggccttcgtggcgggggcagacatcggagagatgagcaccctcaccaaggccgagggcgaggccttcggcaagaaaggcaacgacgtattccgccggctggagacgctgcccatccccaccatcgccgctgtcaacggctttgcactgggcggcggctgcgagctgagcatgagctgcgacattcgcatctgcgccgacaccgccgtgttcggtcagccggaggccggtctgggtatcacccccggctttggcggcacccagcggctggcccgtctggttggccccggcatggccaagcagctgatctataccgccaagaacatcaaagccgacgaggccctgcggatcgggctggtgaacgccgtttatccggcgcaggagctgctgcccgcagcggagaagctggccgggaccatcgccaagaatgcccccatcgccgtgcgggcctgcaagaaggccatcaacgacggcctgcaggtggacatggatcgggccgtgaccatcgaggagaagctgttcggcagctgcttcgagacggcggaccagaaggagggcatgagcgcttttctggaaaagcgcaagcacgagccctaccagaaccggtaaagctctgtcagaacgttgttttccgggcataacgtccggtgggcaaaccaaggaccctatatattctaattaggaggaatcattatgaagatcgctgtttttggtgcaggtacgatgggtagcggtatcgctcaggtgttcgccggcaagggccacaccgttctgctgtatgcttccagcacggccagtgcgcagcgccacaaggataagctggctgcttctctgaataagcgtgtggccaagggcaagatggcgcaggaggccgctgacgatctgatgagccgtgtgctggtggaggagttcgaggccgccgctgacgccgatctggtcatcgagtgcgtggctgagaacatggctgtgaagaaggagctgctgggccgtctggacgttctgtgcaaggacgaggccatctttgcctccaatacctcctctctgtccatcaccgagatgggtcagggcctgaagcaccatctgatcggtatgcccttctttaaccccgtgcctgccatgaagctggtagaggtcattgccggcggcaatacccccgctgagctggtggactacatcaagaacctgtccaccgagatcggcaagacccccgtggtggtcaacgaggcccccggctttgtggtcaacaagatccttatcccctattgcaacgaaggcgtttgcgttctgcaggagggcgttgcctctgcggaagatatcgatattgccatgcagctgggctgtaaccaccccatgggtcccctgcatctgggtgacctcatcggctgggacgtggtgctgaacatcatggatgtgctgttcaatgagacccacgacagcaagtatcgtgcaaacgtattgattcggaagatggttcgcgccggcaagttgggcatcaagtctggcgagggcttctttaagtataccaagtaaaatttcgtaaaggagaaaagagtatggacttccatctgactaaggaacagctgctcgttcgcaagatgtaccgcgaatttgcagagaacgaagtgaagcccctggccgccgagatcgacgaggaagagcgtttccccatggagaccgtcgagaagatggcgaagctgggcatgatgggcatttacttccccaaggagtatggcggcgccggcggcgacgtcctctcctatgccatgtgcgtggaggagctggccaaggtctgcggcaccactgccgttatcgtttccgctcatacctctctgtgctgcgctcccattttcgagcacggcaccgaggctcagatgcaaaagtatctgcctgacctgctgtccggcaagaagatcggtgctttcggcctgaccgagcccggcgccggtaccgacgcgcagggccagcagaccactgctgtactggacgagtccggcgagaactacatcctcaacggctccaagtgcttcatcaccaacggcaacgtggctgataccttcgtcatcatcgccgtcaccggtaagaccaccgacaagcgtggccgtgccatgaaggagatttctgccttcgtggtggaaaagaccgaccccggcttcacgcagggtaagcacgagaagaagatgggtatccgtggcagctccacctgtgacctgattttcgaggactgcgtcatccccaaggaccgtatgctgggcaagaagggtcagggcttcaagatcgccatgcagactctggacggcggccgtatcggtatcgcctctcaggctctgggtctgggcgagggcgccgtggaggaggccgtcaagtacaccaaggagcgtgtccagttcggtaagcgtatctcccagttccagaacacccagttccagctggccgagatgcacacccggatgcaggctgctcagttcctggtctactccgctgccatgaagaagcagaaccacgagccctactccatggatgccgccatggccaagctgttcgctgccgatgccgcttccgacgtgacccgtcgtgccgtgcagctgttcggcggctacggctacacccgtgagtatcccgtggagcgcatgatgcgtgatgccaagatcaccgagatctatgagggcacttccgaggtccagcgcatggtcatcgccagccatctgggcgttaagtaattgaggaggtataaggcaaaatgaaagttattgttactgtgaagcaggttcccgatacctccggtaaggtggctgtgaaccccgatggcactctggaccgtgcgtccatgcagaccatcatcaaccccgatgatatgaacgccgtcgaggctgctctggccctgaaggacgagctgggctgcaaggtcgtggccttcaccatgggtccccctcccgccgagggtatgctgcgtgagctgatggccatgggcgtggacgagggtgtcctgatcaccgcccgtgagttcggcggctccgatacttacgccacctcccagatcatcgccgccggcatcgacacctacggtgtggatgaggacgacgtcattctggccggccgtcaggccatcgatggcgataccgctcaggtcggcccccagatcgctgagaagctgcatctgcctcaggtcacctatgccggtgagatcaagaaggagggcaacaccttcatcgtcaagcgtatgctggaggatggctacatgaccgtcaaggtcaacaccccctgcatgatcacctgcatcaaggagctgaatcagccccgttatctgtccgttggcggcgccttcgaggcttacagcaagcctctggtcaccatgacctacgagacgctgaaggatcaccccctgatcgatgccaccaccatcggtctgaagggctcccccaccaacattctcacctcctttacgcctcctcagaagggcgccggcatgatgcttgagggcgccggcaaggagaccaccgacaagctggctggcattctggccgccaagcatatcatctaaggaaggagataagaaaatggcttttaatagtgctgataccgctgccttcaaaaacgtctgggttttctgcgagcagcgtcagggcaagatgatgcccactacctttgaactgatctccgagggtcggaagctggctgacgaactgggcgttgagctgtgcggcattctgctgggcgacaacgtggacggcatcgccaaggagctgggcggctacggtgccgacaaggtctatgtctacaacagccccctgctgaaggactacaccactgatgcctacaccaaggtcatcaccgacgctgtggaggagatcaagcctgagatcctgctgttcggtgcctccaacatcggccgtgatctggctccccgctgcgcagctcgcctgcacaccggtctgtgcgccgactgcacccatctggacatcgatatgcccatctacaagaacttcctgcgtgaggcttccaccctacctgaggagcgtatcgagaagctgggtaccgtgaagatcaacggtcaggatcacgatgtctcccgtgacatcaagatgacccgtcccgctttcggcggccacctgatggcctccatcttctgcccccgcttccgccccgccatggccaccgtgcgccccggcgttatgaagaagcgtgagttctgcgccgactgcgccgagaaggttgagatcctgcatcccgctttcgagctgtctgccagcgacatcaagaccgaggtggtggagaccgtcaaggctgccaagaagctggtggacctgatcggtgccgacttcatcgtgtccgtgggccgtggcatcagcaaggatgtcgagggcggcatcaagctggctgaggagctggccgaggttctgggcggcgtcgtgggttcctcccgtgcctgcgtggacgccggctggatcaccgctgaccatcaggtcggccagaccggcaagaccgtccatcccaaggtctacgtcgccctgggtatctccggcgccatccagcacaaggctggtatgcaggactccgagtgcatcatcgccgtgaacaagaacgagaacgctcccatcttcgaggtggctgactacggtatcgttggtgacctgttcaaggtcgttcccgagctgatcgagtccatcaaggctgccaaggctgctcagtaatcgatcccctttacgaatcaagaagggctgtcccgctgtgggacagcccttctttcattgcttggatcatggtcaggtggtgatatgccagtaggtgacggtatcctcgatatccatttccgccagataaccacctactccgtcagagcagaataccgtgggccagttttgataggtggcaaagtcgttgatcacaaggggatcggtctgctgcgtatccggatagaggatatgggcagcaaaggtatcgtctacatacatacagctgctgccgcttccggtcagacgccacaggggcactgcggaatcagcggtggatacctttccgtcgctgatgcggatcgtctcataggaaaatttttgagtctccgggtcacccaaaccgcacaccatgtactcgcccgttatggcaaaggttgtgacctgctgcgaaagctccttctggtacagaataccggacgcattgcagaggaacgccgtccagtaggcgtcgtttttggcagaggccaaaaaggcgaattgcgtaccattggtgcaaacggttacatcggacatggtgtagtcggtgaggttcagcacgctggaaacggcactgccgtccacacgatatacggatatgccggtatcctctgattgcagatacatgggctgaccgttcaggcagaacaacgcagggacctgatcataggaaacggcttgaccggaggcgagagtgcttttccctgtgtctgtggagcggatcagagaccatttgaggccggaatccacggcttcatagtccacgtacagagcatcggctccgtccagaacggcggagatgatataggccggggaggaaacgggaaactgcttggtggtcccgtccgaatagttccagtagagcagataatcggtattataaagggggccggtctgagccgtgttgcgatgcccgacagccaacaggacgctgttttccccgcagcactgtataagggtggcggcctcatcctcggaaagctccaatggcgaggtgagccgctgcaccgtgggggcgggaatctgttccggcgccttggagcaggcggagaggggaatggcgcatatcaggaagaaaagaatgataattttcttcacgtgggggcctcctttcgttagtgggcaatatagagaccggcatttgcgttgatggcagaattcatttcagtgtaagtgcaagtatatcggccatagtatttggaaacattattgggatcattaaaggtgagaatggtttcccgcccgccagtggagccgccctgtgcccaagaatagccgatcactacaacataatgaccgcttgcatgcccatcatagtgcggcagcttctttgtttgtgtatggcatacgatcgggtagccggcatcaatacttggaactatctttgtaccgaaggatagctccgatgtgtaaatatatgcgtatttcccgcttccgagataggaattaagaccatttgcaatttgatagacataagttccatctgaggaatttgtattcattatgctacccaacttgctttgtgtggcagtatacccaaagtactttagtaccatctgcacgctggccggtccgcagtagtagttgttttcctgcttatacagcggtacacttagagtctctgagccgctgctgcagggagcataggtattgttgatagcgtcattcgtttcagcaatgatacgctgaatttgctgcaaacgttctgggtcatttcggtctggggtatgtttgtcataaaggtcatccgcaaaggcaggagaagcgataagagagagcgccaagaggaaaaagacgaaacgataagcaattttcttcat

SEQ ID NO: 384 - DNA, 26350 bp, unidentified
  source 1..26350: mol_type = unassigned DNA
tgtgcccacggcacttgactgcttttccgtagtcgttcggaaacaggtcagccagaatatggtgtgccgcttcatgcgctatcgtgaaattccggcatccggtacagctgtctgccgcaagggcagaatcgattacgacgtccctcggcatgaatatctcgacaagctttgtaccatcccctaaagttacggtaaaaccgcatctttgaaaaacggtcagtccgaggacgctgccatcgatacatagcggcagcattttcacattcagcccaagaacagcgcttgcaagccgttcaggatcaatgggttccggggcatctttgctgattccgaagcgggtatagtactggtcgatatacttacccgctatgcgcgaaaggtctgcgcgggataagtaccttgccattacgaagcacggctttctggcatggagcagtaggcttccacgaaccacttgccccgttcgagccaaagattccgcttctgcccgcagatcatgcaagtgaagcatcggcccttcccgccaaggcgcgatgtgccatgcctgacagccaaaacgcggtcgattccgtagatatggcttttgtcgtagttgatggcaagagggcggatctttccatcaggagtaaagcgaacgtccacttcaacgtatctcttttcacggtggagcttgtagtcatcacgcatcgaggggcctccttctcttttctaagtgatcttgcggtggttttatttgtgcttattaacaccaaaaaggtgtttctgaattgattatactgtaattgattttaattgtcaactacgattttctcgagaatttttcgagacactgttgattatacgcaaagactctccacgaccctgacaacaacctactgtagcggtttgcggggcatggaaattagtctgaagaatttcttttacttttttcaatcaatatgatcggaaataaaaaggcaccggagtttccctcacatatccaaaggatacggaaggctctggtgcccatttattatgctaaagaactacgattcagtgaatctcctgctctaattcatcgaacaaggcgctggaaaagaactctgccagtgtgatatcaagaccatcacagagctttttaatggtggcgatggacacacgctgacgggatgggtcgagcatactatataccgtagatggtgttacaccggcacgggtcgctaactcgttggggcgtatcccacgctggttgcagagttgttcaaagcgtttggcaacggcatcttttacagtcatgatgaagttcacctcaacatgatagtacagaagttcgtgcagctctgtatacgcaattgcgtacatcgcaagaatgttttatgatataagaggtatgcggttgcgtaatgatggggggaatgcacatgcaaacaaaataaaaaaagtatcctccacagtgaaaagggagggccatgagcgaaatataacgttattccattagacttggcgttttcctacccctcattgacacctgatgtgaaaatatccgattcatctccctgcgctttcgggtcaggtcagagtgcacatagcgctgcaaggtgatgttggcgttggcgtgtcccaacaattcgctgagggtctttacatcacaccccgcctgcaaacaggtggtagcaaaggtgtgtcgcagcgcgtgcggacgtacttgccggacggtcgcctgtttcagatacgccttgacgcttttccgataacagcggggctctgtaggtttggattcattaccagatagaaaccatgtagaatcactggcttttccgcgcagctttttcagcataataagcagttgtttcgggattggaatttcccggcgggaggtgcgggttttgggtgtctgggtgaccacctttgtatggccgtttccacaggaaattctgcagaccgtccgattgatgttcagcgtgccgagtttcaggtcaaaatcgccccattgcaggccgcagatctcactaattcgaagccccaattccagccccagtagtaagccgattttgcgaggcgtggggttcgcctgtacatattgatgaagtcgctgctgttccgccggggagagaggcgcagaaattttgtcgatggcttttggcagcgcaacttccagctccattggacgaatcagacgtaaatgagcggcatatttgcagatacgtcgcagcatcgagaggcattcccgggcagaggaatttcccagtggcttgtgtgtggcatctacgggcgcaataatctgctgcatggcttgttcgaggaagctctcgtcaagggatgcgactggcactttactcaaaaccggaagaagatatttgtgcagcgtgtacgaataatgcgcataggtggattcttttatagcgtttttcagggagtacagccacacctcggccagtacttcaaaggttaggtcggtttgattcaggttgtagaaaaccgcctccgcttttctctggatcagtacccgtttaacctccacataggccgttccgtaaacgtaaccccactggatcttcccctccggtgtgcgcgccttgatgtacctgccttcccaccgaccgtccttacgcttgcgaatgttttctccccgtcgagccatcgctgtttagaccctcatctgaccccttattttctccatcttcgtttacagctggaattattatacagaactgggcataatacaaaaaacgatccggccttcgcgatgctttttcagggtcaaatgtgatacatttatgatgttttctattgaatcccagatataaccatgataaaataagatgagattatagacaacgatgtcaaaggaacggtatcctccattttcactgtgaaggatacccctttactgcggaaaggggtgaacaaggtggcattgcgtctgtttgagcacaacgagaaagcatatcatgcggcagtccggatgatggagcagtacggcaaggctgctattgtccaccccaccggcaccggaaagagctacattgcgttcaagctgatcgaggacaacccggagaaggtcgtgatctggctttctcccagtgaatatatcttcaagacacagctggagagcctgaaaaggaacgacccggactttccgctggcgaacgtccatttttacacctatgcgaagctgatgtgctgtaccgaaggccagcttgcagaaatcgcaggacttcagccctcttatatcatattggacgaattccaccgtgccggcgcggaatgctggggcgaaagcacggtggctttgttaaagttatgcccggaggcaaaactgctgggcttaacagcgacaaacgtccggtatctggataataaccgtgacatggccgaagagctttttgatggctgtgttgcgagcgacatgacccttggcgaagcaatcgtcaggggtattttgcctactccgaactatgtgaccaccgtctatcagtaccagaaagacttggcacgttatcagacaagagtggataatctgcgttctgctgggattcaggacgtaaatcaaaaatatctggatgccttgcgccgcgccttggaacaagcagatggattagacaaggtttttgaacatcatatcacgaacaagtccggaaagtacatcgtgttctgcgccaacaaggagcacatggacgaaatgatctctcatgtgccggagtggtttgcaaaggtgaatgcggaagtggcggtctacgaagcctactcggatgaccccggtacagacaaggcttttgccgacttcaagacggatgagagcgacaagctgaagctgctgttttgcatcgacatgctcaacgagggcgtccatgtggagggaatttccggggtcattctattccgaccaacgatttcgcccattatctacaagcagcagatcggacgagctctaactgctggggacaccgcagccccgctgattctggatgttgtcaacaattttgagggattgtgcagcattgcgggcctacagaatgagatgcaggaggcagtctaccgcctgaatgccaacggtgagggcgataggatcatcaccgaacggtttgaagttgtcgagcaggtgcatgactgtcgggtgctgtttgagcggctgcaagcaagcttgtcctctggttggaaccattatttttcggaagcaagcatttactatgcggagcatggcaacctgaatattccaaaacgttataccactcctgcgggactgagtcttggcgaatgggtcattgctcagcggagaattcgggcaggacagcgtaccggaattctgacgcaacaacaaattgcacgtctggacagtatagggatgcagtggagcagccggagtgatatggcatgggatcgcggactagaagcagtgaaaaaatatagagaacagtttggtaatctgcttgttcccaaaaaatatgtagacgatgctggttttgcgttgggacattggatcatcaatatgcggagaagttacattgatggaagattgtcgcaaaaacacattcaagagttaaatgaactaggcatgagttggaatgctttcgatgcaaagtgggaacaaggctatggacttgctgttgagtacgctgcagaaaatggcaatttgaatgttccggtgagttatgtgactttagaaggccaaaaattggggctgtggctttgcaaccaacgtgctgcctatctaaatggaaaactctcctccgaccaaatcagccgattggaaacaatcgggatgtactggggcaaccggaacgaccggcaatggaacgaagtttatcaggccgcaaagcgatactttgaggcgaacggaaaccttgatgtgcctgttagctatgtttcaccagaaggatatgctctcggaaagtgggtcaggcggcagcaatatgcccatcagaagccggaaaaaagcaatgcagttctgtcaccggagcgtgttgcgttgttggatgccatcggaatgcagtgggagaaacctgatccgtggcagcaccggtacgagctggcgcaggaatataaaaaagagcatggaaatctggatattccggtaaaatacaagactgcggatggcatttggctgagccgatgggtgtacaaccagaaacggctgctgcaaagcggatcggaaaagttgagcgaagagcaaaagaaaaagctaaaggagttattggggtattatgtcaaaatttcagcatgatgtgatgttgaagatcgtaaaggtcattgatttggtgatgattacgattccgtttgcactttgttgggagctgtactactcgtatcaggtctatgcaaagtttggctggagaggcaactgggccatgatcagtctgtttgcggtgctgtttttcctgctgggcaaagtttacgatgcgttctggatgtcgctgcaacgcatttctgaactgctttacggtcaaatcttagcagcgatggcaacagacggcattctgtacattgtcatctgcctaatgtctcggcggctctgcaatatcctgccgggcattgcggcgattgccgggcaggtcgtgatggcaactctgtgggcaagatgcgccaatagctggtatttccggacctatccgcctcagcccaccgcagtggtctacgatgtccgtcatggcttggaaaagctcatcaatgaatatggcctttcaaaaaagtacgatgtcaagatgacattgaacgtggaagaatgcctgaatgacctgagtctgctggatggaatgcagagcgtgttcatcagcggtgtccacagccatgagcgcaatatcatcctgaaatactgtgtggaacagggtatcaatgtgtttgtgatccctcgtgtgggcgatgtgattatgagcggtgcccagccgatgcatatgttccatctgcccatgctgcgtgtgggccgttacatggcaagcccggagtatctgtttgtaaagcgtttgatggatattgtggtttcgttggctggactggtgattctcagtccgttgcttctgattacagccattgcagtcaaatccgatggtggtcctgctttttacaagcaggtgcgtctgaccaaggatggcagacagtttgagattctgaagttccgctccatgcgggtggatgccgaaaaggatggtgtggcccgcctttccaccggcgacaaggatgaccgtatcacgaaggtcggtcatatcatccgtgcttgccgactagacgagcttccgcagttgtggaatatcctccggggtgatttatctattgttggccctcgtccggagcggccggaaatcgctgcccagtattgtgaggaaatgccggagtttgctctgcggctgcaggccaaggcgggtctgaccggctatgcacaggtgtacggcaagtacaacactactccttacgataagctgcagatggatctgatgtacatcgcacatcccagcttgattgaggatttgaagattatgctggcaacggtgaagattttgttcatgccggagagcacggaaggtgtggctgaaggtgcgaccacagcgatgggacaggagacggaagaatgatgcagaatgatttcggtctgatcagtatcattatggcagcgtacaatgctgaaaaaacaatagagcaggcgattaactcagtcttgagccagacttacacgaattttgagcttcttgtggttaatgattgttcagcagacagaacggcagagttggtcaaaagtatcgcgtctaaggatagtcgtgtccatcttatctctaatgtgaagaacagcggtgtgtcctatacgcgcaagcatggactggaagaagcgaaaggttcatggatcgcgattcttgacagtgatgatgtgtgggcaccggaaaaactggaaaagcagattgaccttcagagaaaaacaaatgctgacctcctttttacaggttctgcttttatgggttcggaagggcagtcaatcggttggtatctccatgctccggctgaagtaacttatcgacagttactgaaacagaatgtactgtccaattcttctgcactggtacgtaaggaactgtatgcaaagcattatgccgttggagatgatatgcacgaggacttcgcaatctggctcagcatcctgaaagaaggaaagaaagcctatggcgtggatgagccgctgctcatctaccgtattgcaaagtcatcgaagtcaggcaataagattaaggccgcgaagatgaactggaatacatatcggtatgtcgggctgaatccgatagaggcttcttattatgaatgttggtatatggtgaagggattccttaaatatagaaatatcaaggattcaaaaaagaaatgaggatataatgaaaattgcaattttgattcagtgccataaaaatccacagcaaatcaatttgttgcttgaacgtttaaatcatccggatattgattgctatcttcatattgataagaaggctgactttgcagataaaattattcatagagaaaatgtgtttgtgcttccggatgaacagcgtgtttcggtggaatgggcacagatttcgcaggttacggcaacgctaaatcttctgaatacagctgttgctggtataagggggggctatgactactattggttaatcagcgggcaggattggccgcttcgttcagcaggtgaaattgtaaagttttttgaagaacacaatggcacgaattttgttcagtattggaatagtaaaaaccatggaagtcatcaacaaaacaatttggataaacggaatcaaatctattttccaattaaacttattggcagaaaaccgtggcaaaagatcatcaagagggggtgggttgaattcaccggaggatacaatcggacgtggaaaattttcgagagaaaacagctaggaatagatttctattttggaagttcatggtgggcattaaagagagaaacaattgattggattatgcagtacctcactatacatccggaatattataaattctatgaaaatacaacttgtccggatgaatccttctttcatacattggtgatgttgtcaccttatgctgatgaaaatacagactatcttacatatttacattttcaaaaaggtgcgaacagcccagatattttaacagaagataatttgcagagagcgagagaaagcaaatatctgattatgagaaaagttgacatgaatgtggatgactcgttcttacagatataagagaattgtatgaaaaaaataaaagtgttaatgcttgttcctaatctttttgttgcaaacggtgtggcaagctttgtgatgaattacctgcgtaatctcaatcatgatgaggtgcaggtggatattgcatcttacaaagagggcgactctgtttattatgcagaggtagaggctgcaggtggaaaaatgttttttctgccgggtatcaaaaaccttcctgagcatgttaaagtctgcaataaaattttgtcggatggtcggtatgacatcatccatgataataccctgcatatttctattccaatgatgtggtgcgcaaaaaaggcaggtgttccggtacggattttgcacagccataattcaaaaatgggagagacacctgctaaagcgttccgaaatcgtttttttcttccagtgctgcgttcgctggcgacaaattatgcggcatgttcacagctggcaggccgtgcaatgttcgaagatcaagggtttacggtgattccgaatgtgattcaaacagaaaaatatcgctttgatccaacgatgcgtaaatctgtgcggcaaaagatgaatgctacagacaagtttgtagtaggaacggtaggacgattggcagagcaaaaaaatccattttttgcaattgacgtttttaaatgcttattaaaaaatgttccgaatgcagaatactggtgggttggaaatgggccacttgaggaacgggtgaaaacttatatagaagagaaaaagcttacaaaatatataaagcttctgggaagccggaacgatacggtggaattgtatcagggcatggatgcattttttctccccagcttttttgaaggattatcaattgtgacagttgaggctcaggcgatggggttgccctgtgtagtgtcagatgtgattcctccagaagcagagtatacagatcttttaaaacgatgttcgttacaggattcgattgaagcgtgggtagagaaaataagaaatacacagattaaaaaaactgaacgaaagcaatatcaagaatacttgagcgaaagtgttttttcagatgttaggtgtggaaatcgactgaaaaagatttatgaacgtttcttaagcgaaaaagagtaatatatggagggagctgtgcttgcgattgcagaatttttaggactggttggatatgaagcactgttggcgtatgctatgaaggcatttcgtccaatgaaagaatccagtaaaaaagtatatttgttttgggcattacttccacttgcggctatgacaatgttccatagcgaaaatattggtaatgacaccagagcgtatactggcttgtttgaagctgtaaaggaaatgacgctgaaaatggctctttccaatggacgattcgagaagggatatatgctatttacatatgtcctgacaaggttgttttcaagtcgacaatgtgtcctgattgcagaaggagctattgtatatctgtctctttcacgatggctgaacaaatggtgtaaagcacctggcttatttgtttgcctgatcgttgagatgttggaaatcgatggatggatgagtgctgcacggcaatcgctggctgtggcggtactgctctttgcatatgatgcactggtggagaaaaagctgcttcgcttttctattcttgtgattttggcagcgcagttccatgcggtagcatatgtttttctgctggcgtggccgatgctttggtgggttgacgagtacaggagaaactcattggaaaaaaagtggcagtttgaaaaactgatggcagtttgtgtcgtcggaattgccttgctgacgtggccgatgataaatcttttgctgaagatatttccaaaatatcaatattacatgtcgggtgtgtacatggacggacaggcacggttggcaatcatcttgaaaatcattgtctatgcgctaatgttattggccccgcgatggattaaaaatcaaaaccgtgggacaaggcagagcgtagtggagttgtcactttaccgtatggcgcttataaatattgtgattttggatgcggcgaatcaggcgactattttaacacggttctccggcgtgttttcactctatgcaatcgcagatttttctgagcaagttgcacggttgcaatataagaaaaatcgagaaatcgttacgattttggctctagttttgtttgctgtgtatggtggagttattacattatatcgtacgccggaatggcagacgacgtatccatttgtgtggtggaggtaagattatgatacctaaagttattcattattgttggtttggtagtaatccttatccgaaaattgtgaaggattgcataaagacttggaaaaaatattgcccagattacgaaataaaattatgggatgaaagcaattatgatatttcaaagaatgaatggcttaggaatgcttataattcaaaaaaatgggcatttgtttcagattatgcgcgactggatatcattttcaacgaaggtggcatttatttagacacggatgttgaattgataaaaactttagatgatctcttacattataactgtttccttgccatcgaaaatgaaaatgccgggttgattaatacaggaataggattcggcgctgtaaaaaatcacccggcaataaaggaaatgctcaatgaatataacagtcttgtattttctgaaaataatgtaatgggactgctgtgccctgaactgaatacaaaaccctttctgagagaaggatacaaaaatggcgcaaaagaaattcaaacaataaatgatgcaacaattcttcctgcagaatattttgacccaaaagatggaaatctctctgaattgcatataaccaaaaacacacatggaatccaccttggtagcagattgtgggaaactggtttaacacgttggaaagcaaaggttcgtatgtttattggaatagaaagatgtcgtaaaataaaaagactttataaatggattgagcgataatatatgagaagtatttcaattgaatgatagggtgaactaaatggagcaaattacacaaggtgcggccaaaaaacgtatattggaaatccttttggatttttcaaagtattgtgatgaaaacaaattgcagtattaccttataggtggaacactgcttggagcggcaaggcataaagggtttattccatgggatgatgatattgacattggtatgcctcgtccagattatgaacgtttcatcaagctgcaacaacaatgccggactatgaacgttcactgtgtcgaaaatgaaaattctgggctaccctttgcgaaaattattgacgaaaaaactgttgtcaagcaaccatacgatggcggagatgagatgtccagtctctggattgacattttcccatttgacggatgggcttctgacgaaaaaatagcgaagaaagattgcaaaaaaatcacaaaaaatcgcttccttttatggcatgcacaggagaaagtcggaatgggaagcacaagattaatggcgatattaaaggtgccggtgattttatttgctaagatttatggaagaacgcgaattgcaaaaagaatgaataacctggctcaaaaatatgactacgataaaagcaattgggttggtaacttttcatggtctcaatatggtatgcgcgagcgtgtccccaaagagtggtttacagaacgtgtgaaattgcctttcgaagggtatgagttctgggcaccaaaagaatgggacaaatatttaactcgaatttacggtgattacatgaaacttcctccggaagaccaaagagtaaatcacaatatggaggtctggctgaaataattgaaaatgaaaaataaggttacactggtcaatatgatttcaagccttgcacttcaaatttgcaccattataagtggttttattattcctaaaatcatattgagctattttggttcagatgtctagcgtctgattgcatcgctaaatcagtttctgagttatatttcgcttttggagggcggcgttactggtgttgttgctgcaaacttatataaaccactagttatgggagacaatcaaaaattatccgcggttgtagttacgtcaaaaaaattttttaataaagtcggaacaatctttattgcttattcggtttgcgtggcggttgcatatccctttgtattcaaattgaattttttgtatgtgttttcgctaacgttgattctttcaatgaatctactagtgcagtatatgttttccataacgctgcgaacgcttttaaatgcagacaaaaaagtttatgttgtttctttgacgcagattgtaattacggtgctaaatactctgatggcttatatttctgtgaaagtctatccaagtattcattttctgaaattgattagtggattgcttttttttatccaacccattgtatacggcagctttgtaaagaaacattacagtattgattggtccgcagacgtagataacgatctattaaaagaacgctggaatggctttgccgtcaatgttgctgcatttattcacaatagtaccgatgtcacaattttaaccatattcacggatcttgcgacagtttcaatttataatgtatattcgctagtggcagccgggctgaaaagtttggttcagtcactgacctcaggcattagtgcaacgataggtcaggcctatgcaagggaagactgggatgaattgaatcagaaaatggatttgtacgagtatatcatatttgttcttgtttcctttttgtttacagttggggcgttgctgataacaccgtttgtaatgctatatacccaaggaatccatgatgcgaactatagtcagcctttatttggaatgttgctgctgattgcagaagcgctgtatattgtgaaatatccgcatctcaacttagcgtacgatgccaataagtttaaagaaatcacaaaaccgtcatttatggaagcaatcatcaacattgtggtgtcggtcgcacttgttggaaaattaggattggttggtattgcaattggtacagtggctgcaatgatttatagaatggcatttcatgtctattttactagtaaaattgttccaaatcggccacaatatattttttataagaagttttttctatttgtgcttgtatcagttttcggggcggcgatttgctatcgggagtttccactctttaactacacggtatcaaattgggtaatccatgcgattgtatacagcgttatattgggaattatttatttgtgcataagtatcatcttctttagaaatgaattaaacttttttttgaaatatttgaaaagataacgctatcaccattgagagaaggtaaagaaaagtatgaacattgcagtgatttttgctggcggaacgggtcagcgtatgaatacaaagactaagccaaaacaatttcttgaattgcacggaaagccgattttagtatatacattagagcaattccaaatgcacaacgagatagatgcaattattcttgttatgctggaaagctggatcggctatagtaggacattgattgaacgatatcggttgtcaaaagtggcggctattgtgccgggaggaagtaacgggcaacagtcgatctatcatggtgtaaaaaaagcagcggaactgtttccgatggaaagcgttgtactgatccatgatggtgtacgtcccctgatagatcacgacaccatttcaagaaatatcgcatgcgtaaagaaaaacggatcggcaatcacagtatcgccggcgatcgagaccaccgttattaagaatgagcagggtctggtgggagatattatcgaacgttcccgttgccaattggcaaaagcgccgcaaagctttattctgaaagatttgtggagcgcacattgcaaggcaatcgatgacagaaggcaggactttattgattcggcatgtctgatgaaatattatgggtacccgctttatactgtggagggctcgccggagaatataaagatcactacaccaagtgacttttatacatttcgggcattggaggatgcaagagaaaactcgcagatctttggataagcaggagaaggatttaaatgtgttgcgaaaaaacacgtactgatatttttttggaggattcgaaacgcatctggaacaccatcgatccggaacgctttcgggatacggtttttctgataacgggtgcaaccggtttgatcggtgctacgcttgtgcgggctcttttgtacgcaaaccgctgtaacgatttgaacctgcggatcattttgtgggtgcgtgatcgaaaaaaggcagagttgctttttaaagatgcagcggaactggagtttgtggaatgcgatattaccagtgccccagagatatctgtccgtgttgattatattgtgcattgtgcaaatccaacatccagcagattctttttgaataaccctgcggataccatcaatattgcagttgagggcacaaaaaatgtactggacatttcccgaaaaaacgacataaagggaatggtatttctttcttccatggaggtttatggctttcctcaaaaaggcgaggaggtcaccgaagacaggatgggcggttttgatcccacggtgcctcgcaacagttatccgattagtaagcagctctgtgaaagtatgtgttgtgcatatgctgcgcaatataaggtcccggcaaaaatcatacgattaacgcagacctttggtccgggagttgactataacgacggacgtatctttgcggaatttgcacgttgttccaaagaaaagaaaaacatcgtccttatgacgcagggagagacagaaaggtgctacctgtacacggcggatgcggtggaggcgattctggtggtgttgcttgacggagcggcaggtcaggcatatactgcggcaaatccgaagacttactgctcgattttgcaaatggcgcaggacttcgcaaaagagaatgacatctcggttgagatcgccgcaaaagacgtgagcaaacttggatatgcggatactttgtatatgaaattgaacacagataaaattgaaaagcttggatggaagcccaaagtgggattgatggagatgtttcgcagaatgatggaggcaatgtaaatggcgacacctacagtcagcgtgattatgccagtgtacaatgcgcatttgtatgtggcaaaagcaattgaaagcgttctgcagcagacgtatcaggattttgagctgatccttgttgatgatggtgctacagatggaagcggagaaatttgcgaaaagtatgcggcgcaggatgaccgcattgttctcattcatgaagaaaacagcgggatctgtaaggcgcgcaacaccgggttaaaacatgcacaaggcacttacattgcattttgtgaccatgatgatctatatatgccgcagtatctggaaaaggcagtgagttctgcaataaaggaaaatgcggacctggttaaatttgcatacagatcagaatattctattgatggaaaaattacaaatgtatttgaagatccagttcctaatattaaattgagcgttacagatgttttaaagaaaccatatgagcttttcgatttaaccaaacgtgttttatggaatggtctgtataaaagagaaatcattgcgaattatcggatattgtttgatgaatcaatcctcgcgggtatggaggattttcttttcaatatcaattttctttctcatataaatgaaattgtatacattccagataagctttttactcattactgccgatccgggcaaagcacatcatctaagtacagtgaaaatcggttaaaaaatattattcgggtaaaaggaaaagaaatcgcgtttataacttctgaaacatctgaggggggggggatacaacaggaaatcctcatcgggcaagcatacaagtatttatctctaatgcatcttgaatttggatttgacggttgtccattggatattactgaaaagagatttcaattaaaagaactccgagataaagatgcaaatatcgtaagtataaaattatttccggaaatattcaaagttgcacagagatggccgggaatggcagtgcaactaggattatatacatgtaaatgttattatggattacttttgttttggaaacttcgggataaaaagaattgaggctatcgaacagtttctaatataactactttgcttaaatatactggttggttttacgtgaagatgatggcctgaaaggatatatgatttccgtgagtgagaagaatgataaattatcaagagatgaatttatatcgtttgttaaagcagtcctaaagaaaaaatcattggaagaaaacagaccactttattttgagtatagggtgtccgaaggttacgaaaaagaaaatttttcaaaccgttttgatgcgtttgcaccagagggattttctgagtacagaaatccggtgatttttgagtttatagacagccgtgtgcggaaaatggaacaggtaacaaaaaggattaaaggcttagcggatgactgtagaaagagctatggtgcaacagttatcttcattttaaatttcaagtccccgtttaaagattccaatcttgtagtatgggatttggctgtcataaataattgggttgaggagtatccaactgaatatagccatgcatgttcgttaagcattgggcgaagggaaactgcgcgagataaagaaaaagcacagctttttgaaaagctatacagcgaagatttatattaaaaaaacaatgagctccatacgaatgcaatacgtacttgcatcaaagagcaaaatggatttgcaatcgtattaggtgcgggtgtttcaaaggaacagggcgcaaaaacttgggatgagctgctgaaagattttcagaaggaaatagaagaaaggtgtcttttggatgattctgaggcggtttttgaagaagttgggggaagcagcctgacaacagcccagttatgcaaagatatctgggcaagcgagaaaccctttgcctggcagattcataaaagcttatatgatgcagcgcaagatttgaacctgaataccgagcttggagaaattgcacagttagctcaaagatgccaaggcgatcgaaactttagaattttgagctataattacgatgactttcttgaacagtatttgaattttcttaatgtaagatgctgctctatgtttacaacgaagataagatattcaaatgggcgagatagtgcggacttttatggcatgaacggtcagcctaatcaaagtctgcgattatatcatgtacatggctttttgccgaaagtcgcaacgagagatcaactggacacactccatatgaggtcgatttgcttgacagaggcggactataatatgctttataatcagccgtatagttggccgatcgcaagtcagctctcattttttagagaaaatacatgtttgtttattgggtgtagtttaagtgacccaaacattcggagacttttggaaatcaccgcatataatctgccgaaacattatgctattttttctatgacgtatgaaagcacagatgcgcatggctctacaacaacaaaacaactgacatcaaaagatcgacttcaaattgaaaatcatttttaccgcattggaattaacattttgtgggtaaaagattaccgtgagataccagtgtggctacataacctaaatcaatccattgtctgaatcaaggcaatttttcaattttcggaatacatctcttgcgaacataaaaggcgagtgttatactgaagccatcaaaaaacattggaggtgtcccatatgccccgtcccaaaggaagcaagaataagtccaagaccgtaaaagcaaccgttgactttgctgcacagatcgcagaaaagcagtctgcaaaggaagccgttaccgccgaaatcacatctatcactgctaatatcgatgtgctgaaagctgatctgaaagccaagaaagctgagctgaaatctatcgacaaagaaatcgctagaatcgaagcaaaaaaggtcaaggctgaaaccaaagcagcggaatctgcaaagagagccgaggcagaggatgtgctgaaaaagctgttggccagcggtgtaagtgcagacgagatcctcgcaaagttgaagtgatttaaaatttcagacgcagtagttgacgggaacatctacgtcgcaagcagtgcaacttggtaccaacttgcgatttttgaattggatttttcaaaatccaaattcaaaacgcttgttgggctgtgcccaaaccccttgcgttctgcatcatgcgatgcaggctgcgcatttttgcaaaatgcttttttaatctgagtgccgatgcctgtggtatcggcactttttgcacagatggagtgtaaccgcccagcgaaaggtaagcggtcaataaatgtaagcggtcaataaactcccgtcaggcttaaaaaaggagctgttgcaaaatagcatctcttcaaaatgttgaaaacaaccgcattcaccgtacaaatcgggcagaatgttgaaaactcaaaggcagatttcaaaaaatgagtacagcaaagctgagtatctgtgaaaaagcaggtgctcagctttttacgttttcagttccgagaaattctactcttttttgagtggaaaaagatgagattttcgttttccgcgttgcaatttggaaaagaacttctggggatcaaaggcaaggcagaggagaaaaagttctgttgaaatgttggtctttccccgcatcaggaagcgccggaagctccggttgcttttcagcacaccaaaggctccttctacctgaatggaacgattcatccgcagaagtgcccctcgctcagaaagaagattttcaaaagcggtctttctgtgttctgtagattctacacacatacggatctctttgttttttacctcgtcggaggacttgaagcacttgcttcggagttcgcagccggagcaatcattgcaacggtaatagtccgtggtcgtgacaaagccattttcctttttggagctggaacgagcaaagaggagctttctccctcctgcgcaaagaaaaccatcctcatgttccagcggctccatattctcgacccgccagaattgagacttgaacttctttgtcttttgttttttgtaggagatcggcttaataaagcagttctgactatgctgttccagatacagataattgcggacgctttcgtatccggcatctgctacaatgtcacggtagcttttgctctgcatccgctggatatggttcaggaacggaatgagcgtaccagaatcggtgcggtttgaaaaaagcagcaacatcggtaatatattcactgttgaccgcaagctggacattgtaggccggtttcagctggccattccccatgtggtcttctttcatccgcatgaatgtagcgtccttgtcggttttggacatacttctgcggttattgccaatggcgaacagcttatcctcgtactctgtccacttcgtccacaggctgtccagcttttcataccgcttttggcattcgctttttcgctttccgatcccgtgaacaaattctgcattggaaggaagctgcttatctgccaactctcgcagcttctttcgggtcagattgccttttttcaccgcattcgttgaaaactacctttgctttttcctttaattttgccagattcttttcgacccctgttttccagacaaaggtgtatcgattcgccatgctctcgatctttgtgccgtcgatgaacacttcctcgtattctgtttcttccaactcagcaagccgttttacaaactggtagaacaagtcctcgaccgcttcctttgccttgccgctccggaaccgagaaaacgaagaatagtccggaaccttctctccttgaagaagccagatgaagtcgatattcttgcggcacgcaagctccagctttcgggtggagtagatgccgcacatatagccgtacaccaatagctttaacatgatccggggttctgctgccgattttcttcctctcggagaatacgcctgatacagtttcctgtaatccagttcctcgagctgggcgttggctacatacaccggttcatgttcatctattaaaatattttcgcttattggtagggtcagctgttgatatatgtcgccctttcctgtatactgttcatgttgtagctggttcatgacagtttcagcttacaacaaaaatgagataggcaacccctttcggggaagtctatctcatttttttcgttggggctattttgcaacagcccctttctctttgctgggggcatgatgagcctgctcagcctgccataggcaagctagcgtttgcgcagcgcagcggagcaatgaaagccccagtggggcttttaagcgaccgaacggtcttgcgttagcaagatggaggggcctcgccccgacaagtgaccgctggccttcctcgctgttccagcaggcaaggatggccgggtagaatgcccgcgccagacggtcaatgacttcatcgggataagggaaaatgtttgtggactttttctttttgttcaaacgcacgctcctttgatcgtcccaccgtggcaaagtcgggcgagaaaatcaaaattccattctttatcaggcgcaagggcgcggatactttccgccctgcacttgctgctggtggctcgttgatggcttacaagtgcctgtcgttatgcgattttttcgtcgttcagcatttcttcaaactgtgccatatatgccttgtgctgcttgaggatttttgaggtctcaaccttcacgtaggcatcatcgggcaccttaacaacccgtgtagtgtttgtttacgggaagtgcaggccatcggccagagcgagatgatctgaagttggagcaggagaaaaatatttcaaaagaatgcagtgtccgttgaagaattttgccacaatatgatataatgactactataggcagatcgtattgtgtcgtgcgaatggacaaaaacggatacggaggagatccttatgacgattttgatcgtagacgatgagttccggattgggcaactgatccggagactgatccattttgaagagctgggtctggagctgatcgatgtattcgacgatagcgaaaaggccttgggggcgattttgcttcaccatccggacgttgtgatctccgatataaagatgccgggcatggatggtctggaactggtgcggcggacacaggaggcagggattgcatcgcgctttgtctttgtaagcggcttccgggagtttgagtatgcccacaaggccttgcaatatggcgtggaagactatcttctgaagcccgtgaaggaagaagatctgaacaatattcttcagaaactgagcgatggtcacgagcaggtgctgcagcatcggcgggaagaaaaacagttgcaagaagaagcgcgccggggccgttatatccggggatttgacctgattcaggccatcgaaagtgctggagagtgggtcgattggcaggaactgaaccggatgatgcagagtaatgtacagaatgggaagatgctggcttttctgttgcagttggattattacgatgcttcccagcaggatgacatccaagaccgcatggttatcaacaatctaattaccatgacggaggatcgactgcggccacatttgtatgagcaactgtacgccgtgcaggataagaccctgatgatcggtctgttgaactacgcccccgccgcaagcacgatggtgcggcaggaattgtacaccgtgtatgccgatgtgcggcggtatctgtcgggattcccggagtatgtcgctacgctggcgttcggtgaagagatcacaccgcagcagggaaagttgtcacttcaaacggcccgccagcggatgaattggcggatcgcgctgggggcaaaccgtatcatcgggccggaacactttgttactaatccaaaactcggagagctggataccattgcccgcgcccagctgcagaatgcggtagaagctttgaacgctgcggcggcaagccgcgtgtggcaggatctagtgcgtcagattcaaagcaatccccagaatgacccggccttgtactatacgctggcccggtgtttcctgaataccttctacggcgacctgacttgggatgagcgccgtacccggcagtgtcgaaattggctggaacaggtgcggcattgctggcagcttccgcagctgaacgaactggtggaacaggcaatcgcggaagaattgcagacccagcaaaaggaattggacaaccaaacggctcgtccggtgcggatggccttggattacattgccgagaattatgcacagaagatcgggctggatgaaatcgccgaaatgctgcagatgaacagctcctacttttccacgctgttcaaaaaggaaaccggaaggaacttccagaattatctgacggaatatcgcattgaaaaagccaaagagctgctgcgcaccacaaatgagaccatgatgagcgttgccgagcaggtggggtatcaggacacacggtatttcagtcagtgctttgtcaaagtggtgggagtaaagccttcgctgtaccgaaaaatgtattcctgaggggtggatgcaatgaagtggatggatcggttgtgggcactgctggtgttagctgtcgccgcggtgctgggggcactgctctgtggacgtatcgttggtgcaaagcaggtacagacagtgatgcttttggcggccatggcggcgctgctggtgctggccgggacgctggcgtgggtcgggaaagagatgcaggatcttctccggcaactgaaggagcaggaatacaccagcctgctgcccaatgaagaaaaaaacaagacgctgccgttttacccgcagctgtgggatgcggtggtgaaccaagtggacatggccaaagagagcgatgccgccgaagaataccagcgacaggcaacgctgcaggccctgcagagccagatcaacccgcatttcctttacaatacgttggagtgtatccggggtcaagcactgatggatggcaataccagtgtggccgatatgctggaggcactgggaaattttttccgttacagcatcagccgccgggaaaacgtggtgacgctggcagatgaaatcaacaatatccgcagttatatgttgatccagaattaccgctttttgaatcggtatcggttcgagctggaatttctggaggacgaagagccccttctggggtgctatgtgcccaaattgacccttcagcctattgtggaaaatgcactgattcacgggtttcaaaatcagaagtctggctgtgtgactttgacggtggatgcctcggatagtatgttgatgcttacggtctcagacgatggcgaaggcatggatgccgcagttctggaagaactgaaccgaaagattcagagccgccagacccttttgcggaagcctgcttcccacgggaacggcatcgcgctgcagaatgtgaaccgccgcatcatgatgctatatgggcggtcctacggcttgcacgcttattccacgccgggtcgcggcacggatgtggaaatcatactcccgcggatcaccaaggcggaggtgacaccatgaacccggtcctgatgcgagcgaaggcattggcctttggaacagaagagcatacagaggcccgcgatcttgattttgtgctgcgctgcggggagctgaccgcgctagtgggagagcgggactccgggcggcagacactgtttgacggcctgaacggaaactgcgctgtgcagcgtggcatgatcctgaccccggaggggaaaatctttccgctgcagaaaaaggtattcgcagcgggcagttttttcactgaggaaaccagcagccgggtgcagggggtggaattgacagaaatgttgtttctgatgcagccggggggctgcaagcggctgcattggaataccgcccgacggcggaagttggcgcaggaattgctggatcaggtgcagctggaacgcgatgtccgggaggacgtgagccgcctgagccccatggagtgcttccagctcaatctggccgcagctctggattccggcgcaagcctgatgactattcaggaggatttcgagggcttttcggtggcggacttcgaccagctggtgccgatcctgaaaaagctccagcagaccacaggattggccatcctgctgaacaccaacagcttacgggcgctggaaaagctggccgatgaggtgttcgtgttccggaatggcaccattgccaaaaagctgcggggggagaagatcgctccccgcaccattctggatcatttgggtggtgcgcaggccgcttcagaggcaccccggccacagcgggaaacattgtttgagatacagggtcttcaggttcgggggtgttcttgccccattgtgctgcatcggggtgagatactacatctggtggactatgacgtgagggaaaaacaggaactttaccgcatcgtttcggggcagcagctggtgtcgggggtgtccctgcaatacgaggggcatccgctgcctcagaattggccgcacagcccggaacgttacccaatcacggcgctggatcggttcggggcgcagggactgtttccgcagatgtcggtggctcagaacctaatctttccagccctacggcgactctgcgggccttttgggctgttggacaaagggttggaacaggcagctttgaaggagtgggatagaaaaaaacagttggatggcaaaaacatggcgcagctgacccaagcacaggcaatcgccctgcagatggaaagctggattcttgcccgccggaaagtgctgatcctgctggagcccttcctgcacacggatactgctagccgttcagttttgcagagtgcgtttgcccggttccgggggcaaggcggtgccattctggtgatttcctccagccggacatcgtacctaggcatttcggaacaagaggccgctgcagagcagtgggcaccatggtacgaccagatcttggatgttcaggaggtgtgccgcgatgaaacataaaattccgcgtgtggcagcacgctttccggctttttggctgatcctgacggtatatctgctggaatttggcgtgccggggccgggccagtgccatctgatcctgcgccagctgagtatgtgggtcccagcggtgctgggcatgatgctgatgcggctttcgggcagttacaacatggcggtgggaacccagatgaccttttcagcggcgttgctggggatcctgctgcaatggtactccgttccgatgtgggcggcctgtgtcgtggtgctggctgtggccgtggtattggggattctttatacagtgctgtcgaataggatgcagattccgctgttttatctgtcgctctgtgttcacctgctgctggacggcctgaacggctttttctaccggatgaccagacagacctccaattatgcttatgcaggcgcggatcgcacccgctggcttggggtgccgctgtggtgctggatcgcgctggcggcgctggcactggggactgcctatctgaaccgcaccacctatggccgctcccttttcctgctgccgtggtatcacgatgtccgttggcaggagatcggtgaaagccgacggataaaaacagggacaaggctgaagctggacctcatccttggggctgcaaatgtcctgagctgcgttctggtggggctttccgggatcctgttggctctgcggggcggaacaacggctttttactccggcatgaactatacttgccgcattctgacggcggcttccatcggcggctggatgaacgccacccgccgcagccttccggtgggggcgctgctgggcagtatgagccttgtgctgatcctgatgctggaagtccatctgcggatcacgagttcgtacgtagagtattgtctgagcgccgtgctgatcctgatgagtgcggcgtggggggcggcccaaaagaaaaaacggctgcaacccaaaaatcgtatcacttaatccaaaacttgtctcattgtaacaaaatcttttgtgtaatataatgacctcaacagaagcggaacgtcagaagttccgtatcacagcagaaaaccgaaacgtacccgaacaa

SEQ ID NO: 385 - DNA, 16460 bp, unidentified
  source 1..16460: mol_type = unassigned DNA
  misc_difference 2271: note = a, c, g, or t
  misc_difference 2272: note = a, c, g, or t
  misc_difference 2273: note = a, c, g, or t
  misc_difference 2274: note = a, c, g, or t
  misc_difference 2275: note = a, c, g, or t
  misc_difference 2276: note = a, c, g, or t
  misc_difference 2277: note = a, c, g, or t
  misc_difference 2278: note = a, c, g, or t
  misc_difference 2279: note = a, c, g, or t
  misc_difference 2280: note = a, c, g, or t
  misc_difference 3890: note = a, c, g, or t
  misc_difference 3891: note = a, c, g, or t
  misc_difference 3892: note = a, c, g, or t
  misc_difference 3893: note = a, c, g, or t
  misc_difference 3894: note = a, c, g, or t
  misc_difference 3895: note = a, c, g, or t
  misc_difference 3896: note = a, c, g, or t
  misc_difference 3897: note = a, c, g, or t
  misc_difference 3898: note = a, c, g, or t
  misc_difference 3899: note = a, c, g, or t
  misc_difference 10306: note = a, c, g, or t
  misc_difference 10307: note = a, c, g, or t
  misc_difference 10308: note = a, c, g, or t
  misc_difference 10309: note = a, c, g, or t
  misc_difference 10310: note = a, c, g, or t
  misc_difference 10311: note = a, c, g, or t
  misc_difference 10312: note = a, c, g, or t
  misc_difference 10313: note = a, c, g, or t
  misc_difference 10314: note = a, c, g, or t
  misc_difference 10315: note = a, c, g, or t
  misc_difference 10316: note = a, c, g, or t
  misc_difference 10317: note = a, c, g, or t
  misc_difference 10318: note = a, c, g, or t
  misc_difference 10319: note = a, c, g, or t
  misc_difference 10320: note = a, c, g, or t
  misc_difference 10321: note = a, c, g, or t
  misc_difference 10322: note = a, c, g, or t
  misc_difference 10323: note = a, c, g, or t
  misc_difference 10324: note = a, c, g, or t
  misc_difference 10325: note = a, c, g, or t
  misc_difference 10326: note = a, c, g, or t
  misc_difference 10327: note = a, c, g, or t
  misc_difference 10328: note = a, c, g, or t
  misc_difference 10329: note = a, c, g, or t
  misc_difference 10330: note = a, c, g, or t
  misc_difference 10331: note = a, c, g, or t
  misc_difference 10332: note = a, c, g, or t
  misc_difference 10333: note = a, c, g, or t
  misc_difference 10334: note = a, c, g, or t
  misc_difference 10335: note = a, c, g, or t
  misc_difference 10336: note = a, c, g, or t
  misc_difference 10337: note = a, c, g, or t
  misc_difference 12164: note = a, c, g, or t
  misc_difference 12165: note = a, c, g, or t
  misc_difference 12166: note = a, c, g, or t
  misc_difference 12167: note = a, c, g, or t
  misc_difference 12168: note = a, c, g, or t
  misc_difference 12169: note = a, c, g, or t
  misc_difference 12170: note = a, c, g, or t
  misc_difference 12171: note = a, c, g, or t
  misc_difference 12172: note = a, c, g, or t
  misc_difference 12173: note = a, c, g, or t
  misc_difference 12174: note = a, c, g, or t
cttttgccacgacgggcggcgagggcaagattctcatcgattcccatggtagcagcggttcccatcatagggtcctggaatacgcgtcctaagaaactggcacgtctgtgctcagacattcttgtaacatctacgtcatcaatagaaatggaaccttcatctacaagaaagactcctgcaatggcatttaataaagtggattttccggcaccatttccaccgatgacagtaacgaaatcaccttcgtttaaagtaagggtagtgccgttaagagcggttttttcgttaatggttcccggattaaatgttttgtaaatatgatcaactttaagcattggttttggctcctttctttactggttttgtaaaatatttcttcttccagtaaggaactgcaaggaagaaagcaaccacaagcgcagataacagctttaagtagttagtatcaagaccaagccagataacaatctgaagtacagcgtagtaaataacagcaccgatagcgacagataaaagcttcaacgcaaagttgtggaaaatcttttcgaacaatacagtaccgataataacggcagcaagaccgattacgatagcaccacgtcctgcattgacatcagcaaatccctgatactgtgagtaaagagcactggcaagaccaacaagaccgttggaaatcattaaaccgattacggtattgaaatttgtgttgataccctgggcacggctcatattcgggttgcatccggtagcacggatagaacagcctcttgcagttccgaagaaccagtacaggatagctataatggcgatgacaaagatagcaacgataaatatggtgtttttataaaaagccacattttttacatatcgtaaagatacaattaaatcgtatttgtcagcactgattgcctggttggatttgccgccaagaatctttaagttaatggagtataatccaagctgggttaaaatacctgcaaggattaccgggattcccatttttgtatggaagattccggtaattaatcctgccagcataccggatatggtagcggcaaggattgctacccagatattctgtccagaagcaatcagagtaacacagacagcaccgccaagactcatggttccatccacggttaagtctgccacatcctgtattttaaaagtgatgtatacaccgattgccataataccccagattaatccctgggctacagcaccgggcatagcgtttaataaatcagcaatttgcaattccacaataagttcctccggtttctaaataaataattcaaaagtaaaaattactcagacatgtctaaagctttgtaatcgtctgggacagtgatgccaagcttctcacagatgtcagggttgtactgtttggtaactgctggagcaaattcaacttccatagtggatgggtctgcaccatttactaagatttcgtatgccattttacctgtctgatatccaaggtcatagtagctgatggataaggtagcaacaccacatcctttgcagataccggcttcacctgcaataattggaacaccggcttcccctgcaatgttattgataacttctgtattggaagctgcagtgttgtcggtaggaacgtaaagaacatcgttatcatttacagcactctggacaacacttgcaatatcgttggaatcaacgaaagaatatgcagtacaggtgtaatttaatttttctaattcttctttgataacatcaatctgatactgtgagtttgcttctgcggagcagtaaagcagtccgacatttttagcatccgggaataattcatttaacatagctgcctgctcggacagaggagctaagtcagaagttccagaaatgttacgtcctgttgtgcctgaccagtcagaaatgtcaagagcggttgcgtaatctgttacggaagttccaagaataggaatatctgtagttgcagcagctgcagactgaagaggagcagttgcatttgcaagaatcaggtcttcgtttttggaaacgaaggagttgacgatagttgcacatgtggcagaatcaccctgggcgttctgctcgtcaaaaacaacgtcatcacctaatttctcggtaagatagtctttgaatccttttgttgcagcatctaatgcctcatgctgtacgagctgacagatgccaacggtgtactttgcgttggatgaacttttctctgtagcgtcagcgttttgggtatctcctgctttggagccacaggcggtcatgctgagtgcnnnnnnnnnnagaactgctgcaactgaaagagagagaaatttcttcatttttttcataataatttcctcctgaaatatgtaatatttttttgatttaacgcgttcgtgcgtctgtgcgtttatgcattaaagcgttaattcgaatagactaattataataagtagagaaaaataagtcaataaattaaatcctatttttatcaggaaaaattaagagaatgttaatgtttttgcaaaagggactgtgctaatatgtgcaaagagagttttggaaaggaaataatgaatatacttgatattatattcccaagaagatgcccactgtgtgatgaggtgataccgccggatggaaaaatctgcccggagtgcatcggaaaggcagaactggtgaaggaaccggtctgtaaacggtgcggaaaacccattgggaatgccaggaaggaatattgtggtgactgtgaccggaaaaaacatttttttgattcgggaaaggcagtatttgtctatcagggggcagtgcaacactcgctgtatcgttttaaatatgccaatcggcgtgaatatgcagctttttatggaaaaatggcatgtatacagtatgcccggtggatttcaggactggggatagatgcaatcataccggttccgctgcatcggaaacgcaggagggagagagggtataatcaggcagaactctttgcaaaggaaataggaaaacgtaccggaattccggtagaaacgaaattgctatatcggtgtataaataccagaccccagaaggaacttaatgaccaggaacgcaagaaaaatctgaaaaaggcttttacaatcgcacaaaatatagtacaattaagaaaagttctgcttgtagatgacatttacacaactggaagtaccgtggatgcagcagcagaatgtttgaaggtatcaggaatacaagaggtttatgtactttgcattagcattggcagggggcattaggaggagaaagaatggacgtaagaaactgcaaaggatgcggaagattatttaattattatgggggcgtaccgttatgtaaagcctgcaaagataaactggaagagaagttccaggaggtaaaagaatatttgcggcagaacccgaatactccgatacaggttgtatcggaagataataatgtttctgtaaaacagattaaacagtgggtgcgtgaagaaagacttgtcttttcagaagattcaccacttggtctggaatgtgaaggctgtggaacaattatcaaaacagggcgtttctgtgagaaatgcaaacgtaaaatggaaacggacttccagagtgtaataaagaaaaaaccggtggagcctcagttggataagagaccgaaggaaagagataagatgagatatctgtaactgtagattaagaactgccgcagtgactggtggcagttttttcttttcagaagataatatctatgttatactaaagagagtttgtttaggagcagagtatgattagtaaagaacgcgtcagacatatgacaaagctggcagaattcgaaaatgaagaaagtaaagcctgccagaaagcaacacagtatttcagaagagattatgttgccatggagttgataaaaannnnnnnnnntttttgccggaaccattgcgttcggacttctttttgtgctgtggcttttttacgacatggagaatctggtaaagaaaattaatgatatggatatgattggatttggcatccggattgtaatggtgtatctggtatttctggctgcttatctgcttattacttatattatctataatcgtagatatacaaaggggagaaaacaggtgaaggagtattataacagactgaagagggtgagcagtctgtatcgtgaggaagaaaatatatctaatacggatgactgggaggtttagaatgacgggtttactcgaactgaaggagcggttaatccgcttttttggaaaaaatgaaatatatgtggtgccggtacttaagtttattctggcaacagtggtatttctgctgatcaatcaaaatattggctatatgaccagactggccggacttccggtaacactggtactggcactgttatgtgcggttcttccggtcaacgctatcctgttgtttgcgttcattctgattgctgcacatttatttgcactgtctatggatgtatgcgtggtaggactgattcttatgctggttatcgcactgctgtatttacggttttcaccaaaagatggttattatgcagtgctgacaccgataacatttgcattacataccccatatatcatgccgatttcggcaggactgttacggacaccggcatctgctgcatctattgtgagcggaactgtgatgttttatttcctgaagggaataaaggaaaatgaggcagtattaagtgcggtggaagaggacagcaatgcggcttcaaaaatggtagtagcaatcaaccagctgctgggtaataaggaaatgtatctggtactggcaacttttattgtgattttactggtggtttatgtagtgcgccgcctgtccatagatcatgcatggacagtggcgtcactggctggtattctgattggacttactgtgctgatcagcggttttgtaatgctgggcatcaagggacgaatcgtctggattattgtaggaagcgtaatttctacggtgattgcattgatacagcagttcctgttctttaacctggattatagcaggacagaacgggtacagtttgaggatgatgaatattactattatgtaaaagcggtaccgaagatttatgttacaaccaaggagaaaaaggtaaaacgtatcgcagccaaggatgaggaaaaagaacgtatttcccgcaaagctttggcagaggaaatggatatagacgaagatttgctgaaataagacagagaggaagtggaacaggtgcagtcatttttgacagtgttggaaaattttaaagaaaattatctggcgtgggtaagcgttttgaacattacggtatcaaagactgatattgtagaaatgcttattattgcgttcctgttttatcacgtcctgaaatggattaaggatacacgggcatggatgctgttaaaaggaattcttgtgattttagcgtttgtacttgtggcagcaatcttccagatgaatacaattctctggatagcagagaagacgattaatgtagcgattattgcaatcgttgttatcttccagccggagctccggaaagcactggaagaattgggacgaaagaaatttatttcatccctcttttcttttgattttggaaaaaacggagtggaacgtttcgatgaccatacgattggagaactggtaaaggcaagctatgagatgggtaaggtgaagaccggagccctgattgtagtggaaaatgaaattatgctgacagaatacgaaagaaccggtattgcactggattccctggtatcaagccagcttctgattaatatatttgaaaagaacactccgttacatgacggagctattattgtacgtggggacagagttgtctctgctacctgttatctgccactgtctgacagcctggaactgagcaaggatctgggaaccagacatcgtgcagcagttggaattagtgaagtgagtgattctcttacaattgtggtatcagaggaaaccggaaaggtttctattgcgatgggtggacagctgtaccgtaatgtggatgcggagtttctgcgcagcaaactgaaatttctccagagcagcaatatcgaaccaaagcgcttccaattactgaagaggaggttacgcaatgttaaaaaagctgacaaaactggtgacgaataattttggactgaaggttgcagcattattcttctctgttgtgctgtggcttgttgttgtcaacattgatgatccgacacaggcgaagaattttaccacgtctattacgataatcaattcggattatatgacacagcagggcaaatactttgaagcaaaggacagtaatctgcaggtaacctttaaggtttctactgtgcgttctgttatgaagaacttgagcaatactgactttcgggcagtagcagatatggaaaatgttgagcaggtagacggtgtataccgggtaccgattgagataactgcaacacgatatgcgtctgcggtgaacttccagggcaaaacacagtatatggaagtaaatgtagaagatctgatgctgtcacagttttctattaagggaaaaacagtaggagatgcagctgagaattatgcggtgggagatgtgcgggtatctccgaacatcttaaaagtaaccggaccggaatcggtggtgaatcagattgatcatgtagaagcaaccattgatgtaacaggtgcatccgcagacttgacggatagtgtagtcccggttgtatataatgcaaacggtgaggcggtagatacctcaaagctgaattttaatattgataaagtgacaatttcggctacgatacttaatatccgtaacctttcagtagaaattgaaccgagtggaacggttgcagatggatttgtatgcaccggagtgacgattaatccgaataagatagcgataaagggaacaccggaagcactgaacgcagccggaagtattgtgattccgtcagaccagctggatatcagcgatgcaactggcaatgtagtgaagacaattaacatttcttcttatctgccggatgatgtagaggtggtcgatgctgacaatctgaatgttgaagtaaccgcagtggtggagcagattgtatcagaatcttatagcataccggttgaaaacattgcaattcagaatctgaaagagggttatgaagcagtctttgcagagagtacagttacaataaccttaaagggactgcggaatgatctggataaacttatggcagacagcattaagggaaatgtaaatgcagcaggactggcagaaggtaatcataccgtaacagttaccctggagctggatgacagcttatattccgtaaatggaacacagtctgcagtgataaccataacaaagaaatcagaaaatacatcagatactacaaataacggaaatgacaatggaacccatacgggttcgaatggtggtacagaaacgggaacgggcagtaccaatggaaataatacgaataatggaaattcggaggaagattagaaaatgagcagaatgtttggaacagatggtgtaagaggtgttgcaggagcggagctgaccattgaactggcaacaaagcttgggcaggcaggtgcctatgtgctgacgaaagagcaggaacatcagccgacattaattgtaggatgtgatacaagaatttcaggtggaatgcttgccaatgcactgatggcaggaatctgttctgtaggagccaatgcaatctatgtaggggtaatgccgacaccggcgattgcctatctgaccagaaaacataaagtagatgcaggcgttgtgatttccgcatcccataatccgatggaatttaacggaatcaaattctttaatggagacggatataagctttctgatgcgttggaggatgaaatcgaagagctgatccgcaataatatgaaagatgttgtactgccgattggatccggtgtgggaagaattgactatcgttttgatttgcgtgatgaatatgtgaaatttatgaagaaatgtgtgccggttgatttgaccggtatgaagattgtgatagactgtgcagagggtgcatcctactatacatcggttaagacattaaaagacctgggtgcagatctggttgctatccatacgaagccggatggaaccaatatcaatgccaactgcggttccacccatatggaagaacttcaggcaagggttgtttatgaaaaagcagacgttggtcttgcatttgatggcgatgctgaccgtatgcttgcggtagatgaaaaaggtaacctggtggatggcgaccagcttatggcaatctgtggatgccatatgaagaaaaaaggaactttaaagaaaaataccattgtagtaaccgttatgaccaatcttggcttcagcctgatgggagagcgggaaggcatccatgtagagaaaaccaaggtcggagacagatatgtccttgaaaatatgctggagaatggctataatatcgggggtgagcagtccggacatattatatttttagatgataatacaaccggtgacggacttctttccggacttcatttattacaggtaatgaaggaaaccggcaggaaattatctgagctggcagaggtgatggaagtattgccgcaggcacttgtgaatgccaaagtgccgaatcacaagaaagaaaaattcatggaatatactgagattgcagaggcaatcaaggcattggaagagaagttcaatggggaaggaagggtgctgattcgcccatccggaaccgagccgctggtaagagttatgattgagggaaagaaccagagcgagattgaagaagaagcacagaagctggctgaattaattaccaacacaatgctgtaatcaggaggggaatagaaatggtaagtcagaaagttaaaataaagaatccaacaggattacatttgcgtccggcaggaatactctgcaaggaagcaatgcagtataaatcgttagtaacatttcattatcgcggaaataccgctaatgccaaaagtgttttaagcgtactgggtgcgtgcatcaaatttggagatgaaatcgaatttgtctgcgaaggtgatgatgaggacgaagcattaaaggcaatggtagaagccgtagaaagtggattaggagaataaaagatgaaaaaaatactggtaactggatgtaatggacagttaggaagagcaattcgcaaggaatatgcagcaagtgatgtggaatttatcaatacagatgttgttgcagggaatggaattgtttctttggacattacaaatatcgatgcggtaatggagatggtaaaggatacaaaacctgatattatcattaactgcgctgcacatacaaatgtagataagtgtgaagaacagcaggatcttgcatataaaattaatgcaattggtccaagaaatttaagtattgcatcttctgaaattggagcaaagatgattcatatttcaacagattatgtctttgagggaaatggaacaagaccatatatcgaatttgacaagccaaatccgattagcgcatatggaagaacaaaacttgagggagaaaattttgtcaaacaatttgctgacaggttctttatgctccgtacagcatggctttatggagatggaagaaattttgtcaaaacaatgctctctttggcggagacacatgatgaattgagcgttgtctgtgatcagcttggttcaccaaccagtgcagttgaacttgctaaaatgattcacttcttagagaaaacagataattatggcatttttcatgctacctgtgagggagatactaactgggcagagtttgcggacgaaataatgaagcgtgcaggaaagacgaccagaataaaacatgtgacatcggaagaatataagaaaatgaatccggcatctgcaaatagaccggcatattccattcttgaaaattatatgttgaaactcaccagtgactatagaatggctgactggcatgatgcactggatgtttatatgaaagaactgttgggataataggtgaaagaatggagcctttagtaagcgtgtgtattccggcttataataatgccgggtatattagagaaacaattgattcaattttaaatcagacctatcataacattgaacttgtggttgtagatgataattcgaaagataatacactggatgtcattcgaagtgtgaaggattccagagtaaaggtttatcataacgaagagaatcttggtatggttgggaactggaacaagtgtttaagccttaccagtggggaatatattaaattgatatgcgcagatgatatgttggatcagaatgcaatagagatagannnnnnnnnnnnnnnnnnnnnnnnnnnnnnnngcatccaacagtgaatctggtggaaagcgatacccgtctggttgatattaatggaaagaaaacaggtgtatttcacagatatcataaatctggagaggttaatgggaaaaaagttgctaagaaatcgttactgatacagaatttttttggtgcacctgttaataacatgatccgtaagtccgcgctggaaaaagtgggatattttgatgaatcttttacatatatattggattttgatatgtgggtcagattagcctgcagtggtgatatctatattattcatcagcagctgaacagttttagaatacgaaatgattccaatactgggaatttgattggagaaaatcgtgatgtttatgtggacgagcataagcggttggtagaaaaacatgcttcaaacggggttattaaattatctaaatttgatattggatttagtgtatggttccgtaaagtgagaaatgtgttaattggaatatacttaaaattattctcgaagtaggggtaatcagatgaagaaaatagtaataattccagcgtacaatgaagaaggtggaattgtaaaaactgttacagatgtaatggaaaatgcaaaggattttgattatgtggtaatcaatgactgctccaaagataatacattagaaatatgccatgaacataattttaatgttgtaaatcttcctgttaatatgggaattggtggtggagttcagacgggttatatgtatgcgtatcgtaatggatatgatatagcagtacagtttgatggtgatggacaacataatgccagttatttggacagcatgtcgaagaaacttgttgaagaaaatttagatatggtaattggttccagatatatagagaaagaaggatttcagtcttccggaatgcgccgcatgggaattaaatattttactggtttgataaagctgctgaccggaaagaaaattactgatccgacttctggtatgcgtatgataaatcggaaaataatgaaacagttttcagaagaatatccaaaagattatccggaaccggagagcatagtgacaattctaaaagaaggggctaaagtagaagaaataccggtaaagatgaatgcaagggaggaaggtgtatcgtcaatttctccgtctaaatccatttattatatggtaaaagtaagcatagcagtcttaattgctgcaatacgaaagtagaggtaatcaatgggcattaaagtacagattattatattagtgataattattgtggcgttattatgtcttggtaatatgatacggaagaaaaaagtagatttgcggtacgcgttgccgtggattataatgggatgcattatgcttgttttggatgtgttcccgcagttgctgggtaaaatggcaactctgttgggatttgaacttccgataaatatgttattctttttgggcgtatgtttggcactggcaatattgtttatgcagacagttgccatttccaatttgtcggagaaggtaaaaaaactgacacaggaagaagctttaatgaataaaacagttgatgataagataaagaaaagagaggaaaagtaaatgagcaaaacaaaggtattggttacaggtgcgaatggttatattggcagacatgttgtagaacaattacttaatatgggggctgatgttcttgcagcggatttcagttttgatggagttgatgagagagcacagagagtggaaacaccgatttttagcggcttagaagatatttatgaacagatgggaaaaccggatgtatgcattcatcttgcatggagaaacggatttgttcataatgcagattctcatnnnnnnnnnnnaatatgatagaaggcggattgaaacatgttgttgtaatgggaacaatgcacgaagtaggatattgggagggggcaattgacgaaaatactccaaccaacccattatcgctttatggaattgctaaaaatgcattaagacaaatggtggagattcttgccaagaaaagcgaagtttgctttcagtggactagaggttactatattataggagatgacattaagagtaattcaatcttctccaaaattgtacaggctgagcaggcaggtaataaaaaattcccatttactacaggaaaaaatttgtatgattttatctctttggaagaacttgcaaaggaaattgcatgtgtaagcttacagacagaagtgaatggtattattaactgttgtacaggaaaaccggtatcacttgcagaacaggtagaattaaagaacataattttaaaatccgtctggaatatggagcatatccggatcgtgcatatgattcaccgggagtatggggagatgcaaagaaaattcagcagataatgagcaaagttgaaaagtaaaagaatagatgatataataacacaacaatgtaaattaggaggatactcaaaatgagaacttatttggtaacaggtggagcaggatttataggatctaattatattcattatatgtttagaaaatatgataatgaaatcagaattatcaatgtagatgttttgacttatgctggaaacctggaaaatttgaaagatattgaaaacagagataattatacttttatcaaagctgatattacagatagtgaggctatcagtaagattttttcagaaaatgatattgatcgtgtagttcattttgcggcagaaagtcatgttgacagaagtattaaaaatccggaagtttttgtaaagacaaatgtacttggaacagctgttatgctgaactgtgcaaaggcagcatgggaattgccggatggtactttcaaagagggaaagaaattcttacatgtatctacagatgaagtatatggttcactggaagatgacggaacaagttatttctatgagacaacaccatattccccacatagtccatattctgcaagtaaggcatcatcagattttctggtaaaagcatatattgatacctatcatttccctgctaatattactaactgttctaataactatggaccatatcagttcccagagaaactgattcctcttattattaataatgcattacatggaaagaaattaccggtgtacggtgatggaatgaacatccgtgactggttgtatgtagatgatcatgcaaaaggaattgacatggttcaggaaaaaggtcgcctcggagaaacatataatattggcggacataatgaaaaacgtaatattgaaattattaatattattattgaaacattacaggagattcttccagatggtgacccaagaaaagcaaatgtaagcaaagatctgattacttatgtagaagatcgtaagggacatgacagacgttatgcaattgcaccggacaaaattaaggctgaaattggctgggagccagagaccatgtttaaagagggaattaagaagacaattgcgtggtaccttgaacatgaagactggatgaagaatgtgacaagtggagattatcagaaatattacgaagatatgtatagtaataaataaaaataagaaataaataagaaatggaagggctgccagattttaaatcggacagccctttttgcaacaaaatcaagtcattgcaaagaatgtatattgtgaaatacaaaagacccgtaatttgctttttctttacaaaagtgttaaaataaatcgattatattatgacgaaaatgttggaggtatgtttgatgaaaggaattatacttgctggaggttccggcacaagactttatccattaacaaaggctatttcaaaacagattatgccagtatatgataagccaatgatttattatccgttatcaacacttatgcttgctggaattcgagaagtacttattatttctactccgagagaccttccggtatttgaggaattgttagaggatggaagtcaattgggtatgcacatcgaatatgcaattcaggaaagcccaagaggacttgcagatgcatttattattggagaaaaatttattggtaaagatgctgttgcattggtattaggagataatatcttctatggacagagtttttccaaggtattaagaagtgctgcagagcgtacagaaaatgaaggcggagctacaatctttggttattatgtaagagatccaagagaatacggcgtagtagaatttgatgaaaatggaaaagctttatctattgaagaaaaaccagcagaaccaaagtctaattatgcggttccgggtttgtatttctatgacaataatgtagttgaaattgccaaaactgtgaaaccgtcagccagaggagaaattgaaattacaagtgttaataatgaatatttgaacagggaaactttaagtgtagagactttaggacgaggctttgcatggcttgatacaggaaatcatgatatgctcctggcagcagctgattttgtatcagcattccagaaacgtcagggattgtatatttcatgtattgaagaaattgcttataagagaggctttatagataaggaacagcttgtaaaactggcgcagcctttgttgaaaacagattatggtaagtatttgatggaaattgcagaaggattataaatagaaaagaggaaaacaaaatgggaaaaattaaagtaacagatgattgcaatggtatcaaaggattaaaagtaattgagcctgcagtatatggagatgccagaggttattttatggagacatataattataacgatttcaaagaggctggaattgattgtgaatttgtgcaggataatcagtcagcatctaagaagggtgttttaagaggacttcattttcagataaattatccacaggacaagctggttcgagttgtaaatggtactgtatttgacgtggccgtagatttaagagaaggctctgagacatttggaaaatggtttggtgtagaactttccgcagaaaataagaaacagttcttcattccgaaaaattttgctcacggatttattgttttgagtgattatgcagaattctgctataaagtaacggatttctatcatccaaatgatgagggcggattattatggaaagatccggaaatcggagttgaatggccaatgccggaaggcatgactgaggcagatcttattttatcggataaagataaggtttggggcggtattagcacatttaagaaatagaggttaatatgcgacagtatatagatacattcatgagatatcggtctttgctgacagaactggtcagcagagaccttaaaactaaatacagaagatctgcattgggatttatgtggtcggtgctgaacccattgggaatgatggttgtattgactattgtattttctacagtgtttcagcaggcaattccaaatttcccggtttatttaatgtgtggacaattaacatttaacttttttaatgaggcgagcaatatggcaatgacctctgtgctggataatgcacctttgattaaaaaagtatatgtgccaaaatatttattcccattatcaagggtgtgttcatctttggtaaatatgttgacatcatttgttgcgttaatgattgttatattaattacaagaacaccaattacatggactatttttttgtcagtatttccaatttgttttgcaacattgttttcccttggaataggacttatattgtctgtggttgtggtgacatttcgggacatgaaacacttatatagtgttattacaacggcatggctatacttgacaccagtattctacccaattagtatgctacctgattcagttgcagtaatagttagaaataatccgttgacattaattgttgaaattttaagatataatgtattgtaccatcaggtagctccgttcgtattggtattaaaaacattgatttattgtgctgtagctatgatattgggcttgtggatgtttaaaaaacagcaagataccttcatattgaaattataggaggaattggtttgaaacacgaagaaaatgtgattgaagttgaaaatgtttcacttcaattccgtttatataaagaaaaagttgatagcataaaagagtatgtgctaaaaagagcaaaaagagaattggaatatgaaaatttctgggcactgaaagata

SEQ ID NO: 386 - DNA, 13607 bp, unidentified
  source 1..13607: mol_type = unassigned DNA
gaggtgcgcgagtatctgcgccgcatcctgcgcaagcaggcgggcgacggctccggcctgatctacggtatgggccatgcggtctataccatgagcgaccctcgtgaggtcattctgaaggagcgcgccaagcacctggcctacgagaagggctttgaggaagagtacaatatgctgtgcagcatcgagcggctggctcccgatatctttgccgaggaaaagggcagcagcaagccggtgtgcgccaatgtggacctgttcagcggcctgatctataacatgctgggcatctctgaggatatctacaccccgctgttcgccattgcccgtgtgccgggttggtgcgcacaccgggtggaggaagtcatttttgccaaccggatcatccggcccgcctataagtatctgggcgtgcgccagaaatataaaccgatcgaggaacgctgatgaacgctttatttgtgctgattttcacctgtggtggtgcccttgccattgggcgcgggcttgacttggccctgtggacggactggaacaccggcctgtgcacagcgggctctgtctggctgcggtacggcggcctgtgggcggcgctggtcgttggtatcattgccgcccggaagctggcccgccagccccttgttctgcgcagtgcgtgcaggccggtggggatcacatcggtgctgggcggcgtgtgtgtcggcctggccggtgcggtgcgtctggcagtgggcatgaccggcgttggcgcgctggtgcgtgccgtgttggaggtggtgtgcgctgtctggctgatccggctgggccgcagctggacgcataagggagaataccgtctgcccggccggagcatgaccccggcggtgcttggcacggcggtgttctactggggggtgctgagccgctttatggagaacagctccagctggcaccgggtggaaccgactgccatggtctggcagatgctggctgcgctggtgtttctttcggcgatggtccgcgccctttggctgccggaaacgtccaacggctgccagctgtgcgaggccgggatctgcacgttcctgctctgcttctgctgggaactgccccgggtgctggtgctgctgttccacggcatcacggtagctgacctgcccgaggtgctgtttggctttggcatgtgctgcatcggcgcgctggggcttttcactgtggcgcgggtggcaggaagtgacggaaggcctgcaataccccgacacgccgttggttgaattgctgaaaagattcccataaaagctgtgaaaatcgttcaaaaacaaaaaagtgtgaaattaccttgttaattttttggcgggcacttgaaggtttccgcaatttggtctataataaagataccgtgattattatccgataaaagggtaagaacatttaggaggtactattaacatggctgttagagttgctatcaatggttttggtcgtattggccgtctggctttccgtcagatgtttgatgctgagggttacgaggtcgttgcaatcaacgatctgaccagccccaagatgctggctcacctgctgaagtacgataccgctcagggttccttctgcggcaagatcggcgaaggcaagcacactgtcgaggctaccgaggattccatcatcgtcgacggcaaggagatcaagatctacgctgttaaggacgcaaaggatgctccctggggcgagctgaacgttgatgtcgttctggagtgcaccggcttctacactagcaaggagaagagcatggctcacatccaggctggcgcaaagaaggtcgttatctctgctcccgcaggcaacgacctgaagaccatcgtcttctccgtcaacgagaagaccctgaccgctgaggatcaggtcatctctgctgcttcctgcaccaccaactgcctggctcccatggctgacaccctgaacaagacctatcccatcgtttccggcatcatgaccactgttcatgcttacaccggcgaccagatgatcctggatggtcctcagcgcaagggcgacctgcgccgtgctcgtgctggcgcacagaacatcgttcccaacagcaccggcgctgctaaggccatcggcctggtcatccccgagctgaacggcaagctgatcggctctgctcagcgtgtgcccgttcccaccggttctaccaccatcctggttgccgttgtcaagggcaaggatgtcaccaaggagtccatcaatgctgctatgaaggctgcaacctctgagtccttcggctacaacgaggatccgatcgtttcttccgatgtcatcggcatgcgttacggctctctgttcgacgctacccagaccatggtcgctaagatcgacgacgacacctatcaggttcaggtcgtgtcttggtacgacaacgagaactcctacacctctcagatggtccgtaccattaagtacttcgctgagaactgctgatcggagtttctcctgagctgaataaagcttgactgcgccctttctcttgtgtgatgcgagagaaagggcgctttttgctgaccattttgggcgcgataaggcgctttcgtaaaatggtacgacccattcgtaatgatccgacaaaagcagcacgcattcgatctccatctattgcaacccttctcccgatatgataaaatggtaaaaataaatggagacaacgaaacagtatgattacgaaacgtgaaaaactgcagtatggatacctgtttctgattgatctgctctctctggttctcagcattgggctggcgtgggggctgaccgcaggtgttctgcacaagatgggggacttccagctggacgatttggtagaagcctgttttttattgctgctggcctatattctgactttttttacatttgatcagagcgaaaatatcgtgaaccgcactccggtccgtgaagttgaaattgcggtgcggttcaattttttgctgaccctcattgatgcggcctgtctggcgctgaccaaggcttccatgctgcattctcgctattttctggtgtttgtgcccgtcatcgatgtctttgtgatgacgggcgctcatgctgtcctcaaaaagatgctggtacgctcccgctataccaaggggattcagagccttgtgggggtggtgaccacgcaggagaacgcaagccccattctggaagagctgaaaaaggactggtccaagcgcgtgacaggtcttgccattctggaagctgtcccggagcagcttcacactgagatcgatggggtgaagatcgaggcgaacttcgataatttcatggactggctgcggcaggcagcgctggatgaagtgtatctggatgtggcgcaggagagtgaggagaacatgctgccctatctcgaggagatggagagcatggggctgacggtccatttccgcctgccggtgctggaccggatcgaaaaagcctgctgcgatgagaccagtgcggtgcgcatcagccgggaactgagccgttgtgcaggcggcaatgttgtgacgatgggcacggtggaactcaagctgcgggatcaggtgctgaaacggaccatggatatcgtgggcggcatcgtgggttgcatcatcagtatccccatcattgcgttggtggccatcccgctcaagctggaaagccccggcccgctgatcttcaagcagcgccgggtgggccggaatggacgtgtgttctacatccacaagctgcgcagcatgtatgtggacgcggaggcacgcaaaaaggaactgatggcccagaacgaaatgaacggcctgatgttcaagatggaagatgacccccggatcacccgggtgggccgcttcatccgtcgcaccagcatcgatgagctgccgcagttttttgacgttgtgcggggctccatgagcctggtgggtacccgcccgcccacgctggatgagtaccggcagtacgagagccatcacaagcgccgcctttccatgaagccgggaattaccggcctgtggcaggtaagcggccgcagcgatattgatgattttgaagaagtggtcaagctggatgtccagtacatcgacaactggtccatctggatggatatctacctgctgttcaggacggtgggcgttgtgtttgaccggaaaggggcaaaatgaattatattctttttggtggatctggttttatcggcacccatctcattcatttgctgctgaaggagtgcgtcagacccagcgacgtgatctacgacctggatcttgttatgcccggggaagagggcgtggtgccgggcattgtggaaaagaacgatggggtgcagtatatccggctggatgtgcgcaagcccatcgattttgagttcgttccgaccccggaggacgtgatctttgatctggcagcggtccaccgcacccccggccacccggaagaagcctattttgaaacaaatatccggggcgcggaaaatgtgaccgcatttgcggaaaaatacggcatccggaagatcctgttcaccagctccattgcaccctatggcgcgtctgaggaccttaagacggaggagactctgccaacgcccaacacgccgtatgggatcagcaagctggtggcagaaaagatccaccagatctggcaggcccgtgatccggcccgggagttgaccatcgtgcggccaggcatcgtttatggcaaaggggagcacggcaacatgacccgcctgtacagggggcagaagaagggctactttttctatgccggccggaaggacaccatcaaggcgtgcatctatgtcaaggagttggtgcgcttcttcaagtaccggatgctggatcattccttccccggagcagagatctataactgtacctacgagccggcctataccattgaagaaatctgcaatacaatgcagaaggcgaccggcctgcaccgccatgtgccgttggtgcccgccggactgctgctgtttgcggcgggcattctgggacccatcgggggcaaaaaggtgggcatccatccagcccgtgtccggaagctgatggtgtccaccaatgtttgcggcagaaagctggccgccaccgattacaagttccactatacgctggaggagagcttccgggactggttcgaggattgtgaccgcaaggagctggtatgaccatggagcagaatgcacagcccatccgtgtggcccagatgatgacggatatgaactacggcggtgtggagatggtggtgatgaactactaccgccacatggaccgttccagagttcagtttgattttttcgcgctggaaggctcgactctgccccagcgggaagaaatcgaacggctgggcggccgggtgtatgtggtgccaaaatatacccacctgccgcagtatgaacgggagatcgggcggctgttccgtcagaacggataccagatcgttcactcccacatgaacaccttgagcgtgctttccctctggggggcaaagcgtgcaggggtgcccaaccggatcgcgcataaccattctacggtgggcaggggagaaggggcaaaaaatgtgatgaagtacctgctccgtccctttgccacagtgtatcccacccggctctgtgcctgctccagaacggcaggcagctggctttatggtgaaaagcctttccgggtgttcaacaatgccattgagctcgaccgctttacttatgatgccgcccaacggaaagtcgtccggcaggagcttggcctgggggatgaactggtgctgggccatgtcgggcggttctgctatgccaaaaatcacgaatttctgctggatgtaatggcggaggtctgcaagcaacggccggatgccgttttactgctgatcggagaaggggaaaacgaagccgcttcccgccggaaagcggaggcgctggggctgcaggagaatgtccgttttctgggccgccaaagcgatcccgcaaagttctatcaggccatggatgcctttgttctgccctcgcggtatgaggggcttgggatcgtgctgatcgaagcacaagcggcggcattgccggtcatctgttccacagaggtgccgcaggaggctcaggtcctgcccgagatgcaatacctgagcttgcaggaaagcccggcagtctgggcggatgcggcgatccgggctgcagaaaatgcccggcggcgggatacctctgctgagatgcgggcaggcggctttgatatcgtcaccgaggcgaagaagctggaagcgttttacttcgacctgctgaaatgaggagataagatggaccctttggtaagcatcatcgttcctgtttataatgtgaagccatatctgaaccgctgtgtggacagtctattggggcagagctatcagaacatggagctgctgctggtggacgacggctccaccgatggcagcgaggccctctgtgatgaatatgctacgcaggatgcccgggtacgggtgctccacaagaaaaatggcggtctgtccgatgcccgaaacgctggtgtggacgcagcaaagggggaatatctctcttttgtggatggcgatgactgggtgtcaccttattacatcgagaacctgtaccgggcactggagcaggcgggagcggatttttcagccagctgttttgaagaggtgttcgagggccagccggtgcagtccgtgcccacagagcgtctggaagcattcgagatcctgagccgggaggaatgcctgtgccgcatcctgtatcaggagggcatggaggtgaccacccccaccaagctctataagcgtgcactgtttgagggtgtgcgctacccggtgggcaagctctatgaggatatcccggtcgcctacgaggtgacaaagcgtgcccataaggcggcacatatcgcaaaccgggattactactatttccagcggggcagcagtatccaaaatatggccttcaaccccagaaagctggacagtgtgcggcactgtcacgcgctgatggaaaacgtaaagcgtgatttcccccagttgagccgtgcggcagaatgccgctatctgagcaatgtctgcaatatcctgttccagatccgggacaggcagcatgaaaaaatagagaaggccctctggcaggaagtgaaaaaataccgccggaacgttctgctggatccgcgggcccgcaaaaaggcccggctggcggcggcgctttcctacagcggctatgccatgacccggcgggtttatgaaaaaacgcagtggcgtggaaaaaagtaaggtggagggatccggttggaggaaagaaaaccgcttgtatcggtcattgtgccggtctataatgtttacccgtatctgcgggactgtgtgcagagcgtgcaggcgcagagttaccagaactgggagctgcttttggtagatgacggctccaccgatggcagcggagagctttgtgatgaactggctgtggaggatggccgcatccgggtgttccataagcccaatggggggcagtccgatgcccggaatgtcgggttgcaacagacgcagggaaaatatttttacctgctggacagcgatgacctgatccgctccacggcccttgcccagttcgtggagcgctgtgaggcagatggtgctgatgcagccctgaccccgctggagatgttctcgacagagcagccggagagacggacggaaaatccgcaccagatcccagagctgctgaaccgggaagagaccatgcgcaggatgctgctgcatcagggcatcgggcatggagcaggcggcgttttcttccggcgggaggtttggggagatttgcagttccccgttggcatcctgtacgaggactatgcggtgatgtatcgggccattgcccgctgtgcaaaagtggaagtgtttccggaaccgatgtacgattaccgcatccataccggttcgaccatgaagagcggcattgccgagaagaatctggtcattctggatgtgggcgaggacgtgacccactttattgcggaaacggtccctgtgctgaaagcggaagcggagtacctgcagctggttacttacctgaagacactgaaaggcattctggatggcggctttgccagctatccggaagctcaggcgcggatctgccgctttgtgcaggaacaccgggcgcttgcccggcggccctgggccaaaaaggcagaccggatcaaggtggaaacacttctgatcagcaagcggctgttttatgccgtttatgggctgggagaatggaaaaataaacacacggtcgaaaaataaaatggagaagttatgctgatttatctgggggcttttgcggtttctgtgggcattgccgcctatggcgagcacctgcggacgaagaaaaacaacgagaagggcttttatctctgcctggcgctggcggtgctggtgatggcggtattggcaggcttgcgggacccgtccattggcacggacagcgtggtgtatgaggaatgggtggcggatgcaaagctgcaggatggtctgctggcctgcatccggcagcggcacaaaacagagccgctgtttatgacgctggtctatctggcggcccatgtttttggtgatgtccactggctctactttatggtggacctgctggcctgcggcctgtttatgatcgggctggtgcagtataaggagtatgtctccgtgccctatggctggctggcttacctctgcctgtattatggcgatacctacaatgccgagcggcagtctgtggcgctgggtgtggcatttctggcgttcagctttgcgtggaagaaaaagtatcactgggcggtcctactgctggcggtctcctgcctgttccacaatgctacctttatctcgtttggcgcgctgctgatctatatcctgcttcagcatttcgacaactggtgggtcaagggtggcttggcggcattttcggtctaccttgccttcttcagcaaggctgtggtcaggctggccctgaatgtggacttcattgatcgactttacggatattattatgttgccaatgcgggcggtttcacgctgaatcccatcattgtgcgtctgccgttcctgatcctgcccattgtgctgtaccgctggtacgcaaaagaggaaggggagggcagccgccgctttacccgctcggatgcagatttctggatcgtgatgatcctgatcgagatggcaacggcccagctgcgcaacatcaatgtgccgctctaccgcatctgcctgtattttgcgttcttccgttatctcgccattggccgtgtggtcaagtgcgtggaggatgagcgtttgcgcaagctgctgaaggctgccatgtggggaatgctggtcatcatctggatctatcaggcgtatattcagggcaacaatgccatttgcccgtacacctcggagatcctccacattggcagagaaacattcttctgagggaacagaacatggagacagagctgatcagtgtcattgttccggtctacaatgtggagcgatatctccgccgctgcgtggacagcatcctgcaccagacctatcggaatcttgaggtcctgctggtggacgatggctccaccgatgccagcggagccatctgcgacgaatatgccgcacaggaagaacgtgtaacagcagtccaccagaaaaacgggggactctctgcagcgcgcaacgcggggctcgaacgggcaaagggaacgtatctttgctttgtggacagtgatgactttctggacagccggatgctggaaacgctttgctgtgacctgcaggaacaggatgcggacgtggctgtggttggcttccggacgtttgaacgggaggaagagcttgccccggctgaactcgccgtaccggtgcagtgtatgacaggccgggaggccatccgcagcacccttgtttcggatgagctgggggattttgcctggaacaagctctacaagtgggagctgttccgggatatccgctatccgctggggcggatgatggaagatcagggtacgacataccgcatttttcagcagtgcagcaaggtcgcataccgcccggtgccgctgtattattactatcagcgcccggacagcatccttcaccgcaggaacatgaagttctacgaggataagctggatatgggctatcagaaatatcgggccatccgggaagcatacccgggaatgccggagaatgatgccgccatgctgagcgtggtggagcactgctatccgtatctgatgcaggatacggagcgccgcgcaaagatggaggcctttctgcaggagtgtgacccggcggcggcaaagctgctctgcaccagcagccagcggaagtatcagctgctcagatgcagccggaggctgtatgcaaaactgttcctgctgaaaaacggcccggcggcaaaataagggaggaaaatttgtgctgaacgataccgtcagtatcattgtgccgatttataacaaggaaaagtatctggaaaaatgtctggacagcatccttggtcagacctatcgggatctggagatcattctggtggatgatgggtcaacagacaactcccttgccatctgccagcgctacgcagaaaaagatctgcggatcaaaatataccacaagccaaacggtggtgtttcttctgcacgcaatcttggattggaaaaaagtacaggcacgctgatttcttttgctgatccggatgattcactccacgccgagtgcatagaacggctcaaaagagtgctggatgagaccggtgcggagattgcttattgctacggtctggatcttctgggtacgaccgggcgaacgcagacgaaaagcgatgagacggggaaagtcagtgttatgccggtcagacgatatgactggaacagccggaaggcacatacagtgtgctggggtgcgcttttccgccgtgcggtcacacaagacgttgtgttcgatactgacttaaaaattggtgaggatacgctgtttcttgcaaaatgtatccgacaggcagaaaaaatttcctgcatcgacaaggcactttactattactatgtcaatgatgactcggtgacgagcgggcattattcggcaggaaaactgacagagctgaaggcatggcagcgtatctgtgaagtgtttgcagatgaaccgttcgtgtatcggtctgcacgggcaggatatgcgctccggtgcagagaaattgtggtgaaatactgcaaggatgatgcttttatggagcaggcgtgtgccgaagcggaacgggagtttaagagaaatgccggcccccttctggcaggctggcttcgtgcagggcagtatcggtattttataaaaacgttgtattcgtatctgctctggaacagctggctgaaaaagaaacaggccagaaaaacttacgaagtggagatctgaatgaaaaaatccctcagtctgaatgcagcaatgagtgcgttcaagacactgatgaatattatcttcccgctcatcacattcccctacgcttccaatgttcttcaggtggaaaacctgggcaaagtgaactttgcaagctccgtctgcgggtattttctgctgtttgcaggccttggcatctcctcctatgcggtgcgtgagggctcccgctatgtaaacgaccggaaaaaactgtcggcttttgcatcggagatgttctccatcaatatgatctccacggccctgacctatgcggcattggcggtgacgatgcttttctggacaaagctccatgcctataccgacctgatgctggtgctgagtttacaaatcttttttacgaccatcggcaccgaatgggtgttcacgatctttgaggagtatacctatatcaccatccgaggtctgctgtttcaggtgctgtccattttcatgctgtttgccttcgtcaagacccgggatgactactgcatctatgcaggcatcacggtgtttgcggcggtaggtgccaatgtgctcaactttttccgggcccggcggtactgcaccatccggctgacaagaaagatcgactggaaaaagcacctcaagcccatcctcatcatctttgcatccacgctggcaacgaccctttatgtcagctcggataccacgattctgggcattctgggaacagattacaatgtgggcatttactcggtggcgggtaagatctatggcattgtaaagaacctgctttcggcggtgctggtggtgtctatcccgcggctgtcccattatgcgggcgtgggggacaaggcaaacttcaacaagctattcaacaatatcttcaacgcgctcatcgtggtggtggctccggctgtggtgggactgtttgccctcagccgggaggtcgtcctctttatttccggggaaagctatctggatgcggtgatgcccctgcagatcctgagccttgccctgatcgtctgcctgtttggctggctgtacaattcctgcgcgcttctgccctgcggaagagaaaaggaactgttctggatcacgctggtcagcggtctgctgaacgtggggctgaacatcctgctcatcccgcggttccgggagaatgcggcagcctttaccaccctgctggcagagctgtgctccatgatgctctgcatccgctgctccaggggcctggtcacggtctcagctgaccggcgcaccgttggctcggtgctctgcggctgtgtgggcatcgttcttgtctgtaccggggtcaaggcactgactctgcccaatctcatctgcattctggcggcggtgctgggctcagtggctgcatacgcagccatcctgctgggcatgaaaaatccgctggtgctggaatatctggaaaaagcgaagcagaagttccggaaaatatcctgaatggacaggacccgctgcgggggcgaacactccctgcggcgggtctttttcagaaaaaacggcggtttttggtgcgttccggcaaaatcaccacatttctttgcttctgcaacaaatgtttgttaataaattatccatctcccatccttgcaatacacacgctttttgtttataataaggatgtacggggaagttcgcagtgcgcggcccccgatgaagagcaaaattcgattccgaacgaaaagaatttgagaggagtttgttaccatgggtttaggtaagaaaacgatcgacgatcagaattactgcggcaagaaggtccttgtccgctgcgatttcaatgtcccgatgaaggacggcgtgatcaccaacgagaaccgcatcaatgcggctctgcccaccatccagaagctggtcaacgatggtgctaaggtcatcctgtgcagccacctgggcaaacccaagaacggccccgaggcaaagttcagcctggcacccgttgctgtggctctgagcgcaaagctgggcaagaccgttgtgttcgctgatgacgataacgttgtgggcgagaacgcaaaggctgctgttgccgccatgaacaacggcgatgtcgttctgctgcagaacacccgtttccgcaaggaagagaccaagaacatgcctgagttcagccaggagctggcttctctggcagatgcatacgttgacgatgcattcggcagctgccaccgtgcacactgctccaccgcaggtgtcaccgactacatcaaggataccgctgtcgg

SEQ ID NO: 387 - DNA, 6684 bp, unidentified
  source 1..6684: mol_type = unassigned DNA
atgttatgtacccgctgtaaaaaaagacaggcggttgtgtttgtgcagcggctggaaaacggcaaaccggtgcaggaaggctactgcctgacctgcgcgcgggagctgcatattcagcctgtggatgatttgatgaagcggtttaatatgaccgatgaccagttggccagcatggaagagcacatggccgacctgatgcagcaagcgcaggaaagcggcgccatgatgcccatgatggacggcgatatgcagaaccccgacgataccggggatgattttgtgcccggcggttcgccggtgttcccctttggctttggcggaacccccaaggctgaggagaagggcgaaaagtccaaaaaacagcgcggccgcggccagcgcaaatacttggacacctattgcgaaaacctgacccagaaagccaaggacggcaagctggatgccatcattggccgtgaccgtgaggtataccgcacggtgcagattctgtgccgccgccagaaaaataacccctgcctgatcggcgaagccggcgttggcaaaaccgccattgccgagggcattgcccagcgcattgccgaaggcaaagtgcccgcccgcttacaggataaagaaatatacctgctggacctgacggcccttgtggcaggcacccagttccgcggccagtttgaacagcgcgtcaagggcctgctttctgaaatcaaggccgccggcaatgtgatcttgttcattgacgaaatccacaacattgtcggcgccggggattcggacggtgccatgaacgccgccaacatcatgaaaccggccctgtcccgtgggcagatccaggttatcggcgcaacgacctttgccgagtaccgcaagtttatcgaaaaagattctgcgctggagcgccgcttccagcccgtcaaggtggaagaaccctccatcaatgatgccattgcggttatccgcggcgtaaaaggttattacgaaaagtaccactgcgtgcgtgtgcccgattccatcgtggcggatgtggtacacctgtcggaacggtatatcaccgaccgctacctgccggataaggccattgacctgctggatgaatcctgcgcctgctgcaatctgcgccaccctgaaattaccgagttcctgaacctgcaaaagcaggtggcagagctggaaaccaaagagcatgacctggaaaaccccgaccccgaaaagcagggcgatgccgctattgattacgaggaactggccaaaaccaagaccgagctggcccagctgcgccaaaagctgcccgcgctggagctgcgcgtggccgatatccaggtaacggcggacgatgtggcccaggttgtggagctgtggaccggcattccggcggttaaaatcaaagagaccgagtatggccgcctgatggggctggaagatgccctgaaagagcatatcatcggccaggacgaagctgtgcacagcgtagcgctggccgttaagcgtgcgcgggcagacctgtctggccgccaccgcccggcaagctttatctttgtcggccccaccggcgtgggcaaaaccgagctggtcaagcagctggccaatcagctgtttgataccgtggacccgctgatctccattgacatgagtgagtatatggaaaagtacgcggtgtcccgcctgatcggttcccctccgggctatgtgggttatgatgaagccggccagctgaccgaaaaagtgcgccgccatccttacagcgtggtcctgtttgatgaaatcgaaaaggcccaccccgatgtgatgaacatcctgctgcagatcctggacgagggcaagatcaacgatgcccagggccgcacggtggatttttccaataccgtgatctgcatgacctccaacgccggttcttcggaccgcaccgccctgactggctttggccgcaccgaagagcaggtcagccgcgaaaagagcatgaaagcgctgcaggagttcctgcggccggagttcctgggccgtgtggatgaagtgatcaccttccgcccgctggaacaggctgacctggaaaagatcgctgccctgatgctggacgagtacaagcccggcctggaagcccgtggcctgaagctggaatataccccgcaggcactggcagccatcgtgaacgaaacatccacccgttttggtgcgcgtgaactgcgcaagaccatccgcaaaacgctggaggaccccgtggccgaagccattgtggcgggccgcctgaccggtggtcagaccgtgaccctggcagcggatgctgacagcaagccgcagctggtgctgccggagtaagcgcgaatgaaaaagccgcgcgtattgctccaccttgccgcccttgccatggggctctgcctgctggccgggtgcgcggcacagcctgccgcacccgcacaggcaacgatcccccatatcgaaaccagcccccagcccaccgtggcccccagcccaacccccacccagacccctgcccaacagcaagatttacagcaggtgtacggcagctgtgggctgctggcatggcccagcgtgctgtacagcatttatctgcaggacgacgccaacccctggaccgaggaagccctggcccagacgcggcagaaccttgccgtggcggtggactggatcacccagcaggcgcagacctataacgcccagccgaaaatctattacgataccggcgaaaacaatctgagcacctttgccgcctacaaagccggtctgacggaagataccaccaccggcacaacgttctatgacgatgtggacaccctgaccgcacaggtggatgtggaattcatccagcagcaatacggcacggcaagcattggctacctgatctttctgccggtggagggggcttcctactccattctgcattatctggaggatggcggtaattacctgaatgaattcagctgtctttatctctatgattcctatgcgggggagaaaacctacaacagccccaccgtgtatgcccacgagatcctgcatctgtttggtgcggcagacctttacgtcggcagccgggatacgtttgtgacccagccgctggcgcagtatgtgctgaacacctggccggatgctattatgtattacacctacaacagcgataatggcatcagctatgaccatatcgaaaaaacgctctgcccgctgacggcctaccgcctggggctggtggacagcttccccgggagcgagcagttccctgcggcaacgcaggacccgcccggtgtgttcagcaacggcgcaggccagaactggaccgcaagcgatgaatcagcttgaacaggggaggtgaaggcatgtatggggatgaatggccgctgcgggtaacagggattgccagcgcggcggaatccgaatggcgcattggccagcaaacgccggagcgcacctgtgagggctggctgctggtatatgtaaaaagcggtatggtggaagagctgtgcgatacccaccgggtgctgctgcgcgccgggcagattttgttccaccagcccgcagagctgtttgccatgcgcgcagtgggcgaagttccgccggaggtgttccgcgtggaatttaccgcggacggcagtgcgatggattctttccgcagctgccacatgcggctcggcaacgccgaaaaaagctgtctgcgccagctggcagaaacggtgcgcgaggtgttccagccggtgcaggatgcctgccagatgcccacccgccgcgcggaaatcccgtttggcggcaaagagctgcaaaccatctatctggcacagctgctgtacctgttggcccgccgcaggcaacgcacccgcaaacaaagcccccgtgcccgcgccgagcaggagcaggcagcccttgtggaaagcgtgcgcctgtactttgcgcagaacattgaaaagccgctggcgctggaccaggtgtgcgatgccaatggctgctcccgcgtggcattgcagcaggcgttccgcgcccgcacccgcatggggccgatggagtatttctcctgcatgaaagccgaacaggcagcgctgctgctgacccaggggtacggccccggcgaaacggcccgtatgctggggtatggctccctggcgtggttcagcaggcggttccacgccctgaccggccaaacgcccggcgcttaccgccacgccccgcacccgctgcatctgtgcgaacggtaaaggtaacaacaaagttacatatcaaacatggaaacatctatttccatattgcgataaagacgttagaataaaatcaacaagggaacgaagcaaaccctgcggatgccctgttgaagatacaaaatcccggcaacaactttccatattgtgtaaaggagcgatcagtatgtctattttggtcagcggcggcgccggttacatcggcagccatacctgtgtggagcttctcaatgcgggttacgatattgtggtggcagataactattacaactcctgccccgaagccctgaagcgtgtgcgcgagatcaccggtaaggatttcaagtttgtggaagcagacatgaccgaccatgcggcagttgaaaaggtctttgcggaaaatcccggcattgactgtgtgatccagtttgccgcctacaaggccgtgggcgaaagcgtttccaagcccatcgagtattactccaacaacctgaactgcaccctgaacatcctggatgttatgcgccgttacgattgccataacatcatcttctcctcctccgcaacggtttacggcgaccccgccagcgtgcccatccgcgaggatttccctgttggtgcaaccaccaacccgtatggcactaccaaggtgtttaccgagcgcatcctgaccgactgctgcaaggcagacccggagctgaacgttgctctgctgcgttacttcaaccccatcggtgcacatccttccggaaagatcggcgaggacccgaacggcatccccaacaacctggtgccctacatcgccaaagttgccgttggcaagctggaaaaagtgcatgtgtacggcaatgattaccctacccccgatggcaccggcgtgcgcgactacatccacgttgtggacctggcccgcggccatgtggcagccatcaaaaagctggaagaaaagcccggcctgttcatctgcaacctgggcaccggccacggctacagtgtgctggatgtgattcatgcattcagcaaggcctgcggcaaggagctgccctatgtcattgacccgcgccgccccggcgatattgccgagtgctggtgcgatcccagcaaggccaagcgtgagctgggctgggaagctgagtacggcattgacgaaatgtgccgcgacagctggaactggcagagccacaaccccgatgggtataagaccgctgaataagctcacggttcaaagaaagcaataaaacgagagcaataaaacagggcgaccgggaaaacttcccggccgccctgttggtgtatcaggtagcgtttgtatgggtttaatgcgttagaaaaaagcgtttgaccctgtggagcccgtgggagcgcacattgtacgcccggccacgtaaggcgggatgccctcatcccgacgtgtgcgcatattacggcccaccatgcaggacgatgcgagcgtcgtttcctacacatggtttgcaggttcgcagcccaatatttgcgtttcttccctgtgcgatgagggcatcgcgccctagggtgtatctcaagcatccggttcctttttctcctgccccatcccctgaatctttgcgttcagcccggcacccaaaaacagcacattgatgttcacattcagccaaagcgtaatcagcacgattgcagccaaagaaccgtaaatgtacgataacttccagaaatgcccgatgtaaaacgagaatattttggaaaacagcgtccacaccgctaccacagcggcggcccccggcagctgatcccgtatgcggcgcttgccgccgggcacataggtgtagatcagtgttaccgccagcagcgaaagcgccaacgaaagcacagcactgatgctgagcaggctgtgcagccgctgcagcagcccgcccaccagggtatgcagcggcagcagcccggccagcccgcgcaggattggactcaggctttgcaccaccatggcaaccagcatcaggccctcaaacaaaaaggtatacagcacagcccacaaacggtcaaacattgttttgcgggcaccgggggtcagcttttgcaggcccctttgcaccgcggccatcccaccggaagcggagatcaccgtggtgatggcggcaaaggaagccatgaaggtggtggactgatcattcaggttggcaatcacatccaccgccattgactggatggccgggatatccggcaaaagctgggcaaccagcgcggcaatgtccgaaaccgaataaaacggcagcatgttgatgatgaccagcacccacatcagcagcggcagcgatgccgtaagcagcagcaaggtggcgtgtccggcgtatacggccatatccagcaccagatactgccgcagcaggtccagcagtgcaggcagcagggttgaggcttgttttttcatggcgttctcctgaatccccccgcgctcaggggcaaaataaaaaacattataaggcaacaccgcacaattcccgccttgcggcttaagcaccgctccggcagc

SEQ ID NO: 388 - DNA, 8165 bp, unidentified
  source 1..8165: mol_type = unassigned DNA
  misc_difference 2705: note = a, c, g, or t
  misc_difference 2706: note = a, c, g, or t
  misc_difference 2707: note = a, c, g, or t
  misc_difference 2708: note = a, c, g, or t
  misc_difference 2709: note = a, c, g, or t
  misc_difference 2710: note = a, c, g, or t
  misc_difference 2711: note = a, c, g, or t
  misc_difference 2712: note = a, c, g, or t
  misc_difference 2713: note = a, c, g, or t
  misc_difference 2714: note = a, c, g, or t
  misc_difference 3371: note = a, c, g, or t
  misc_difference 3372: note = a, c, g, or t
  misc_difference 3373: note = a, c, g, or t
  misc_difference 3374: note = a, c, g, or t
  misc_difference 3375: note = a, c, g, or t
  misc_difference 3376: note = a, c, g, or t
  misc_difference 3377: note = a, c, g, or t
  misc_difference 3378: note = a, c, g, or t
  misc_difference 3379: note = a, c, g, or t
  misc_difference 3380: note = a, c, g, or t
  misc_difference 3989: note = a, c, g, or t
  misc_difference 3990: note = a, c, g, or t
  misc_difference 3991: note = a, c, g, or t
  misc_difference 3992: note = a, c, g, or t
  misc_difference 3993: note = a, c, g, or t
  misc_difference 3994: note = a, c, g, or t
  misc_difference 3995: note = a, c, g, or t
  misc_difference 3996: note = a, c, g, or t
  misc_difference 3997: note = a, c, g, or t
  misc_difference 3998: note = a, c, g, or t
  misc_difference 3999: note = a, c, g, or t
  misc_difference 4000: note = a, c, g, or t
  misc_difference 4001: note = a, c, g, or t
  misc_difference 4002: note = a, c, g, or t
  misc_difference 4003: note = a, c, g, or t
  misc_difference 4004: note = a, c, g, or t
  misc_difference 4005: note = a, c, g, or t
  misc_difference 4006: note = a, c, g, or t
  misc_difference 4007: note = a, c, g, or t
  misc_difference 4008: note = a, c, g, or t
  misc_difference 4009: note = a, c, g, or t
  misc_difference 4010: note = a, c, g, or t
  misc_difference 4011: note = a, c, g, or t
  misc_difference 4012: note = a, c, g, or t
  misc_difference 4013: note = a, c, g, or t
  misc_difference 4014: note = a, c, g, or t
  misc_difference 4015: note = a, c, g, or t
  misc_difference 4016: note = a, c, g, or t
  misc_difference 4017: note = a, c, g, or t
  misc_difference 4018: note = a, c, g, or t
  misc_difference 4019: note = a, c, g, or t
  misc_difference 4020: note = a, c, g, or t
  misc_difference 4021: note = a, c, g, or t
  misc_difference 4022: note = a, c, g, or t
  misc_difference 4023: note = a, c, g, or t
  misc_difference 4024: note = a, c, g, or t
  misc_difference 4025: note = a, c, g, or t
  misc_difference 4026: note = a, c, g, or t
  misc_difference 4027: note = a, c, g, or t
  misc_difference 4028: note = a, c, g, or t
  misc_difference 4029: note = a, c, g, or t
  misc_difference 4030: note = a, c, g, or t
  misc_difference 4031: note = a, c, g, or t
  misc_difference 4032: note = a, c, g, or t
  misc_difference 4033: note = a, c, g, or t
  misc_difference 4034: note = a, c, g, or t
  misc_difference 4035: note = a, c, g, or t
  misc_difference 4036: note = a, c, g, or t
  misc_difference 4037: note = a, c, g, or t
  misc_difference 4038: note = a, c, g, or t
  misc_difference 4039: note = a, c, g, or t
  misc_difference 4040: note = a, c, g, or t
  misc_difference 4041: note = a, c, g, or t
  misc_difference 4042: note = a, c, g, or t
  misc_difference 4043: note = a, c, g, or t
  misc_difference 4044: note = a, c, g, or t
  misc_difference 4045: note = a, c, g, or t
  misc_difference 4046: note = a, c, g, or t
  misc_difference 4047: note = a, c, g, or t
  misc_difference 4048: note = a, c, g, or t
  misc_difference 4049: note = a, c, g, or t
  misc_difference 4050: note = a, c, g, or t
  misc_difference 4051: note = a, c, g, or t
  misc_difference 4052: note = a, c, g, or t
  misc_difference 4053: note = a, c, g, or t
  misc_difference 4054: note = a, c, g, or t
tcgcgaagcgacaaaagggggaatctgtcgagcagagcgagactgagagggcgagcccgtttgccgaacatgatttttactctttgtattgaaaaatcgcgccgccccaggtcaggccgccgccaaagccgatgcaggccagcggtctgcccggggtcagctgcccgctctcggccagctcgttgagggcgaccggaatgctggcggcgctggtgttgccgtggcgatccatgttcttataaaattttgccgggtcggcctgcagggccttgatgcagtggtcgatgatgcggctgttggcctgatggcagaccacccacgacagatcctcgagggtcagccgggtctcgtccagcaccgtgtgcaggcacttgggcagggcatccaccgcaaagcggaacaccgccttgccgtccatggtgatgggggcagagccttcccggctcggcccgcccgcatggaggacatcacagccggaaaatggcggctccggccccgtcgccgaacagcacgcaggtggagcggtcggtggggtccatcaggcgggaaagtgcttcgcacccgatgacgagggcatactgcccgcccagagtcgtcagcattccccgcgccacggccatgccatagagaaaaccggaacaggccgcgttgatgtccagcgcgggccggttttcgggcaggcccagtgccgcctgtacctgacaggccacgctgggggtggcatccggggcagaaagggtcgcgcagacacagcaggcaatgtccgccggggcaaggccgctgcggtcaagggcctgccgcgcggccgcaatggccagcgtggcggcagattcgtcctcggtgcaccagtgccgggtgcggatgccggtgcggctggtgatccatgcgtcactggtatccaccatgcggctcagcgcgtcattggtgatcgtccgtccgggaagtgccccgccggtggcgatcagctgtaaaccattcatgcgttcctcgtttctccgatctggcggtactttttatagcgctgatcggccagctgccggtcgctcatgcggcacaattccttcaggtgggtgcgcaaagcggcatccatgcgctcaaacagggccgcgtggcagcgctgggcaccgcccaccggctccgggatcacttcttccacgatgccgccgcggtacagatcctgcgccgtcagcttcatcatctcacaggcctcgccgctgcgggaggagtccttccacaggatgctggcaaagccctcggggctcagcaccgagtagaccgcgttttccagcatgaggatgtggttggccacacccagtgccagtgcgccgccggaggaaccctcgccggtgaccacggcgatgaccggcaccgtcaggccgctcatctccatcagattccgggcaatggcctcgccctgcccccgctcctcggcatccttgccggggtaagcgcccggcgtgtcgataaaggtgatgatgggacggccgaatttttcagcctgcttcatcaggcgcagagccttgcggtaaccctccggccccggcattccaaagttgcaggccagattttcctccagcgtggaacccttgcggtggccgatgaccgtcaccggcatcccgtggaaacgggccacgccgcccagaatggccgcgtcctccttgcactgccggtcgccgcgctgctcaaagaaatccgtgaacagggcagagatcgtctcgtcgatgtgtggacgctccgggtgacgggccagaaagacccgatcctcggcagtcagcgggccgcaggagcgcaggatctcgtcctcttccaccgccagctctgccagttcggacgcatgggcggtgatggcctccatgtcactgccgctgcccttcagcgcggcgatctgtgcgtccagcggggccagctgctccaaaatatcttttatcattcgtgtttccctccggcatgaagctgcaggacctggatcagcgtatcccgcagctgactgcggggcaccacctgatccacaaagccgtgttccatctggaattcgctgcgctggaacccggcgggcagtttttcaccgatggtctgctcaatgacacgggggccggcaaagccgatgagtgcccccggttcggccagcatgatatcgcccaggcttgcaaagctggcggtcacgccgccggtggtggggtgggtcagcacgctgacgtacagcccgccctttgccgaaaagcgctggatggcggcgctggtcttggccatctgcatcaggctgaaaatgccctcctgcatccgcgcgccgccgctggccgaaaagatgaccagaggcaggcgcttggcagtggcgtactccacggcgcgggtgatcttctcgcccacagccgtgctcatgctgcccataaagaaccggctgtccagcacggctgccacacaggccacgccgccaatgcggccgacggcggtgacagcagcctcgtgcaggccggtcttgttctgggcggcggcaagtttttccccgtatccggggaagttcagtacatcctgcggatcaaggtcagcgtccagttcccggaagctgccgtgatccagcaccagactgagccggtaatacccgccaatgggcatgtgatagccgcagttggggcagacatacaggcttttgccccacagggtgcgggcagcgcggcggccgcactgcttgcactccacaaaccgcnnnnnnnnnntccggccggggaacaggtctcggatctcgttcatggtgttttgcctcagatatgtgcggtgatgtagttgtagatgtcacccacggtcttgagctttgccagctcctcgtccgggatggacacaccgcaggcatcctccagcgccatgttcagctccacagcatccaggctgtcggcctccagatcctcggtcaggctggcctccatggtcaccttgtcctcctcgcagttcagggtgtcaacaacgatcttcttcatttcttcaaacgtcatggtaatattctcctttgattgacttgtatttttattatctaaaaagtttgaggtttcttgcgaacacgaccattatatctgaatcgtcggataagtcaagaataatagctaaaatattttatcttttacaattctgacacacttttctccacaggggcagttcctcttttccattgccctttttccccaaacgtgctaatatgggttcagcactcagacaagaaggaacgaaaggatggatcccatgaaattcagcgaaatgagttatacccgcccggacattgatgccctgctgggccagtgcaaggcgctggccgccaaggccgccggggcagccagcggcgaggagctggtgaatgtttactacgagcagagccgcgcctnnnnnnnnnncctttgccgattacagtaccgccgcacagctggcaagcatccactacacctgcgacacccgtgacgcttattggaaggccgagcaggacttctttgatgccaacggtcccgccgtggaaaacgcacgggtggagatcagccgggcatttctggccaacgcccatgtggatgcgctgaccgaagcctttggcaccacctgcgtggccggtatgaagaacgccgtgctgggcatggatgaccgcaccgtggagctgcagaaggagtacaatgcccttgtcagccagtaccagcaggtgtacggcggcgcactggtcgagtttgacggcaagcagctgaccattccccagctgggcccctataaggagaacctggaccctgccgtccgccgcgccgcctacgaggccgaggccgcgtatttcgatgcccaccgtgacgagctggatggcctgtacaccaagatcgtcaagaacctgaacgcacaggcgcagatcctgggctaccacgattacagcgagctttcctatgtgcggatgaaccgcatcggctacggccctgccgagatccggaagttccgcgaccaggtggccagcgatgtggtgcccgagctgnnnnnnnnnnnnnnnnnnnnnnnnnnnnnnnnnnnnnnnnnnnnnnnnnnnnnnnnnnnnnnnnnncccggctacgatgcccggatggccgctgcccgcaccatgtaccacgagctgagccccgagaccgcagaattcattgacttcatgcaggacaatgagctgttcgacgtggagagccgccccggcaaaatgtccggcggctatatgaccagtctgcccacctacaaggccccctttatctttgccaactggaacaacacctctgccgacgtggacgtgctgacccacgagtgcggccacgcctttgagggctatgtggccgagcgtgaccccaaggtccccgcagacctcgagtgccccggcatggagagcgccgagatccactccatggccatggagttcctgacggctccctggcaccatctgctctttggcaaggacactgagaaatacgccctgctccacgccgaggacagcttcctcttcctggcctatggctgcattgtggacgagttccagcacaggatgtaccagaaccccgacctcaccccggacgagcgcaacgccgtctggctggaactggagcacaagtaccgcccctggatcgatttcgacaacctgcccttctatggccgcggtgccggctggcagcgccagctccacatctatgagtgccccttctactatattgattactgcctgtccaccatggcagcactgcagttcttcctgctgagcctcaaggaccacaaggatgcctgggagcgctacctcaagctggtgcgccgtgccggtctggccagctacacagagctgatgcagaccgccggactgaaggttccctttgaggatggctcgatcaaggccatcgcccagcagatgggccattggatcgcagagcatcaggtgtaagcctcccggacctacggagattttttcttgcaaaaatccgctcttttctatgaaaaagcacagcgcccccgttcactgcaagatcgcagtgagcgggggcgctttcttgtgaataggaggtggattttatcgcaaatacagactatggggagatacggagcggcacaaactccataaccggaaagaaaaatttccataaaacgcccaaaagccctcggataagtcatacctatacaagaaagtttgaacttttcgtgaattttctgtgtttcgaccatggacaggtgggaacagttctgctacaatgggagctgttctttccgccggttcccacgcggcggtttttgtttttactataacacaggaggaactttcatgcttgaaaacatctttcacctgaaagagaaccacaccgatgtcaagaccgaactcatggcgggtgtcaccacctttatgacgatggcctacatccttgcggtcaaccccagcatcttgtccgcttcgggcatggatgccaatgcggtcctgatcgccacctcgctggcatcgttcgttggcactgccctgatggctctgctggccaactatccgttcgctctggctcctggcatgggcctgaacgcctacttctcctacacggtcgtcctgaccatgggttacagctggcagctggccctgatggccgtttttgtggagggcatcatcttcatcgtgctgagcctgaccaatgtgcgtgaggccatcttcaacgccatccccatgaccctgaagagcgctgtcagcgttggcatcggcctgttcgttgctttcgtcggcctgcagaacgcaaagctgatcgtgaacagcgattctaccctcgtcacctatcagcacttcaagggcgagaccttccacagcatcggcgtgggtgcgatcctcgctctggtgggcgtgctcatcaccgccatcctgctggtcaaaaaggtcaagggcggcatcctgtacggcatcctcatcacctgggtgctgggcatcctctgcgagctgaccggcatctacatccccaaccccgatgccggcatgtacagtgtcatccccaccagcttcatcagcttcgatttctctgctctgggcaagacctttggtcaggtgttcaagaccgatttctccggcgtgggcatcctgaacttcttcgccgtgatgttctccttcctcttcgttgacctgtttgataccctgggcaccctgatcggtgttgcttccaaggccgacatgctggatgaggagggcaagctgcccaacatcaagggcgcgctgatggccgactccatcgccacctgcgccggtgccgtactgggcacctccaccaccaccaccttcgtcgagagcgcttccggcgtcaccgagggcggccgcaccggcctgacctccatgaccaccggtgtgctgttcctgctggccgtggtgttcagccccctgttcctgaccatccccagctttgcgaccgctccggccctgatcatcgttggcttctacatgatgggttctgccctgaagatcgagttcgatgatcctgctgagggcattcccgcattcctgaccatcctggcaatgcccaccgcatacagcatctctgagggcatcgccatcggtgtcatctcctggaccctgctgaatgtcatcaccggcaaggccaaggagaagaagatcagccccctgatgtatgtgctgaccattctgttcatcctgaaatacgtcctgctgtaacaggcatttgcggcaaacagaaagccccggctccggccggggctttcgtgcgtttattggttcctgtgcgggtggggcgggcagggttcagccgccgaacagcccgaaaaagctggtgtgtgtcatgcccagcaccagaaacagaagaatgagggcaaacagcaccccaatgatgatgtccatctggtggaccgtgagggggaatttatcgtagagcttttccttggggttgacgaaattcgggtcgttgttgtccagcagagtcttttttctctcagtgctctgggctttggcggcggcaagttctgcctgctccttttccagctgggcctcccgctgggcaagcagtgcctcacggcgggccagctcttcctctcgctgggcctggttcatttctgccatggtggtatcctccggcgttttttctaccagtataccatagaattgtgacagaaaaaactcctcccgcaaaaagcggccttattccgccagcagatcctccaccacatccatcagctgagacggatcgagctggcacgcggtacagcgcgcggccaggcgaaggacccgcaccgggtcaacggagacatctgagatgaaccgcagttttcggtgtcgtccgtgagatgtagaatgcgcggcgatgccaaaggatgtatacgcaccacacgcgggatgataaagtcgttccataacacaatgataccaaaacacaccaatcacctctctatcaaaattgtcacgccgctttgaaacggctgcatgaatgcaggttcgctgcccgcaaaatgttctgacaaaatttatataccatctcttggcttcaaaataaacagccaaaatttcaaaatttggcggcgtgttttgcatgtccggtgaaaccggtggtgcagtaaaaagacgaaccggaaaattgaaatgaatatttttacggaatatcgtagaaaatttagaaaaaatcaacttcacgcagcaacagatgaaagaatgctccgcggaaaatcgaaagcacaaaaagaaaaatctttgccgcatcttaaccactttttgacagaaaaagttgcgaaatcagtcgtaagatcgagctttctggtatatcacttgttcgctgtgcggataaggcggcctcttctgctttgccacaagatcgtctgccgcagcccccggcactgcccttgcctgaaccactttcactctggatgcaaaccagatgaaaaatccgacgggccgtgtcacttgactttccccttgcaggggagtatactccggggcagtgaaatattcggctatgacgagaaagagtacccggaaagaatgctgcagagagctgccggatggtgcaaggcagtgcagggtgtccgtgggaagatcctctccgagctttccggctgaatgggcggcatctgcgccccagtaagcgggaacggcaggcccccgttatcacgggccgcgcattgttggatgcgcactgaggggccgggctttgcaccggcaataagagtggtaccgcagagga

SEQ ID NO: 389 - DNA, 46955 bp, unidentified
  source 1..46955: mol_type = unassigned DNA
ttgatgagaccgcttgccttgaggagatcagcgtcaacaactgtaccgtcaacaaactggtcaagatcagaaacattaacaacggagtacttagtagcgaaaatgttgttgaatcctctcttagggattcttctggtcatgggcatctggccgccttcaaagccgggtcttacgccgccgcctgaacgggcattctgtcccttgtggcccttgccggcagtcttgccgttgccggagccgtgacctctgccgattctcttgacatcctttacggagccagcggcaggagaaagttcatataacttcatatcaatcgcacctccctgcaatttaagcgttagttacattaacgaggtgggaaatcttcttgattttaccctgaacagcagcgttatcctgctgagtagtagtatcgccgatttttctaagaccgagggaattagcagtagcgatctggtctttcttacagctgttaagactttttacgagcttaatggtaaccattactgtcatcctccttagcctaaaatttccttaacggatttgcctcttacttcagcaacttccttagcgctgcgtaagctggagagaccctgaagggtagctcttacaacgttgcaagcattgttggaacgaagagacttggttctgatatccttgataccggcaacttcgataacggcacgaacaggaccacctgcgataacaccggtaccgggagcagcgggcttcatgagaacacggcctgcgccgaattcgccgataacctcgtgaggaatggtagagcctctgagggaaatcttgattaaattcttcttagcatcttcgatacccttgcggatagcgtcaggaacttctccggactttccgataccgaagccaacggtaccgtttccgtcgccgactacaacgagagcggcgaacttgaagatacgaccgcccttaacagtcttggaaactctgttaatggcaacgaccttttcggtgagctcgagattagtagcatctatcttagccaaaagtataacctcctttaaaagttatccgatttaaaataaatcagaagttaagaccgccctgtcttgcaccgtctgcaagctgagcaactctgccgtggtaaaggtaacctgctctgtcgaaaacaacatcggtgatacccttttccttagcagcggcagcgatagcctcgccaaccttgaatgcgccgtccttgttgccgccattgccctcgaagcccttgtccatagaggaagcgcttgccagagttacgcctgcaacatcatcgataagctgcgcataaatatgcttggagctgcggaatacattgagtctggggcaggtagcagtaccgctgatcttataacgaactcttgcctgtctcttggctcttgcagcctttctgttcatctgcttaaccatttaatattcaactccttatcaaactggagaatagtagtaacaactgtcccattctctttcgtattgagggaaaacgtaaattcggtaaaaaattacttcttacccttaccggccttaccttccttgcggatgatatgctcgccggtgtagtggatgcccttgcccttataaggctcgggaggtctcttctcacggatctcagcagcaaactgaccaacagcctgcttgtcgatgccgtttacgatgatcttggtagcagcgggaacatcaatggtgatgccgtcgatctcaggaacgataacctgatgtgaataaccgaggttcataacgagattcttgccctgcttctgagctctgtaaccgatgccgtcgatatcgagggacttggagaagccgtgtgtaacaccttcaaccatgttggatacgagagttcttgtaagaccgtggagtgacttgtggagcttatcctcagtaggacgctcaacaatgatttcgttgccttccagcttgatgatcatatccttgtggaaggacttggtaagtgtacccttaggacccttaacggtaacaacgtgaccgtcgatcttaacatcaacgcctgcgggaacagctattggctttctacctattcttgacattgtacgtgttcctccttaccaaataaatgcaaggacttcgccgccaacgttaagctctcttgccttcttgtcagtcataactcccttggaagttgacacaatagcaattccgagacccttcatgaccttgggcatatcctcacagctggagtaaatgcggagaccgggcttggaaactctgcgcaggccggtgataacctgagatttattttcgccgtacttgagggtaattctgatgataccctgcttgccgtcgtcaattatctgatagctcttgatatagccttcatcaacaagaatctgagcgattgccttcttcatattggaagcaggcacatctacagtagcgtgcttagcagtgttagcgttacggattcttgtaaggatatcggcaattgaatcggtaatttgcatacctttaacctccttgtaaaaattcagcggtttaagacgaaatcagcctgtggtaatttgattaccagcttgccttcttaacgccggggatctgacccttgtgagcaagctctctgaagcagattctgcaaattccgaactttctcatgtaagcgtggggtctgccacagattttgcatctgttataagctcttgtagagtacttaggagttctctgctgcttgatcttcattgaagttttagccatttaattaaacctcccaattactttgcaaacggagcgcccatgagctcgaggagctccttagcttcttcgtctgtgtttgcggtagtgataatgttgatatccataccacgaaccttatctattttatcgtactcaatttcggggaaaatgagctgctccttgataccggtggagtaatttcctctgccgtcgaaggagttgccgttgattcctctgaagtcacgtacacgggggaacgcaacattgaaaagtctgtcgaggaattcgtacatcttttcgcctctgagagtaacctttacgccgataggcatgccctcacggattttgaagtttgccacagacttcttagcacggcaaacaacaggcttctgacctgtgataagagccaggtcgttcatgatagcgtcgatgaccttggaattgtccttagcctcgcctgcgccgacattgataacaaccttgtcgatcttggggatctgcataacgctcttgtagctgaacttcttcataagtgagggagctactgtgctgacatataattccttaagatttgctgccatggtaggtaactcctttcatcaataagatttgccgcagtctgcattcttgcaaactctggacttgctgccgtcagcttcgatcttgtgaccaagtctggtaggcttgccgcagtgagggcaaacagccataaccttgcaggcataaaggggagcttcgcactttacgatgccgccctgctggcccatctgacggggcttaacatgcttggtaacgatattgagaccttcaacgataaccttctgctccttgggggaaacctcaagaaccttaccctgcttgcccttgtccttaccggaaaggataacaacagtatcgccggttttaacgtgtaacttattcataactcggcacctccattaaagtacttcgggagccagagaaaggatctttgtaaagtccttatcacggagctcacgagcaacaggtccgaaaatacgtgttcccttggggttcttgtcctccttgatgataactgctgcgttctcatcaaaacggatgtaagttccgtcttctctgcggagaccctttgcggaacgaacgattactgccttaacaacgtcgcccttcttaacaacgccgcctggtgttgcttttttaacggaagcaacaactacatcgccgatattagcatatcttctgcgtgtgccgcccagaactctgatgcacataagctccttggcacctgtgttatcagcgacctttaaataagtctgcatctgtatcacagcgcattaactccttccttaacagtgaaatacggcattaggcaggttttgacctgcctgataccgattgatcacattaaataaattatatcgtctcaacgctgccgtgtgtttcgtagtaaatgttacatccgacctgtaacggcaacattaagattataacataccgcaaggcatttgtcaataccgcagggcaaaattaccccttggcattttagacaaatttcaagcaaaaatcacttagccttttcgataacctcaacaagtctccatctcttatccttagaaagaggacgagtctccatgatctcaactctgtcgccgatgttgcagacattctgctcgtcgtgagccttgagcttaatggttctcttgatgatcttcttgtaaagggggtgctttacattatcctgaattgcaacaacgatagtcttatccatcttattggaaactaccttgcctactcttgtttttctaagatttctttcagccattataatgtcctcccttcacttactgagcattggactgctcacgcataatggtcttgatgcgggcaatgtccttcttaacagcctttaatcttgcgggattgtcaagctggtttacagtgtgctggaagcgaagagcgaaaagctctttcttaaggtcaacgagcttgttttccagctcctgtgcagtcatatctctgatttctgaagccttcattagttgctcgcctcctcttccttagctacaaacttgcacttgatggggagcttgtgcatagcgagacgcatagcctctcttgcagtctcctcgggaacgccggcaatttcaaaaagaactcttccgggctttacgacagcaacccagtattcgggagaacctttaccggaacccattcgggtttcagcgggcttctcagtgatgggcttgtcggggaaaatcttgatccaaacctgtccgcctctcttgatgtatcttgtcatagcgatacgggcagcctcgatctggttggaggtgatccaagcgggctcaagagcctgaagaccatactcaccgttggaaaccttgtttcctctgagagccttaccggtaagtcttcctctctgaactcttctgtacttaactctcttgggaagcagcattatgcattacctccttcattcttattggagcggggtctgtaaccgccctcacgtctcttgccgtcattgttgcggcgctttctctcaggcttttcagcgggagccttgttaactcttgctgcggaagcctcgcccttaaggatctcacccttgtagatccaaacctttacgcccagacggccgtaagtggtgtgagcctcagcaaaaccgtagtcaatatcggcacggattgtctgaaggggaatagtaccctcgtggtaagtctcggatcttgcgatttcagcacctgcaagacggccgcctaccttaaccttgatacccttagcgccgagcttcatggtacggccgatagcctgcttcatagctcttctgtaggatacacggttctcaagctgagtagcgatgttctcagcaacgagagtagcgttgaggtcaggctgctttacttcaacgatgttgatgtaaacagacttgcccatcatcttttcaacgctgagacggagcttttcaatattttcgccgccgcgtccgataacgataccgggcttagcgcagtaaacgtgaattcttaccttatcggcatatctttcgatctcaaccttaggaacacctgcgtccttgaggctcttcttgatgaaattacgaacgttgtagtcctcaacaagagtgtcgccgaaagcagccttatttgcaaaccaacgggaatcccagtcctggataacgcctacacgcagaccgtggggattaactttctgtcccataatttacctcctctttcgacttattctttttctgctacaacgagagtaacgttggatgttctcttgttgatgcggaaagctctgccctgtgcacgaggcataatgcgcttcatgataggtccggggcaaacgaagcactcggaaacaatgagattctccttgttcattccgaagttattttcagcgtttgcaacagcagacttcaaaagcttctccaggtattcgcaggcagacttaggtgtgtactttaaaatcgccatagcagtttcaacgtccttgcctctgatgaggtcgagaacgatctgaacctttctgggtgctatgcgagcattagttaatgatgctcttgcttccatttaaaaatctctcctctctaccttacttaccgttgttggatgtcttggagcctgcatggcccttgaatgttcttgtaggtgcgaactcgccgagcttgtgacctaccatatcctccgtaacatatacgggaacgtgctttcttccgtcgtggacagcgaatgtgtgtcctacgaaatcagggaaaattgttgaggatctgctccatgtcttgagtaccttcttctcgccggcctcattcatggcaataactctctttaaaaggacttcctgtacgtaaggtcccttcttgatacttctgctcattggttttcctcccctctcagatgtttagaggcaagatactgctgattttgcgcttgacaaaatcagcacttctcccctttacgaatccatgagtataataatattttgaagtttacgctgcgtcatgcagcatatgattacttaccgtttcttctctttacgatgaacttatcggaacggttatgagtagctctggtcttgtaaccgagtgcgggcttgccccaaggagtaacaggtccgggacggccgacaggagacttaccttcaccaccgccgtgggggtgatcgttggggttcatgacagaaccacgaactgtaggtctgatgcccttgtgacgggtacgtccagccttaccgaggttaacgttctcgtgatcgatgttgcctacctggccgatagtagccatgcactcagcagcgatctttctcatttcaccggaaggaagtcttacgagtgcgtactcatcttccttacccatgagctgagccatgttgcctgctgctcttacgagctgagcacccttgccgggataaagctcaaggttgtgaatgaaggtacctacggggatatcagcaagtgcaagtgcgttaccgggcttgatatcagcatcggagcctgctcttacaacgtcgcctaccttaagaccgtagggagcaatgatatatctcttctcgccgtcctcgtactgaacaagagcgatgaaggagcttctgttaggatcgtactcaagagtaagaacagtagcgttcatgccctgcttatctctcttgaaatcgatgattctgtactttcttctgtttccgccgcctctgtgacgaacagtgatacgaccatagctgtttcttcctgccttcttatcgagagaagcgaggaggctcttttcaggagctaccttggaaagctcgctgtagtcagtaacagtcatctgacgtcttgaaggggacgtaggcttatatgacttaattgccatgtgatttcaactccttaaaatggttttgcgaagagcaatgctctccatacattccgtttcgggaagatcccaaaaggattacatcatgccgtcaaagaattcgatagtctttgaatcagcagtcagagtaacgattgccttcttccaagcgggagttgtgcctctgctcaggcctactctcttagcacgtcctctgcaattcatggtgttaacgcttgcgaccttaacgccgaagagctcttcaacagccttagcgatctcgatcttgttagcatccttagcaaccttgaaagtgtatttgttttcctgcagtccgccaatgctcttctcagagatgatgggcttgataacgatatcctgtgcagtcattatgcgtacacctcctcaatctttgcaaccgcatcctttacaacaacgaacttgtcgtagttgaggatgtcgtaaacgttgattgtgtttacgagagcggtcttaacgccggggatattagatgcgctcttgatgaccttagagtcaacctcgggcataacgatgagagccttctgtccctcagcgccaacagccttgagcatcttaacgatatccttggtcttgtactcgttcatagcgatagcgtcgagaacgatcatatcgccggaaagaaccttagaagaaagagcagacttcatagccagtctcttgagcttcttgtttacagtgaaacgataggttctgggcttaggtccgagagcaataccgccgtgtgtccactgaggagcacggatggaaccctgtcttgcgtgacctgtacccttctgtctccagggctttcttccgccgccgcttacctctgtacgggtaagagtggactgtgtgccctgtctctggttagcaaggtaatttacaaccattgtgtgcatagcaggaacattgggagtaataccgaaaattgcatctgacagctcaatgttggaaacctcattacctgtcatgtccataactttgatattaggcattatcgcttcctccttccattaagctttcttaacgcagtcaacgattgttacaataccgttcttaggaccgggaattgcgcccttaactgcgataaggttgttttcagcatcgatcttaacgatctcaaggttctgaacggttaccttttcagcacccatgtgtccggggagagccttgcccttgaagattcttgaaggggaagagcacgcacccatggaacctgcgtgtctgtgaacaggaccggtaccgtgagtttccttaagtcttgcattgttatttctcttgatagtaccctggaagcccttaccctttgaagtaccgcaaacatcaacgatgtcgcctacctcgaaagaatcagccttgagtacgtcgcccacgttaagggactctgcattgtcgagtctgaactccttaagtgttctcttgagagcaacgtcagcctttgcgaagtgacccttcataggcttgttgacgagcttctctctgatgtcgccgaagccgcactgtactgcgctgtagccgtcgttttcaacggttttcttctgaactactacgcagggacctgcttcaacaacggtaacaggaataacctttcctgcttcatcgaaaatctgagtcatgccgattttcttaccgatgattgcctttgtcatgattttttcctcccttggttaattggttgatcctgtcggaccaacattgaccccacatcgtcgggatatcttagctttaagcctgagatcggattacttgatctccattacgatatcaacgcctgcgggaagctcaagaccctgaagagcctctgtagtctttgcagtaggacggagaacatcaataagtctcttatgagttctgagttcgaactgctcacggctgtccttatacttgtgtacagcacggagaatggtaacgatctccttgtctgtaggaagaggaataggaccggaaactcttgcaccgctgcgcttagctgcatcaacaatctttgctgctgctgcatctactacagcatggtcataacccttgatcttgattctgattttttcattgactgccacttaaatcgcctcctataaaattttgcatggggacgagtttgcaacacccttttcctgccaaaacgttttacacgctgccgtgtgttccgcaggaaccgctataaaaaagcccgcagacaatcacttgtcagacgggttcagcataaatacacaaagcactcacctatgggtaaagacccacggtttgagacactaaactgtgttcggtattacagccgcccggtttaaaatcggacatactctgcggaaattcccttacataccgtaagcaaccttccgcttcatcgcatatcattcgcagtcacgcaagtagtattataacacacgcatctgcatttttcaatagtctgcggaaattttatgcgtagattttctgcgccgttttccgcattttttagtttattctgcacaaaagccttatttccagccccatttattgaagtacatgaacatggatctgagctgtatgcggaaatacttattgcttttcatatacgcacgctcccacaggtgggtaacgcttatctggggcagatacattgtcctgccgtacttctgagcctctcttgtcaggtctgcatcctcgctgtaaaggaagtatctctcgtcaaagccgcctatacttttaaatatgtcagtccttatgcagataaagcagcccgaacagaagccgcagtccacaggctcagtcacattctttcccctcatggtgtattcgtcacgccaccttttgaaagggttgccgaatttctccagcctgccgcccatcatgtacttcacgctgggggtgagcttgggggtgaactgctccgtgccgtcctcataaacaagcttgggcaccgccatgacaacatcgtcatggctctcaaaatagtcaataaactcccccactgcgtcattggtgagaaagatatcggggtttattataaaatggtactttgaatcaagcatatccatgacggcgttgtggcccttgccgaagccgccgttctcgtgattttccaccacagtcacctgcgggaatttttgccgtatgatatccgcagtgccgtcagcggacatattgtccgatattatcagcctgaaatccaggtcacgggtctgctccagaatggaagcgaccactttttctattttgtccgcattattataggtaactatgcagcctgtggctttggggcgtgtattcatttatatgccttccttattatagtttgctcctgtactccacaggcggtatgtgctcatactttttaaagaccgcagagaaatacgagctgtcgggaaatcccacagtctcggcgatctcggagatgctcttgtcggagaataccagcatttcctttgcgtgctgtatccttagctttgccagatattccatggggcgcatacggaagttgcgcttgaacagcctgcaaagatgctgctcggtgatgcctgcaatatccgaaagagtgctgagctttatctgctggaaatagttgtcctcaatgtactgaagaacatctgccagagccgcagtgttcactgaggaaagctccgactgacggttatctgccagcttgcggtattctatcagcaggtcatagagatgaacggaagcgtaatgatttccgtaaagcttgtcacttttaatagtatagtatgccttgccgatgatgcgctgcatacggtcagcaccgccgtgaacggcaaagtgatttagtccccacttttcaagcagggaagccgattcatatccgctgaaggacacccagttgagcacccacggctcagacaccgcctgatagctgtggggacagcccgcagggataaagcagaccgaatccttggtcagctcatgctctgtgccgttaataacaatttttcccgcacctctgcgggtaatgagaaactgcggaaattcatagcctgaagggcggtttatgggaaactgcctgtattcaacaccgattcctatcacatacagcggaagctctttttcatcacccagaacgggaaaaacctgttgctgcacttgtaatttctctcctttgcaaatatggattcatatatataaataataacacgagcaggcgggcttgtcaaggcggaacacaaggcagaattatataatatagtatatccggacagactgatttttccgcatatcggggctgaaaaacggcaaaataaggcatttctgcatttatgcctgaaaaaaaaaattacacaaagaaaatttgaacatcggcgtaaatccgacacatagcgagaaaaattgtcactaaattcaataatctcagttaaaataaaatgtgcattttgacgaacaagctgtgcaaatgtacaatattcctaaaaaccacttgattttttcggtcaatgagttataatagtaacaaagtgtaaccgctttgtaattattaaacgtttttgaacgtcggggcatacccgtgagagcctgcaaattctccgatatgctgtgcgttacagagtgcaatcggttacattttggcacataagccaaagataaaagaaatcagttgaaaccgaacgcattttatgttataatatcccacatctcgtacaaaagacagagaaaggagatgctgtatgaacaacggaaagcagaacaagctcgtccccatgctcaaagcccccgttaccttcgccgaaaacgtcggtgcgctggtttgcagctgtgcagagcttgccgttaaatatgctgccgcttttatctgcggagcgggcagatacgtaaaaaataccgttgcacctctcggaagcaacattgtacatctgataaaaacagcttcatcaaaggcttcctcctccgccgcaaagcgcagagaggatacagccgtaaagctttcatcatttaaaagaagaaccaagatattcggcgcatggcgtgccgcagttatgcagttcagggagagcagacttgccgcaaagagaaaaggcggctccgcaaaggctttccttaacatcgcattccccgcagcctccattgcactgcttgttttctgcgtaaataccgtaatgtccaccgattacggcgtttctgtcgagtatgacggcgctgaggtcggcgttgtaagcggcgaagaggttctgggcgaggctcagtgcgttgtagccgacagagtaaagtactacgataccgacggcgatgtttacgttaccgcaaccctttccatcaagcctctggcttctgccgataccgttatcgaccagaatacactggcagcaaagatggaagaccgcatttccatgaaatacgacgaaaagcagcccgaggaatccgaacccgaaacaggggaagcaatccccgaagccattgagggcaaggtaaaggcttatgccgtaagagttgacggtcaggtgatcggagcagttgaagactattcctctatcgaagaagcacttgacgaaataaagcagccctatgactcagacgagtacattgagataaactttgataaggatatcgagtacgaccttgaggaatacgttgatcccgaagagcttgttgaccccgaagatgttatatccacacttacaggcaacgaagcagctcccgaatattacgaagtacagccgggcgacaacctctggaagatcgccgatgccaagggtatgacccttgcagagctgagcagctgctacgctacatataacggacaggtcatcgatgaccttgaaaacagcattctcagggtaggaactcttatcaagatcgaatccgaggtgccctatctccaggtagagtgcaacaaggagcagactttcagaagcaccatcactcacgagaccatcaccatcgaagatcccgagcttcccgagggacagaccatagtcgagacagagggtcgtgacggcgagaagctttccagaaagcttgttacatacagagacgataccgttatcaggaaaaagaccattgatacgattattgttgagcagcctgtttccgagataatcagaataggcacagcaaaggcttccgatattccctacgacgctcccgagttcatcaccgcaagcggttcgggtgaatatgtatggcctgttgacggcggatatatctcctcccaccagggcgacggaagaaaccacaagggcatcgacatagcagctccctacggcacgcccatttacgctgccgcaagcggaacagttaccgatgcaggcacaggctggaacggcggctacggaaactgcatcgttatcgagaatgacgacggaaatgttactgtatatgcccatcaggcagagcttgccgcagaggtaggcgactatatcgaggcaggtcagcttatcggatatgtgggcagcacaggtgattccacaggaaaccacctccacttcgagatacgcaaggacggcaagtaccttgaccccgaaaactttgtagcacagtaaaaataaaagtcggataccgtatggcgtccgacttttttatatgtcatcatataaacaaaagaacagacctccctgcaccacacgcacggaggcctgttttcagttcttatcaaaaagcgaatttacactgttcagcatatcatacgcctgcttcggaaggcttccgctgcctccaaagctgctctccacctgagaaaatgcggaaagcacagccgatctcatcatgtccatcatttcgctgtcaccatcggaaaaaagctttgcaatgtcaaaaatacgctttgcagatgcctcacccgtccagtccatgccgctcagggactcaaatatgccgtgagcagtggtcaggtctatctcatcgccgtcaataaacattttcagcaggtcatgattttcgcaggcagtctcatcgccgctgaaaaattcagcaagcattctccgtgcagtctccacatgggcaaggcgctcctccagaatagcccccagcagcgattcatctgcctcaggctccttttcggcggaagtttcgggctttgaacccataagctcggcaaatccgggaagctttttaagactgtgtatctcatgcaccgcagaatgtgactgcgaagatgcctttatgcaggtattctcgatcctgtcctgtgaggactgcaaagatataatgtctgacaaagatgctgtgtcgctgacatcagcctgtcgaacttccgctgtctgaaatgtcgcataagcgcttgctgcgcctgccaatacttgtgctgtcatatttacatccccctttatcaaaaattaccgcaaaaacctcgttatcttatatatcggcagaaaagatagatactttaactatttttcttttgattatttcaccactatttgtgcgaaaattacatttttgaattaaagctgaatggcaacggttttaccgattgacaactcaatccgtgtgtgctaaaattttcattatagcaataggtcagtaaggaggacttgaagtgagcagattcagggatttgcttgacgatataacaggaggaaaatactcccccgtaaaacgaatgtcctcggcaaggataatcgccgcaggataccttatactcatactcatcggaacttgtctgctgatgctcccctttgcatctaagggtgagccgccccgctttgcggacgcaatgttcacagccacatcagcctcgtgcgttacgggactgatagtttacgatactttcagccagtggacgattttcgggcagatagtgctgataatccttatccagataggcggaatgggatttatgaccataatctctctggcagcactggcaacaggcagaaagatcggtctgaaagagcgcagcgtgctgagcgaaagcgtgaacaaacccgagcttggcggaataatacgcatggtgaaaaagatcgccacaggaacattcatttgcgaaggcataggcgcattgctcctatccacacggttcatacctaaaatggggcttctgcagggcataggcaactcggccttccttgcgatctccgcattctgcaacgcaggctttgaccttaacggcaaatacggcgcatattcctcactatgcgagttcaggagcgaccccgtggtgaacatcaccgcctgcctgcttatactttcgggcggcataggctttatggtctgggacgatatcgtaaaatataagctgaaattccgttcatacaggctccacagcaaaatagccctttccatgaccgcagcccttacccttatcggaacagcacttttcttcatctttgagcataataacaccgccgcaggactgggcttcggcgaagagcttctgctggcattatttaactccgttaccccacgtaccgcaggcttcaacacagttgatacggcagctctcagccccgcatcgacaatacttaccatctgctacatgttcataggcggaagccccggctccaccgcaggcggcgtaaagaccgtcaccgtggcagtgcttttccttgcggcgattgccagcatgaggaacgatgaggacatcaaccttttcggcaggcggcttgaagaagatatgcccaagaaagctctttctgtggcagcgttcagccttacccttatcgtcatcggcgttacagccatctgcggcatacagcccgagcttgaccccacagacgtggtatttgaggcagtttcggcgataaataccgtgggaatgaccacaggcatcacccgtgacctgaacagcatttcacgcatcataatcatgctgatgatgtactgcggcagagtgggaagtgtttcctttgcgctcatcttcaccaacaccaaacgatacagcggcgtgagaaatcccgaggagaccataagcgtaggataaggagaccaatatggaatttgcggaatacggcagcaaaaatgcccccactcttatattcattcacggctcatgcaccacagccgagacctgctattcaaaggtagccgaagcactgaaagacaattatcactgcgtactttgcaggctggacggtcactatgacggttcgcccgactttgtttcccttgataaagaggcggagcagatagaagagtatgtacagcaaaaccgaaacggcagcgtatatgcccttatcgggctgtccctcggctccaccatatgcgtccatctgctcacaagaaaaaagctctccgtcagcaaggtgttccttgacggcgtgtatgtgcagaacaaaggagcactgtacgccaatatgtgtgcgctgatgtgcaatatcggcatcggctatatgcgaaagggtggaaaagtccccgacaagctgatagaaacggttttcggcaagggcaacagaagcgttgtggatatgatgtacagcggcacatcaaagataacggtaaagaacgtgtgcaggcaggtctatgagtataagcttggcaatatctccgccgacggcgttgatataatcagcctgagaggcgaatatgagcctatacccacagcatcattcaagctgctgaaagaacatatcccccatatccgtgaaaaagtcataccaaactgcggtcacgcccagtttctcaatgaacagcctgataaatatatccgtctgctgacggaatttctgaaaaactgatgatacaaaaaggagaatatctatgcgttctgtacttataatcggtcttggaagattcggcaatcatcttgccgcaaaatttgccgagcttggaaacgacgtaatggtcgttgataataatgaggacaatatccgtgccgtaatgcacagcacctgcagcgcaaaaatagccgactgcacaaaggaagaggctttaaggagccttggcgtgggaaattttgatatctgctttgtgtgcataggaagcaactttcaggcaagccttgaaataacaagccagctcaaggagcttggagcaaaaaaagtagtcagcaaggcaagcacagcgatacacgcaaagttccttgcacgaaacggcgcagacgaggtagtatatcccgagcgtgaccgtgcggaaaagctggcagtgcagtacagcgtgtcaaacatctttgattttatagagctttccgacgatacgggaatttatgagatacccattatcagcagctggagcggccacagcatcatacagctgaatatacgcaataaatataatctcaatatacttgccatcaaaaagggtgacgagcttatcactatccccaccgccgaatacgtgttcgataaggacgaccacgccatagtcctcggcaggcagagagatgtggagaagatactgaaaaatataggataagcaaaaatcccgtgaagcataagcctcacgggacattttttactatgtatattatctgttgacgcatatgaagcgcattgccgtccgctcctgatcggcaatgataacgctgccgaaagcgggaatgcttacaagatcaatgcccacaggtgcaagataccctcttgctatggcaatggacttgacggcctgattgaccgcacctgctcctaccgcctgaacctcaacctcgccgcttgtgcgcataacgcttgcaatagcgcctgcaacagagctgggagacgaatttgcagataccctcaatacttccatatccgtaacctccaaatttatctttatatagcttgattatacactataaaagccgtttttgcaatactcccgccaaatttatgacggtttacctaatcattaaacgtttaatgctgtgcattttgccgcatttttcatctatggtcataagcacgccgcagaaaaacggtggattatccgactcggtaaaacgaacgggacacttgaagcgctgcttttcaatggcaagctcgctctttacacccagcacggaaagctctgcgccgcacattcccgcatcggtgatgtatcctgtgtggtcattaagtattatctcgtcggcggtctgcacatgggtatgtgtgcctatgacggcggacaccttgcctgccagatagaagcccatggctttcttttccgaggtggcttccgcatggaaatccacaaggatattgggggtgtggatatcctcaaggagcctgtctatacactcgaaggggttgttcaacggctccatgaacgctgtgcccataaggtttacgactgcaaagctgtacgcacccatatcaagcacgcatacgccgtggcctgccacgccgtcgggataattggcggggcgcagcagattttccttgatatcgtaatactcagtgaattccttgcgcctgaagcaatggtttcctgtggtgataacgtccgcaaagctgaatatctgctccatggaacgcttggtgatgccgtttccgtcggcggaattttcgccgtttactataactatgtctattttctccttgcccttgagccgccttacggtgtcctcggcaaaatcgcagcccctgctgcctactatgtctcctgcaaataatacgtttatcatttcattacttctttcgtataataagtgcttaccttttcaagcatttctccgaactccctgcggatattttcgggagccattatctgcgctcctgcgccgaactggaaaagccagccgtaaaaggcagcgcccgtttttacctttgtgtttactgtaaatctgccgtttccgtcgggtatcattatgatatccgtgccgaatttgtcgataacggcgttgacaagcctttcgtcaaagctgagctttactgtactttcggctccgctgaacatggaaaagctggtgttggcatattccgcaaggtcgaaatcctcgggcatgggcactgacttttcatcggtcatctgcacgccttccatgcggtccacacgaaagttggaaaggtctccgccgtatttttcgtagtgcgccacaagataatagttgccgtcattccatgtcagggcatagggagagcaaactcttgcgccctcacggtactttttcttcttgtcaacagtatagtcaaaatagcggaattttatctgcctgccctcgtctatcgcccgagatatcacgtcgatgttgatgtatatcatctcgttgccggattttacacggttggcaacatacacacggcggtttatctcctgccccctgaatctgcctgccagagcttccagctttttgagaagcgagcgtgattttttctcggtgatgaaccgtgcggagcttaccgaatccgcaaggagcttcagctcgggtatctcgaagcggcgctggccaaggtaatatctggcggagcgctttgagcggtcggtgatgatatccatgccgaactgggtgagcagagcgatatcctcggctgccacctttcgggaggaatttatctcgtacttgctgagcctgtcgcaaatgtcgtagatggtgagcatatgctcctcatcggtctcttcctcgaatatttttgccatatacaaaagcttcagcttctgatttatgcctgctgcttttggcacagccaccccgcctttcgtgataatgtcaggaatattatagcatactgcacaaaataattcaaggggaaagatgtattgctggctgccaattcggcgttaacattaggctgtttgcttgacattcattgacgcaaatgctataatgaaaaagtataatctgtaattatgccattttgaggcatgaacggagaagtttaatatggttgatatcctcatggcggtatataacggcgaaaaatttgttgcggagcagatagactctatcctcgcccagtcggaaacggactggcaccttattatctgcgacgatatgtcaaaagaccgctcctttgaaataataagcggctatgcccaaaaatatcccgacaaaatatccgcacacaaaaatgctgtgcccacaggctcggctcaggcaaattttatgtccatgctccaatatgctcagtcggaatatgtcatgttctccgaccaggacgatttctgggagaaagacaaggtaaagctcacacttgcaaagatgaaggagctggaagccaaaaacggcaatattcctctccttgttcacacggagcttgccattgctgacggtgagcttaacatcacccacagcaggttcacggtgtttcaggggcttgacccaaaagccaacacccttaacaggctggcggcgcagaacaatgttacgggctgcaccgctatgatgaaccgtccgctgctggagcttgtaaagggcattgacccccaaaatatgcttatgcacgactggtggttcgccatggctgcagcggcattcggaaagatcggctttgttgatacccctaccatcaggtaccgccagcacggaaataatcagctgggggcggtgaacaacaggagccttgcgggagcggcaaagatagtctcccagcgtatgaaaaccaaaaaaagggtcagcataacctatacacaggcaaaaaatttccttgacacctacagggacattcttcccgataaggcaaggaaatgcctggaaatatacaccgatatcccaaaccacagcaagctcggcaggatatatctgctgataaagcacggatttttaaaacagaattttctcaccgccgcaggtcagctggttttctgctgaacagcaaaccgtttttgttaagcaaaaaatttctgttaacctgcgccgataatatgaaaggacgatacgaatgaaaggcataatcctcgcaggcggatcgggcacaaggctctatccccttacaatgataacctcaaagcagctccttcccatctacgacaagccaatgatatattaccccctttccacccttatgctggcgggaataagagacatacttatcatatccacccccaccgacctccccaactttgaaaagctgctgggtgacggttcaagctatggcataaggctcagctacaaggtacagtcctctcccgacggtcttgctcaggcgttcattctgggcgaggagttcatcggggacgactgctgcgccatggtgctgggcgataacattttctacggcaacagcttcggaaaaatgctcaaggaagctgcacgcaatgcagaggaaaatcaccgtgccagcgttttcggctactttgtggaggatcctgagcgcttcggcgtagtggagttcgacaaggacggcaaggctgtttccattgaggaaaagcccaaggagccaaagtccaattatgctgttacaggtctgtatttctacgataacagggtggttgaatacgccaagaacctgaagccctccgccagaggagagctggagataaccgaccttaacaggatattccttgaaaagggcgaccttgatgtaaagattctgggcagaggctttgcatggcttgacacaggcacaatggacagccttattgacgcaggcgactttgttcgcatgattgaaaagcgtcagggaataaaaatttccgccattgaggaaattgcttacaaaaacggctggataaccaaagaaaagcttaccgagtccgccgaaagatacggcaaatcctcctacggcgctcaccttttaaacgttgcgaaaggaaagtatatatactgatgaaagttctcgttacaggagcaggaggtcagctgggcagggagtttgccgaaaactccgccgtccgcctcagctcgggggagttcgatattatccctctgggcagaaaagaactggatattaccgacattgaagcggcacgcagcaccatgaaaaagtacagtcccgatgctgtgataaattgtgcagccatgaccaacgttgatatgtgcgagaccgctcccgagaaagcatacaggataaatgcggagggcgcaaggctcatatgcaccgccgccgctgaggcaggagcggactttgttcagctctccactgactttgtatttgacggcaagggcacttccccctacagcgaggaggacagctgctcgcccataaacatttacgggcgctcaaagcttatgagcgaggaatatgtgcgcagcatcacccataagcactacatcgtccgcacctcatggctttacggcagatacggctccaacttcgttacagccatacagaacaaggcacggcgtgacggctcccttaaagtggtgagcgaccagacaggctgccccacctgcacggaggagcttatgagatatatcctgctgctgataaaaagcggcagatacggaacatatcacgtttcgggcaagggctgctgcacaaaatatgaattcgcctgccacattgtttcgcaggccgggatagaggcgcaggtatcccactgtctcacctccgattacccaagccccgcagcacgtccgacatattccgtgctggacatatcaaaagcagaaaaagtcacgggactttcgtcacccgactggaagaccgtttttgacaattactacagaatataaggaaggaaaagaatatgaccattatcgtaacaggcggagcaggctttataggctccaacttcattttccatatgctgaaaaaatatcccgactacaggataatctgccttgactgccttacctatgcgggcaatctttccacgctcaaaagcgttatggacaacccaaatttccgctttgtaaaggcatctatcaccgacagagaggctgttttcaagctttttgaggaggagcaccccgacattgtggtgaacttcgctgctgagagccatgttgaccgctctatcgaaaatcccggcgtgttccttgaaacaaacatcatgggcacacagactatgatggacgcctgccgcaagtacggcatcaagcgctatcatcaggtctccacagacgaggtttacggcgatcttccccttgaccgccccgaccttttcttcaccgaagagacacctatccacacatcaagcccctacagcgcatcaaaggcttccgccgatctgctggtaatggcatatcaccgcaccttcggactgcctgccaccatttcacgctgctccaacaactacggcccctatcacttccccgagaagcttatccctctgatgatcgcaaacgctctggctgacaagcctctgcccgtttacggcacaggcgagaatgtacgtgactggctttatgttgaggatcactgcaaggctatcgaccttattatccacaacggcagagttggagaggtatataacatcggcggccataacgagatgaagaacatcgacattgttaagataatctgccgtgagcttggcaagcccgagagccttatcacctacgttgccgacagaaagggtcacgatatgcgctacgctatcgaccccacaaagatacacaatgagctgggctggctccccgaaacaaagttcgaggacggcatcaaaaagaccattcagtggtaccttgacaacaaggactggtgggaagagataatctccggcgagtatcagaactactacgaaaaaatgtacggcaacaggcagtgaggtgcaaaaaatgggaaagtttacttttattgaaacaggcatcaaagacctttacgttatcgagcctactgtattcggcgataacagaggctatttcatggagacatacaacgacgagttcaagccttatataaagcatctggacggcactcccgccgaatttgtgcaggataatcagtcaaagtccaaaaagggtgtactgagaggtctgcacttccagaagcagaaccctcagggcaagctggtaagatgcctggagggcgaggtttatgacgtggctgttgacctgagaaaggacagcaagacctacggcaagtggtacggtgttcttctctctgaggaaaacaagaagcagttctatctccccgagggctttgctcacggctttgtggttcttaccgacactgccacatttgcttacaagtgcacacggctctatgaccccaccgacgagggcggcatcatgtggaacgaccccgacatcggcgttgactggaatatccccgcagatatggaaatacttctcagcgaaaaggacaagaaaaatccccgttttgctgacctgggcttttcattttaacggaggctccgaatgctgaaagcttattttcagacctttaaaaaatataaggacctgatagtatatctggcaaagaaccagatatccctgcggtacaggaaatcctatctgggtatgctgtggagcctgctcaatcccctgctcaccatgatagttcttaccatggtcttttccacaatattcaagaaccagatagagaacttcccaatatacctgatgtgcggcaggctcttttatgactataactcggaagccacaaagacatctcttaactcggtggtgtcaaactcgtcactgataaagaaaatatacattcctaagtacgttttcccactttcaagctccattgcggcgctggtgaatatgttcttctcgctgctggcgctgataatcgttatgttctgcactcatctgcccctgcggtggactatgctgctcttctggctgccgatggtgtatgtgttcgtgttctccacgggactgggacttgttctctcggcaataaacgtatttttcagggatatcaagcacctttacggcgttctgctcacaatgtggctgtaccttacgcctatattctacccctttgagtctgtgcccgaaatggtgcagaacataatccgtctcaatcctctttatcattatattgagatgttcagagggcttataatatacggcactctccccactctgcgggaaaatcttctctgcggcggcatgggcataggcattctgcttatcggcgtgctgttcttcaagaagactcaggatagatttattcttcacatataaggagcttttcatgggaaaagatactgttattgatgttgacagcgtttccatggtcttcaacatcagcaaggaaaagatagacagcataaaggaatacgccataaaaatattgaagcatcagctcatgtacaccgagttcaccgccctgaacaacgtaagcttcagcataagcagaggtgaggtggtgggacttgtgggtcttaacggctccggcaagagcacaatgcttaaaataattgcaggcgttatgaagcccacctcgggaaaggtaagcgtaaagggcactgttgccccccttatcgaagtcggcgcaggcttcaacggcgacctgagcggcagggagaatatcttcctcaacggctatctgctgggattttctcaggactacatcaacgaacatatgcaggagataatcgaattctccgagctgggagatttcattgacgtgcccctgaaaaactattcctcaggcatgaaggcccgtctgggcttttccattgccaccaccgtcaagcccgagatactcattgttgacgaggtgctggcggtaggcgactacaaattccaggagaaatgccagaagcgtatttccgacatgatggcaaacaacaccacggtgctttttgtctcccactcgataaatcaggtaagaaacctttgtacacggtgcgtatggcttgaaaagggcaatcttgtaatggacggccctaccgacaaggtatgcgacgcctatatgaaaaaataagcgatgaaaggatatctgtaaatatggaaaacagcagacagctaagggtcctggtaacaggcgcaggcggctatatcggaagatttgcggtcaatgcgcttatgaaaaggaactgctacgtaattgcggctgatattcgtcccatcgaaggctgcaccgcttcggagcagatagtatgcgacattttctcgggcgataaggatattttcgcaaagctcggctcacccgatgttcttctccatatggcatggctggacggctttaagcacaacagcccacgccacatagaatatctccccaagcatatggaatttctcaggaatatgctggacggcggtctaaagcaggctgcggtaatgggaaccatgcacgaggcaggctatcacgagggtgtgatagatgaaaacacaccctgcaatcccctgagctattacggcattgcaaagaatgccctcaggcaggctatggcagtgcttttcaaggatcatcccgacgctgtgatgcagtggctgagagcttactacatcatcggcgacgatatccacggcaactccatcttctcaaagatatgccaggcggaagctgacggcaaggagactttccccttcacatcgggcaagaacaagtatgactttatcaccattgaggagcttgccgaccagataagcgctgccgttactcagagagaggtaacgggcatcatcaactgctgctcgggtaagcctgtagccctcgccgacaaggtggaggaattcatcaaagagcataacttcaagataaagctgaactacggtgcattccccgaccgtccatacgattcacccgctgtatggggcagcagggaaaagatagacataatactgaaaaactgcggagaactttgatctgcaaagcttgaaaggaaattactgcaaatgaaacgtgcctgtatcctgttcttttacgacaaagacggcatcgccgatgaatacaacttctacaatctgaaagagctgcgcacagtatgcgactatattcttgtggtcataaacggcaagctggctcccgaaagcagagaccgccttgcggacgtatgcgatgatatgttcgtaagaaaaaacgagggctttgacgcctgggcttacaaggacggcatcgaatatatcggttatgacggtctgaaggaatatgacgagcttatccttacaaacaacactgtatatggtcctctgcgccctctgaaagagttttttgccgaggttgaaaacgtgagctgcgacttctggggactgcagatgagctacggcgacccggaagaaaaggtgtatctgaacaggacgcttccctggggctgccgtcccgacgctataatcagcaatttccgtgttatccgcagcaaatgcctgcacagcattgaatttgcaagatactggcaggagcttgcacccgtaaacaactataccgacgctgtttacatcggcgagctgcagttttcctatgatatgaccaatgcgggctttgtttcctattccctcgacaggggcgagtacaggggagcaagcccctctcctactatccacaacgcttatgaccagataagcaggctgaaaattccttatttcagaaagaggatattcagcagccctctcagccattacaccgactgcatgaacggcactgagcctgcaaaggtactggcatacgttaaggatcacaccgattatgacacggatatgatttgggagaaccttatcagaactgtaaaccagtacgatcttcaccatatgctggggcttacagagatacttccgtatgaccgcagcagccatgtgacaaacagcaggatagctgttattttccacgcctattacacggatattttcacaaaatatattccctaccttgaaagcttccccgcaggcacggatatctatttcacagtaggctccgaggaaaaggaaaagcttttcagggaaatgactgcggagctttccaaaaaatacaagataacctttatccccattgaaaacacgggaagagacgtttccgctctgcttatcggcggcagggacgttatcctgaacggcggatatgactatatatgctttatgcacgacaaaaagggcatcggcgcaaggggcagctacgaatgtgtaggctctgctttttccgagacctgctttgacaacacggctattacctccgactatgtaaacaacgttattgagctttttgacactgacccacaccttggcatcgcttctcctcctccaccgacccatgccgcatatttccgctttgctgacggcgactggggcgaaaattatgagatggtatgcgaccttgtgaaaaagtacggcttcaatgtgcccatagcccaaaacaagccgcctgtggcacctctgggaacagtcttctggttcagggcaaaggctatggagaagcttgcaaagataaactggaagtattccgactttcccactgagcccgctccccctgacggttctataatgaacgccattgagcgtctgtattccattgccgtgcaggacgcaggctattatcccgctaccataatgaacaggcagtatgccgcatcggaatttgcattttacagccagacgatgaaaaaatatcatcagctgctttcacccgcagtgggctgggcgcccagctccaccgcattcataagcgcctgccgctcctttgacggcactttcggagaagtcaaaaaggcaaaaggtctgcgtgagccgaaaacaacaagcggaaagatattcgtccgcctgagccgctcacggttcaagggcgttgccaaagccatactcccccacggcttatgggaggctatgcgcaaaaagaagtgcgaacagatcggagaaaaatactacaggatatgatgaaaggacaatcacaagatgataatcccctttatttttaatatgtccacctattcggaagcgccatatacttggtttttcttcaagggtctggatatggcaaagcatcacgactggcctataatgggtcaggagatatatgtaaagtcatctctcaaggattttatcaaaatgggcgagcgtgccgcatatgacgctgattttataaaagagcatctctggtatgaaactccccacagcaaggatttcaagcatttcaagggctatgccgtaaataaaaagataatcgacgatctggtaaaggagacaggctcatatcttgacgcttatctgcgcattctccgtgcgccctatgagccgcttgtggaggatatcacaaggcagatcgaggacataaaggcaaattacagcgagcctatcgaggctttctgcgtgctgagcgcaaatcccagcctttccgcagcggcggcaaagttcaatatccccgtgcttcattatgaaatgggctgcttcagagagcctgtttatatgaagaccgcttttatggacacccggagcctgcacggcggcaacaccacggaagtaagattcaagaaatttcagtccgagatgaagggctacaggaacataatgtccccaaaggagctgctggcactgctgctgcgccccgaaaaaatggatatgctggataagtacggcacaaggcctgaggtaagatgcggcgctgcgctgggctatgcggtggtggaaatatttcaggcgcagtcgggctttaacgacagcgagctgctgtacaggctggctcgtaagtacggcaccaacaatatgctcataagaatgcacccctttgacccatacggcgctaaatatcccaagtattcaatgtgcgtggacaaaaaggatcattccaccattgactttatactttcctgcgaggagatattctccataggctcaaacgtttgcgtagaggccatgttctggggcagaaaggctcacaccatggtaaaaagcccctcctattacggctctgcccacacggtggaggaaaaggctcccgaggttgaccccatgtatctgaatttctttgcaatgaactatcttatcccattcaagttcatgatggaccccgaatatatccgctggaggctttcagacccttccgaaaaggagatatttgaaaagcatctggctgttcatcttgcaaacaaaaagctggatatgtccgtaatggatcttcctgcttcaaaaaggctgaaagcttttaaggaagcgaaagcagtctattaaaaacaaacggaggacataaataaatgcttttttcatcgcccatattcctgtttgcattcctgcccgtaacactggcaggatattatctgctggacagaaaattcaagaacatcttcctgctgataatgtcccttatcttctatgcctggggcgaacctaagttcattttcataatgctcatatccattatggcaaactggcttttcggtctggctgtggataaattcagggacaacaagcgtgcggctcacggatatcttacccttatggtgctgtggaacgtgtcgatcttctttgtttacaagtatctgaattttaccataaccaacgtgaatgcgctgttcggcaccacattcccgctgacaaaattcgtgctgcccataggcatatctttctttacctttcaggcgatgtcatatgttattgacgtttacaggggcaacggctctgtgcagaaaaatccccttaacgtggcgctgtacatcactttcttccctcagctcattgcaggccctattgtaagatatgagacggtggctaatgagatacagaacaggaaagaaactctcgatgatttttcgctgggcataaagcggttcatctacggtctttcaaaaaagcttatactttcaaatctggcggcggcagcggcggacaaggctttcgagctgaccgattattcgggcgtatccgcagcaatggcgtggttctgcgccctttgctactcgctccagatactttttgatttctcgggctattccgatatggcaataggtctgggacttatgttcggctttcatttcaacgaaaacttcaactatccctactgctcggcttccgtttccgagttctggagaagatggcacatctctctgggaacatggttcagggactatgtatatttccctctgggcggttcaagagtaagctccaagagcagactggtgttcaacctctttgtggtatggatgctcacaggaatatggcacggcgcaagctggaactatgtggcatggggctttttctacttcgtgctcctgacctttgaaaagcttacgggaataccaaaaaagcttgctcacacatggcagagggtgctgtaccgcatatttaccctgttgtgcgtaatgttcggctgggtagttttccgtgcgccgggacttaaaatgggtctttcctatatccgctccatgttctgccttaacggcaacgcctttgcggacacagcatcgctgaaccttattggcagctatgcacttgttgcggtgcttggcatcatcttctgtatgcccgttgcaggctttgtaaggaaaaagatacccgaaaatcccaaggcacagctggcggcagagatatgcacaagggtcatctgccttgtactgctggcaatatcctgctcatttgcggtaagcagcagctacaatcctttcatttactttaatttctaagggggagatattatgaacaagaagcttaatataatatttacctccgcattctgcgccgcacttgtgatacctgttatttcgctgaattacggaaagcttacctccgacaccgaaaacagaacgctggcggcatttccgagcgctctggacgaagacaggaagttcaacaagggatttttctatgagctggctgactggttcgaggatcatctgggcttccgtgacgatatgatgaaagtctattcaaatatcatggtaaacggcttcggtctcagctcttccgaaagagtggttttcggcaaggacggctggatgttctacactcccgaccataaccttgagctggtaaagggcggctatccccttgacgacaagatgcttgagactatcgcccacaatcagcagaggataaacgactactacaagtccatgggcaaggaatattttcttgttatcaccccaagcaaggcgactgtatatcccgaatatatggcagacggcgactacactgtgggaactaccgccgcagatatccttaccgattatataaaagcaaacaccgatgtaaaggtgataaacgtaaaagacggacttatccctgcaaaggaagcggggcagctttacttaaagaccgacacccactggaaccagcttggttcatataacgcttacagctacattctttcgcagatgaaagaatatggctgtgattacggagagcctgtcagcgtaacattcggtcagggcgaatatcagggagaattttccgcaatgctgggaagtcccgatgttctgaagcccgaaaaaacgcctgtggcagagtgggaaaaatcatctgaggaagtggctgagggaagtgtttatgccgctatgaacagcgtggtatcttcaatttccgagatgaatgctaaggcatatccccctgcgtattttgtgaacgacagccttcctgaaagcagaaagctgtatatctacggcgacagccagtgggcggctcacagaaatatgcccacttacctgtgcgaaaacttctcagaggtaatgagcacgagaatacgttccgtaaattacgctgccgacagcgcatatgaccctgatgtggtaattttcggctgcagcgagcgttttatagactctgttctcaccctttcgccaaagatccctgccgaaagctataccgacagcggcgaatatgacggctttgccactctccccgcccagacatcagatgaatggataggcagcaatggtatgtggatagaagatcaggcggagggcaacacgatctcgctcagcaaggcaaaatcctatatggatatgctgcagatatcgggctgggcggctgattttgaatcagacacacctcttaccgaccttattgcagaggtaaacggcaaaaaataccgctgttcatacggctttgagaaaaaaggcgttgccgacaagttcggcgatgggctgctgcgaaccggctttaccctgtggatgccggacggcataagcgcaggggacaagataacctttaccatggtaaacagcggcacgcaggtggtttatgagcctgtgacctacgaatttacggaataatggagataaaaatggctgaaaaaagactgggaattttcctgttctacgataaagacggcgttgccgacagatatatcgaatatatgctgaaagatatccgcccctgccttgacaggctcattgtgattgccaacggcaaggcggacgaaaatgctgtaaagatgtttgagagcattgccgacaaggtggtaatccgtgaaaacaagggcttcgacatcggcgcatggcagcagggcataaccgaaatatgcggcagagaggagcttgcaaaatacgactccctcacccttttcaacgactcttttttcggccccttttacccctttgcagacatttacaaagagatggagagccgcagcaaggactactggggactgagcgttcacggcgaagccaacggctcgggactgtgtccctacggctaccgccccagatatatacagacctatttcatggtatttgagaaagatctgcttcacagcgaggattttttcagcttctgggaaaagctgcccgaatttaaaagctacaacgagctggcggaaaaattcgtggcggtaatgacaatgcacttctccgacctgggctatgagtgggacgttctctgcgacacctccgacttagagggcgagcgcagcaagaattttgaccagcacacctttaacatctatgagttggtggcaaacaggcgcttcccacttataaaaaggcgctctttccacacggacagggcggtatatctgcagtattccaacggctcggagctgttcagggcgctggaatatattgaaaagaactacgattatgacatctcactgatatttgagcatctgctgaggctttatgagcctgagacgctgaaaaactccctttgtctcgattatgtgcttcccgacattggcagcactgagctgaaaaaaggtgaaagcgctgtgatagctcatctggtatatgatgatatgtttgaaaggtacgggcattatctcaaaaatatccctgcggagacggatataatcatcaccaccaacacccccgaaaaggaagcacggctgaaagagctgtacggggatatagcttcagtgcggcttgtgaccaaccgaggacgggatatgtccgcactgctggttgggtgcagggatattctgatgaagtacgaatttctctgcttcgttcacgacaagaaaagctcgcagaaggaatttgcttccgtgggcgctgagtttgaccgcctgaactgggaaaatatgctccacagcgaggggtatatcaggaacattataggactgttcaaggcacacagctaccttggaatgctctcacctttcggcgttgaccacggctcatatttttattccagcgttgactactggacggtgtgctatgacgtttcctgcgctctcgcacagcacataggcataaaaactcccgcaaaggacaagcagccccttgctataggcacctgcttctggtgcagggcaagcgcaatgagggtgctttttgaaaatgacttcacatatgaggatttccctgccgagcctgctgacggcgacggcacgttcagccacgctgttgagcggcttctcccctatgcggccgcaaacaagggctgcgttacgggctgggtatataacacggaatatgctcgcacggagcttacaaacctgcggtacatgaccgacagcactgcaaaggcgctgtcaaaatactcgacggtaagctttgcaagcttccgcagctatatctcatcgctgggaaagctttcgggaagctccgccacacagctttccatgggcgagcgtgcaaagaaagccaaaaagaaaaatgaactgcggctgaagctcaggaacatgacccctgaatttgctctgaaaatttaccgcaggataaagtacagataaatcgaaagccgaaaggacacatatggccgctgataattttgaagctctgcttgaatatgcttttgcaaactgcccaaagggcgaggaaaactcatgggcatataatgcttcatgctctgctctggcggaagagctttgcacggaggcgggcaatgcggctcagctgttatcggggggatatgaaaatattcttgaaataaacggtcattacggcgcatttacgacggttctggcgaaaaaatgccgcaggcttgtaactgcagacaaaagcgaagcctgccgcaggcttataaagctccgctgccccgaagctgaggtcacgggcgatatccccgatgaaaagtttgaccttatctggataaacggcgctgatgataagcttgaaagctctcctgcagaaatgttcctcagcctgaaaaacatgctcacggacaatggcgggatgataatgctgctgccaaacggaaagggaagcggcggttatgacccaatcaaaacggcggaagatatcgcttccgtaagcgaagcaagcgcatatgtgcagataatatatccataccccaagcttaaaggggctatgtttttcttttcggaaaagcggctgccaaaggaaagcgagctgtattttgaccctgtgctttgcggcaagggcgctgttcttgacggtcgccgatttgcggactttttcatgcttatgatacgacatgaaaagcccgagagcaaatgtattttcagcaaaatgtcgttttcacggaaaccgcagtttcgcataaggacggatataattgaagagggcggaaagctttatgccgaaaaaacagctctgcctgaaagcatagagcacgtaaacaggctcatgcgctcatacaatgagctgtcgggcatattctcaaagggcattatttccattgatcgctgcgaaaaaatatccgaaggacgtgtcaggttcgattttgaagagggcagggagctttttgacatcattgcggaggaaatggtcaatgatgaaaaagcctgcgaacacatttaccgctttgcggaaaatatgaaagcaagggcaacgaagaaattccatttcaccgaggatttttacaaagtgttcggaaaagggcttaaatgcgctgatttttacaccatgccctacacggatatcgacctgtgctttgacaacattatcgtgaacggcggtcaggctgtgacggattacgagttctgcaccgatttccccgttcccgtggattttgtgatcttccgctcggtgttctatcttttcaggaaaatgcagaacggaagtgccgaaacggaagaaaaggtttatgctcatcttgggatcgacaggcacattgacgctttcaggcgcatggaatacaacttccagaagcacatcacagggggcagcacatatttttccgatgttatggcaaggtgcagggaaaatgactatccccccgaaaaggctctgaaagtgctgaaaagtatcggcaggaaagccataaaatgaaaaatttgccgaatattgcgtattattttctatccccattatgttgacagaaaacgcaaaaaggtgtattattatattgagtatatgtgttttttcgtataaatgaaaataatatagatatagacttactgatagaagataggaaaggtggccatataaatgagcttaaaggataacttcaaccaggccgtcaaagactttctgaaaaaagacggcatggtgggcgatgaccctttcaaaggctccgtaaatacaactcaggaagaaccctcccgcagccggaacagctacggaacttcatattcggacaacctgcgtgccgccgcaagcagctacaggcaggacccctttgctgaaaatgactttgacgctcccgaggacactcctgcgggtacatatgttcccccaaggcagccctccggcggatatactcctcccacaggcaactcgttcagaggcggcagacctcccgaaacgccctattatgagactgaggagacaactatcatctcccgcaacacccgcatcagcggtgacataagctcttttgccaacgtgaacgttgaaggaagcgttcagggcgatatcaggctcacaaagaatatttccgtctcgggcaaggtggtaggcaacatcgagtgcaacaatgccgttatggctggcgctcagatgcagggctgcatcacctccaagggacaggtgcagatggatcacgacagcgttctgctgggtaatattgacacccagtaccttgaccttaacggcaggataaagggaaatgtggaggtcggcggcaaggctgagttcaaaaacgacgcagttattgttggcgacatcaccgcttccaccatctccgttatcgacggagccgttatcaagggctatgtaaacacgacattcatgcaggaaagcaccacaaacgtgttccccgacgcaatcgtagtaggcgaataatttatctcggcgcaattctctttgaaaggactgttcttcaatgcctcagaatgacattctgaataataatggtacaaatttcgacgactttgagcttccccctctccccaagcgccccgcaaagaatatcgacggcaccgacgccgattcagctaagactgtaaagcctgtggtaagcgtgggcgtagctgataacgagcttcctccgcttcccgaaaaggctgtagataactctctggacgctataaccgatatccccgacaacaatgagcttcctcccctccccgaaaagactgtggataactctcttgatgccataagcaatatcccagaggcttctctccccgatgcggacgaaaagaagcacgaagtggacaaggtagaggaaatagacctgtcaggcgatgattttgagcttcctccaatgcccgagcgccccaagcccgagactgagaatgaagaagagatccagatatatgacacaaaggctgaagaggctgccgaaaaggcaaaggcagatgaggaaaagttcgtctttgaagatgattatgacgctgatcttgaccatataagcaccgacagcattatccttgaggatcttaccgatcacgttgcgcctatccgcacaagagaagaggaaagcgcaaggaacatcaaggaaaaaataaaaatggacgacctggaaatggaaatgggtcccgctcctattctggaagacctgagcgatgaatatgccgctccccagaaaaaggctgagtcgctggttgacagagatcagcttgacagcgacgagaagcgtgtgctcaagcagcgccttgaagaagacctgagcaagcgccccgagaacttcaacgcccgtgccagcaagaatatgtacaaccgccttatggaagaaaagaagctgaagatcgcaaagaagggcttcggcatctcgcttatccccattgcaatggggctcggctccgcagttatctccgcaatattccttaactggggttcgtatctgttcttccagtacgtggctgtgtttatgattgtaggcgcacttatgctgtttataaagtcaaagcacgtaaaaatgctctccatagcaatgtatgcggtaagcctgctgctttatgtaggcgtgggactgggactttacgttgtaaagggcaataacgacataatccatctggtaacatctgtactcgcttccggactgaacattgtgtctattgttatacttacaaagagcgaagcggtaaatacatattattccagcgattttaaaaagaaataatgtcatataagcacaaaaaagcccgagagatgatctcgggcttttttgttgggaaaatgcaacaaattatatgttaatgaattaaatgatagctcaaaattttacggacgatatagccaatccccaccgcagagccaagcaaaacgaacagcagatactcgatatgtaaacgccagaccgcaaatgagcggggcggcggtgaaaggggttaaacaaagccagataaaggagacaaacagaacagttaaagccgaactgtaaaagcgggcttagttggggtgagggggtagggaagagatgagtgcttgccttttacaaggcatgaagaaaccgtaggggagatatgtgccgactgcggcacaagggaatgcccgcttttgttgggttttggtttcccccccgctcccattaggtgtctcctttgcattcggtacggactttataaaaatgaaaagtgtatttgtccgtacctgcggcaacagcgaccagatggctctgccctcagtggacttcctaaaccctttaccttgtgcttatttttgctgttttgttcatatgcagcagtccccttgtgatctttatcttatactaagaaccaattaaaaactatacaaaaaatcgagcataatcttgcgtatatggattatgcgatgattttttgtatatagttttattggtgattagtattattactttatcgcttctgcaaggctcttggtgaatgagccgacaggctcgggagaatttactccgttttcttccattatccttacaaccgcacttcctactattactccatcacaataggaagccattttcttcgcctgctcaggtgaggatattccaaatcctacacagcaggggcaggacgcattctctcggattatgccgaagaacttatcaaaatcggtctgaaattccgatctaactcccgttacgccgttggaggacacgcagtaaagaaatcccgttgaatcggaagctattctctttatgcgctcatgggaagcgggtgaaacaagattgatgttgtgtacgccgtactgctctgcatagggaagtatctcctcacgctcctcatagggcatatcggggacgataacgccgtcaacacccttttccttgcagagtgagaaaaacttctctgtgccgtaaacgaaaatggtgttaaggtacatcataaggataagtggcttgtcggtcttttctcttattctatccactgcgccgaatatcttgtcaagcgtggtgccgccgttcagcgagcgcagtgaggacttctgaatggtaacgccctcggcgatagggtctgaaaaaggcacgcccagctcgatgatatctgcgccgttttcaaacatggaaagggcggtgcttacggtggtgtccatatcggggtcgcctgcggtgataaaggttataagagccttggagccgctctttttaagctcttcaaagcatttgtctatacggttcatatttcctgacctccattatgagttcttgatatcatggcctctgtagcgggctacggagtaaacgtccttgtcgcctctgcctgaaaggttgataacgattatcttatccttgcccatttcgggagcgatcttcatagctgcggctacggcgtgggctgactctattgcggggataatgccctcggtctttgagagatattcaaaggcggtaactgcctcttcatcggttattgcgacataatctgctctgcctgttttccagaggtttgcgtgctcagggcctattccggggtagtcaagacctgcggaaatggagtaaacgggagctatctgaccatattcatcctggaggaagatggacttcattccgtgaaatatgcccacgctgccgcaggaaagcgtagcagcggtatcggctgtgtttattcctctgcctgcggcttctgcgcccacaagtcttacggaggtatcggggataaagtcatagaaagcgcccattgcattggagccgccgcctacgcaggcaaccacgcagtcgggaagtctgccttccttttccatcatctgacgctttatttcctcgccgattatcttctggaagtctcttaccatttcggggtaagggtggggacccattacggagccgatgcagtagaatgtggtctcgatattggtgcaccagtcacgcatagcctcgttgatagcatctttaagggtagctgtgccgctttcaacgggaacgacctttgcgcccagcagctccatgcggtaaacgttcagggactgtctttcggtatcctctctgcccatatacacgcagcattcaaggcccataagggcgcatacggtagcggtggcaacgccgtgctgacctgcgcctgtttcggcaatgatacgcttcttgcccatacgctttgcaagaagtatctgaccaagaacgttatttatcttgtgagcgcctgtatggttaaggtcctcacgcttgatgtatatttttgcgccgcccagatcctcggtcatatgctgggcatagtacagcattgaagggcggtttgcatagtcacggtaaaggtcagccagctctttctggaactgggggtcattcttgtacttgtcataagcctcttccagctcatgtacggcgttcataacagtttcgggaacgtactgtcctccgaactcgccgaatcttccgatcttgctcatatcataatttcctttcgttgtatatttccataatgcgctttatttttttcctgtccttgacaccgtcggtctcggttccgcccgagatgtcgatattctgcgaaacggtgagcatatccgccagatttctttcgtttatgccccctgccagaaaatagggaagatgtatctccgcattttttatcacatctatgttgcacagctttcctgtgcctcctgcctgaccctttacaaagctgtccagcaggagatatttgcagccaagctcttcggcacggtaaatatcctctgcgctctgcacacgtacggctttccacaaatcagtgtcatgccccagagcctttatgtaagccctgtcctcgctgccgtggagctggataacgtccagccctatgctttcagccgccctttttacggtatcaacgggagtatcaacaaaaactcccaccttttttatgcggctgtcaaggttttgggatatccgtgcggcaaagccgatatcgactgtacgcctgaagccctctgcaaggatatagcccacaaaatcggggagaaattcgttagcgtaggcgatatcctcctcacgcctcattccgcaaagctttatcatacgccctccctgagagctgccatgcagtcgggaatgcctgcaagtccgcttctcataagcgtctcgccgataagcacagcgtctgctccgcagctcctggcaaatatcatatcggcgttgccctttatgccgctttcgcagacaaagactgcattttcgggcacaagtgccgaaagtctctttgtgttttcgagggacacctcaaaggtcttgagattgcggttgttcacgcctatgatgccaaagcctgcactcacaaggcgcctgacctcgtttccatcatgcgcttcgcccagaacgtccagtcccaaggactttgcaaggtcaaaaagcgttttgagcctgttatcgtcaaggactgccgctatgagcagaactgcgtccgctcccagcgcacgtgcctcatatatctggtactcatcaaagatgaaatccttgcgcagaacggggatcttgacattttcaactatttcccgcagatattcggaggagccttggaagtaatgctcctcggtaaggcaggatattgccgcagcgcctgccttttcatatgcggctgcgatcttaacggggtcaaaatcaggctggataagtccctttgagggggaagcttttttcacctcggagatgaccgaaagtccgtttgcccttagcgccctgccgaagccctttggagcgggagctatatccgcaagctttttctgctcttcaagggatatgcggctcttttcggcagcaagctgaatttttcttttttcgattatttcatcaagtatcataatttatccttttaagaattggtaaaatccttcatttcgtagagcttatcatatgccttgccgctgtctatcatctctgcggcaagctttacgccgtcagctatggtggctgccttgcctgcgcagtagattgcgcagcctgcattcagcagaacggtatttcttcttgcgcccttatccttgcctgtaaggatatcaagggtcatcttggtattttcctcgggtgtgccgccctttaaaacatcggctgtgcagtattcaaatccgtagtcgtgggggtcaatatcataagtggatatctttccgtcctttacctcgcagacatgggtcttgcctgtcatggttatctcgtccagtccgtcgctgccgttgactaccattgcgcccttgattccgagctttatgagcacgtttgccataagggtcaggatgctttcatcataaacgcccagcactatataatctgcaagagcggggtttgtgagagggcctaagatgttgaagaatgtgcggcagcctatttcctttcttacgggagccacaaatctcattgcgccgtggaacacctgagcaaacatgaatgcgatgcctgtggtctcaaggcactttgctgccttttcgggagaggtcttgatattcacgcccagagcgtcaaggcagtcggctgctccgctcttgctggaagcggctctgttgccgtgctttgcaacgggaatgcctgcggctgcgataacaaaggaggaggtggtggagatgttgaaggttcctgccatatctccgcctgtgcctacgatgtcgatagcggagcggaagccctcgataacggaagccttgcttctcatgcccttggcaaagcctgttatctcgccgatggtctcgcccttcattctcatggcaaccaggaatgcggctgtctgagcgggtgtggcagcgtcgcccatgatgatgttcatggcgctgtaagcctcgtcctcagtgagatccttgcggtcaactgccatggcgatgtactttttaagagaagttctcttatccatgggaattgcaggaactgcgccctcaacctttacgcccacaatgtttgtaaggaagttggagagaatgttcacgcccatctccgcaagaatagactcggggtggaactgaacgccgtaaatgggatattccttatgagccactgccattatctcgccattgtcggtctcagctgttattttaaggcagtcgggaagcgagcttctttcaatgataagggaatgatatcttgcgcaggagattttttcgggaagtccctcgaaaatggggcaggtattgtcaagcttgataagcgaagccttgccgtgcataggcttttcggctcttactacctttccgccgaatgcctctccgatggactgatgaccgaggcagatgcccagaatggggagctttccggcaaaatgctttatagcctcaacggaaatgcctgcgtccttgggataagaggggccgggagagatgaccagtgcttcggggttcatcttctctatcccgtcaatagtaatctcgtcatttcggtaaacctttatattgttgtaaaggcttgccattgcctgataaacgttgtaagtaaagctgtcgtaattatctatcataacgatcatatcaaacacctctttcaattacatctgtgctgcctgttcaagtgcgtttattaccgccgcagccttgcgcttggtctcttcaaattcactttcggggttgctgtcatatactattcctgctcctgcctgaacgtaagccttgccgtttctgaaaagcaccgttcttatggcgatgcaggtatctatatctccgttccatgccatgtagccgactgttccgccgtaaagtccacgctttacgttttcaaggctgtcgattatctccattgcctttaccttgggtgctccggaaagggtgcctgcggggaggacggacatcagcgcatcaacggcggtcttgccctcttcaagctgaccctcaacatcggaaacaaggtgcattaccttggaatagcgctcaactctcataaagtcggtgacttttaccgttccgggcttacataccctgcccacgtcgtttctgccaaggtcaacaagcattgtatgctctgccctttccttggggtcggtggtgaggagcttttcgttctcgatatccttttcggctgttgcgcctctgggatatgtgcctgcgataggcttgttgagcaccacgccgtcggtaacgctcaccagcatctctggggaagctcccgcaatgcagtaatccttgtgatcaaagtagtaaagataaggcgaagggtttgtggagcgaagcattctgtaaacgtcaaacggctcggggggattttctgcctcaaagcgctgggaaataactatctggctgatatcgccgccgatgatatgctctctgcacttttccaccatctcgcagaactcttcctttgtgtagttggaatttactttgagctttgcgggattgagaatcttgggagcaggctcgggagtgtatctgcaaaggagcttgccaagcttatcggcacgcttttcaagcagctcatagtagctgtcagctgccttatcaaagctttctcctgatttttctgccagagctgttatctcttccttatccatgttgaggattatcactgctctgttggaaaggtggtcataagccactatctcgttatagatgaacatatttgcatccggcatttccagatcatcgtcggggacatttgtaaggcgcttttcataatatctcgccatatcgtagccgaagtatccgataagtccgcctgtgagcttgggacgacccacgaacttaggtgacttgtatttttccataagtccagagaaaagcttgatggggtcggaagcgtctgtcgattcttttcttccgtctgtgtaaataaactcagcctttttgtcctttacccttatctctgccttggggttaagaccgatgaatgaatatctgccccagcggttggagttatcaactgattcaaggataaagcagttttcgtagttttcctttaaaacagaaaacattcttacgggtgtgaagctgtcggtaagaagctcatagaacatgggaactgtgccgtagcttttcagatattcctttgtttcgctgactgacggatagaacataaaaacgaccctctttctgatattggcggcaacaaaaaatccgccgcctcttgaagccttaaaacttcaagggacgacggataatatccaccgtggtgccaccctaattcgccttatcatcggataagaccttaacgggtacgggcgtttgcaataaaaaagcactaccaatatggtaatgctgcactttgcttataaaataacaagtacgcagcttacgcatcaataccctttccctttacgcaggaaatacggctcaggctactattgaagcacatctgccccaaattcaccctgctcctcacaaatccattcgcatttaccgttcgtaccgcacttccaccaatgtgcagctctctgtgccgccgttataaatgttacttgcttttgttcacaggatttattattaactttaagcacagtatagcactatgattttcgtttgtcaaggggttaacggaaatttaacatttcaaaatgtatgagttgaaaaaaatttttctattgccacttcaacagttgtgttaagtgactggttgtgagcagcggaatataatgcaagatttttatgaagctcaggtgagatccttacattaaagctgcccttataatccttttcaggctctatgccattggctttgcaggcttcaaggtaatcatctactgctgcttcaaaatcatcacgcagctcagctatacttgttccctcataagaaataaggctgtttattccaattaccttgccaaaaagaacatcatcggctgatgagtattcaacagttccgtaatagcctttatattccattgcatttgtcat

SEQ ID NO: 390 - DNA, 13468 bp, unidentified
  source 1..13468: mol_type = unassigned DNA
atggagttgcgacgaatcttgatgggcttatatctgttggccttccccgccatgatgtggggacagactccggttgtgcccggtactgctgacgaagagcattccggacaccgcaaggaaactccggtcaatttcggtttcaaaggcggtttcacctcttccttgttccttgtatcccagttcagcgtcaacggagtgcccatcgacgaagtgcagaacaattacaagataggatatttcggctcccttttcatgcggataaacttcgaccgccatttcctgcaaccggaaatatcctacaacatcaaccggtgcaacatcaccttcgagaaacctctgcccgaagacgccgcatcaggagcccggccggaggaagcctccattacatcgtccatccacagtatagacatccccgtcatctacggatacaacttcatcaaggaggggccgtacagccttgccgtctttggaggacccaaagtgcgctatatatgggacaggaaaagtgacatcgacttcgagaatttcgaccaggtgaatatccgtgaaaggctgcgtccgctcaatctcagtttcaccgtcggcgtatccgtcaccatctcacgcgtctttttcgacttccgttacgacatggggctgcacaacatctccaaaaacgtgacatacgatattccggccgacaacaacgctgctgacgaaaacacgaaaaacgaaatccgttttcaccgcagggacaatgtgctgagtttttctttcggagtgttcttttgacagtaaatttcttccttttctttcaatttattcatttatttcccgtaaatttgtgcgcttaataagagaacacagatttatcaaacttatctaataagcagaatgaaaagagatgatttaattttcgaacttatcgaaaaagaacaccaacgtcagctcaaaggcattgaactgattgcatcagagaactttgtaagtgaccaggttatgcaggcaatgggctcctgcctcaccaacaagtatgctgaaggataccccggcaagcgttactatggtggttgtgaggtagtagaccagagtgagcagattgccatcgaccgcttgaaacagatcttcggcgcagaatgggccaacgtacagccgcactccggtgcacaagccaatgcagccgtattcctcgccgtgctcaatccgggcgacaaattcatgggactgaaccttgcacacggcggtcacctctcccatggctcactggtcaacacttccggtattatctatactccctgcgaatacaatctgaaccaggaaaccggacgtgtggactatgaccagatggaagaagttgccctgcgcgagaaacccaaaatgattatcggcggcggttctgcttattcccgcgaatgggactacaagcgcatgcgcgaaatcgcggacaagataggtgccatcctaatgattgacatggctcatcctgccggactgattgcagccggtgaactggataaccccgtgaaatatgcccacatcgtgacctccactacccacaagactctgcgtggtcctcgcggtggcgttatcatgatgggtaaggacttccccaacccctggggcaagaaaactccgaagggagaaatcaagatgatgtcccagttgctggattcagccgtattccccggtatccaaggtggtccgctggaacatgtcatcgcagccaaagccgttgccttcggcgaaatcctgcaaccggaatggaaagaatatgccaagcaggtgaagaaaaacgccgctgtcctggcacaagccttgatggaccgtggcttcactattgtttccggcggtacggacaaccactccatgctggtggacctgcgcagcaaatatcccgatttgaccggtaaggttgccgagaaggcgttggtatctgccgacatcaccgtaaacaagaacatggttccgtttgacagccgctcggctttccagacttccggtatccgtctgggtactcctgccatcacaacccgtggtgccaaggaagacctgatgctcgaaattgccgagatgattgaaaccgttctgtccaacgtagacaacgaacaagtcatcgcagaggtacgtgcacgcgtcaatgcgaagatgaaagaatacccgctgtttgcttattaataagcaaacagaattaaaaattaagaattaaaaattaaaggctgcgcaatgttcgctttgaactgcgcagcctttaatttttaattctaaacgcgctccgcgcgtttagctcagcccttctatatttccgtccacaatatcaatgtgttcggcttgtggtttcttgggtaatcccggcatacggagaatttcaccggcgatggctacaatcatttccgcaccgttattgaccacaatatccttgatgtggaactcaaagttgttgactgcaccgtatatcttcgggtcggcagagaaggagtactgcgtcttggcgatacagacagggtaatggctgatacccatctgctctatcagtttaataaccttgcgggaatggagactgtaagtcactacacttgctccgtagaggttgcaggctaccttttcgattttacgttccacgcaatcgctctcttcgtaggtgaaggtcagcggttcggatggtttgttctcgatagtatctactaccagattggcaaggtcaacggctccctctcctcctttggcaaaggcgttgttcacggcaaaacctacctcaagcttttcttcgcaatggcggcggatagcttccacctcctcgtccgtatcactggcaaaacggttgaatgccacgatgacctgctggccgaatgaacgcaaattgcgtacatgcttgtccagattgccgaagccctctttcagtccttccatattgggttccttgatgcggtccagactgacaccgccatgcatcttcagtccttgtgcggtagcaacgattatcgtcaacttgggctgtaggccgctcttgcggcacttgatgttgtaaaacttctccgcacccaggtcagccccgaaaccggcttccgtcactacataatcgccgaatgtcatggccatttttgtggcaagaatggagttgcaaccatgggcaatatttgcgaacggtcctccatgaacaaaagcagcagagccttcggtagtctgtaccaggttggggttgatagcatctttcaacagtacggtaatggcacctgctactcctaactccttcactgtgaaaggagtaccatcgaaacggaatcccagaataatattttcaatacggcgacggaggtcatcgaggtccgttgccagacagagaatagccataatttcggaagccggggtaatatcgaagcccgactcctcggtaatgccgttggtgctcggtcccaatccggtgacaatgctccgcaaggaacggtcattcacatcaagtacgcgccgccagatgatttctttcagtccgaagccgtccgcctgatgctggtacaagtaattgtcgagcaaagcggaaatcatgttgtgtgcggaggtaatggcgtgaaagtcgcccgtaaagtgcagatttatcttctccatgggcagcacctgggcatatcctccaccggcagcaccgcctttcatgccgaagcaaggacctaacgagggttcgcgtaaagccacaatcgctttcttgccaatcttgttcagccccaatgccagcccgatggacacggttgttttaccgatacccgctttcgtagccgtgatagccgtcaccagtatcagattgctcttcttcactttctcttcatcaatcagatgcgtaggaatcttggctatgtaacggccatagttctctacttcgtcacgcgggatatccacactttcagccacctgctttatcttcttcagctctatgctgcgggctatttcaatgtccgatttcatacagagtcttttctttaaataacaactttaatgttttgaaagttgcaaaagtacgaaagatgtggcaaagtacaaaagaataccgtattttcacctgaccacctgcatcttctatctatttgaaccgcgacgtatccaccgcctcccgttgcttctccttatatccaccgaatttataagtaaacgatacgccgaattcgcggaagcatgagtaatgattcgtcacattctgcgtcttgaaacggatgcggggagaaatctgtcccgtctcaaaaatatcgttgcagtagaggttgaggatggctttgttcttggcaaagccgtagcgcagggcaatattcacattgcccgacgtgggcaggtcgtaaatgccttgaatggctttgctatgcacaaatccggccaccgtcagcttcaaatcgggcttggtggagagagtaaaagtattgttcatctgggcaatgccatagcattgctttctgtcgaaaggaatatcccagaaatcaccatccttttcgcgatgccacaagccgatgagggtaaggcgagaattcaaccaatccttcaccttaaatgggatagagacttgtattcctgcttgttgctgataatcaaaattgagtgtcttgtagatttcaaccagacgttcggaggattggtagagtgtctgtacggagtagtccttggtatggttgaaccaagcgctgaagatgtatttgcttttcaaaatataggtcattttcagctcatactcttgtgccggtttcagcaacggattaccatgcagctcagagtatccgccgccgatgtaagagacggcatcctgcaccgcccagtagtcgggatagtccttgtcgctgctcagagagagctgaaggatatgtcccggtgctggcatatagttcaagttgacgatgggataccagtcccactggttccagacgggagtcttgtaatgctccacagccagggaagcgtccaaagcgagtttgtcgccgaaactcttgctggaacctgcatagatattccaggtctgctcgcggcggcgggacttcatattgctcaaggcatccgatgaggtcagttgtccgccggtttcggggtcataataatattggtagctgttgtcgatgctggtagtatagatggctccgtaattcaaatcccaaccttttcccagactgtgctcctgggccagaaagaatttccagcggttgatgcgctgacagtcttccgtgtagaaatcgagttcctcatcctgcatacggctatgcagtagttggttggacggagagcggtagtaggtcagttcggcaccggctttgaggccgaaaggggtacgatagtccagacggccgttgtgcagccagtcggtgctattgctatgagttgtggacacctgcgtgcccgtcacgctcttccagttgtgggaggtggaatagccaccgttatagacgaaactcagctgatggttcttggcgatattatagtccgcccctaccctgaaattatgggtatggctgcggccacggcccacctcatctgttgtcatggggtgaaccgagccgtccgccagggtgtgcacagcctctttgtcggtagtagagtagctccggccatggctgtgcgagtaaagaaaatctgctgagaatttatttttgctgaagagcaggctggcgcgttcctcaaagccttcgttatgcttctggcgatacttggcatagagttcgccttgccaggagccggggccgcctaccgattgtttcaaggtgatattgatcagtgcgccacgcacctggtagcgtgcaggggcgttgtacatcacttccgccttctctatgcggctggcagggatgctgcgcagcaaagaatagagctgctctgtgctgagggtggttactttgccgtccaggataacggtgactccctgacctgccaactgcagcccgccattcatctcgatgacgccgggaagctctttcacggcatcgtaggcattgtctacggggaggttccggataaggcggggcaggtcgtacaccagcttgccttgcgctgcctttacgatggggcgttcaccggtaatcatcacttccggcaaggtctgataaaggctgtccagacgggcatcggtcgtgataaggctgtcggcgctgaggatgcggttgtcgtccgcaccggaggtggttgcagtgccgttgttctcttgtgccgaaaggctgatgctcaatgcacagcatacaagagggagtaaatagaatcgtttcatgttcttctttttatttatgttcatattcttcttctgcaaatcttcgtctgcaaagtacggcagaatcagcagaaacttgtgttatcagcggcttaccaagtgttatccagtgttatcgggagtgttatttagtcttatcggatgatagggttcacaatattagtcttacctttgtatgtataaaagtaaccggaaacaaacatgaaactgccattcaaatatattgccatacttgtcatcgtctccctggccggcatcttcgcctaccaagcctactggctgacggggctctaccataccatgcacagtgaaatggagagggacatcaccgaagccatgcgcatgagcgactataacgaaatgatgatacgcgtggataaaatgaagcaggacgacataaaccacggtgaagtcagcgtatcagccggatacagcgatgacggaaaatcatttgtccgtagcagtaccaccatctcccgtgaagattctttggacaacaccaccctgcacgaaaccttcatgcccaaaggagacagtgtttacgtgacccacccgaacgattcaacccgcgtggaagtcagtgtcagggactcggacagctctccccaatccgcattgagtgccaaagggggactggatgtgattttgcgcgaccaaaacagtatgctggaactcgccacctacttccagcgcggactgcattcgggactggacatcatttccgaccccgacgtaatgctttatgacagcctgctgacttcattcctgcatgaccgtaacatcaatcttccccataggctgctacatcttcacaaaggcagcaaatgggactctaccattctctatatagatacattggtaaacatcggtacccccggctatgtgcctacctcaaaagccgtggaatataattattctttcgacatcaatacaagtcaaagctaccgtctcatcatggaaccagccggcacgttggtcttgcgacagatgtcgggcattctcaccacatcattcgttattctgatcgtactcgctttctccttctggttcctgatacgcaccatcctgaaacagaagacactggaagagatgaagagcgatttcaccaacaacatcacccacgaactgaaaacccccatcgccgtagcatatgccgccaacgacgctctgctcaacttcaaccaagcggaggaaaaggcccagcgcgacaaatacctgcgtatctgccaggaacagcttcagcgcctcagtggactggttgaacagatactttccatgagtatggaacgccgcaggactttccgcctgcactcggaggagtttgcaatacgtgatattctggaaacgctcatcgaacaacacaagctgaaagcggaaagctccgtccacatatcggtggacatcgaaccggaagatttgagcgtacttgccgaccgcacgcatttcagcaacatcatcagcaacctgatagacaacgccatcaaatattcgcacggagaggccgaagtggccatccattgccgcaaggtaaccgtcgaagggcagaatgaacagactgaaatctccgtcagcgaccacggtatcggtattgctcccgagaagcagaagcacatcttcgacaaattctaccgcgtacccacgggtaatctgcacgatgtgaaaggctatgggctgggattgttctatgtgaagaccatgatagagaagcatggtggcagcatatcggtaaagagtgagttgggaaaaggaagtacctttacgataaggatatgataacattatttgttagggtactttacattacttgttaaggagctttacattacttgtaacaaaagcgacaattatggaaaagataaccgtacttctggttgaggacgaacagaccctcgccatgattatcaaggacacattggaagggcagaacttcatcatccacaccgcagcagacggtgaagagggattgcgcaagttcttcgacctccgccccgacgtgctggtggcagacgtgatgatgccccgcatggacggctttgaaatggtgcgccgcatccggcagaccgacaaacagaccccggtactgttcctcaccgcccgctccgccatcaacgatgtagtggaagggtttgagctgggtgccaacgactacctgaaaaagcctttcggaatgcaggaactcattatccgcataaaggccctggtaggcaaagctttctcctttacagaagaaaatcccaaggaaactaccgtttttgaaatcggtgactaccgtttcaattccgtcactcaacgacttgcttttgcaggcagcaccccgacttcacctgacgcggatacggaagtggaactctcccaccgcgagtccgaaatactgaaacgcctttgcgagaaccgcaaccaggtggtcaacacccagaacgtattgctcgacctctggggagacgacagcttcttcaactcccgcagcctgcatgtgttcatcaccaaactgcggcataaactggccggagacgagcgcatccgtatcgtcaatgtgcggggaataggatataaactaatagtaaactaaactaaaactaaactactatttatgagaaagttattattcattacttttatctgttcctcactctgcgcctatgcacagagcgagattccggaagacacaataaagaaccggcctcccgtaaagaaagagcagattcccttttctccaaaagagaacaagcgtacgggccttgatgaaagccagccccaacaaagtctgcagggcgaacagcaggaagagataaatctccatctccctccctccgactatgtggagcccctgccctggacggacatgaagaagatacactttcagaagaacatctttgaatgggacttccagcgtttcgccgatttcctgctctcgccggaagtcgtactgacgatgtacggcagccataacacctatcctgcaatgggctccatcatgcaggctggcgcaggaattacttattacagtcccgacggacattgggaactgagcggcggagtgtatgccgcccactattccatctcccaaccttcatccattaccggtgcccagtatgccaaaagggatgccccccggggtactcaatgggacataggctacaatgcctccgtatcctaccgcatcaatccctacatgcgcctgcatgccttcggccagtattcgggctacgggagaagtaactcctttcatggatatatgaacccgatgtatccgcaaagcggttatggcatggtactggaactgaaagtgacggactggctcgacctcaacggagggatggaacgaagatacgaccccaccaaaatgaaatgggtgacttcgcccgtcttcgcccctaccattcgtataaagaaatagaaataatacaaagatatttccagaaatagagggaaacgagtatctttgttcagtctgcccctatgcggtggacagcaactgaaattgtgaacaaagaactatgaaacgaatcttcttctgcatcatcattttacttgcaggcatgtcatccgtcagcgcacagagcgagatgcctgccgatacggtacgtactgcagtacgtggcaaagcgtctcccgaaggcatgtctccgtctgaaaaggagcttctgccggacgtgaagaattacgacggcttcctgctggatatggggctgatgaatctgtccaccccactcttcccaaattcactttggagataccggatgccagcaaagactatagccgcatcttccagttgaacccgaacgtgacttattcacaaggtctttcgaacatattctcactcagcaactcccggtatttcagttcgaatcccttcggactgacgggcttctggggctctactgacaacctgcaaatgggaagtttcactttgaagaacggcatgcgcatccatacgtacggcgaatatgacaaggacggctggaaagtgcccaacccttccgcactgccttgggaaaagaacaatttcaaaggggcgttcgagctgaaatcagccaacggagcctttggcatacgcatcgaggtacagcagggcagacacgtgccctattgatgcccatcacttaacaacagaatcaatgacaagaaagaaaatactggtgataggcgccaacggttttaccggcagacgcatcctggatgatttgtcccgcaacttgtcttaccagacaacgggctgttccctgcacgacgacatctgtcctcattcgggcgactatcgctttatccgtacggatatatgcaaccgccaggcggtggaaaagcttttccaggaagtacagccggatgttgtaatcaatacctccgccctctccgtccccgattattgcgaaacgcaccatgcagaagcggatgccgtcaacattactgccgtggagcatctggcagaatgctgtgaggcgggaggcagccgttttatccatctttccaccgacttcgttttcggtggtgatacggaccgaccctatacggaggaggatattcccgctcccgttaattattacggctacaccaaactggaaggtgagaaacgtatcgctgccgtttgcagggattatgccatcgtgcgtgtagtggtggtgtacggtgccgccctgcccggacagcatggcaatgtgctccaactggtggcaaacagattaaggagcaatgaggaagtgttcgtcgtatccgaccaatggcgtacgcccaccttcgtgggagacgtgtcgcaaggagtggagaagctgataagtcatccgcaaaacggtatctatcatctctgtggcagcgagtgcctgaccattgcagacatcgcttatcgggtagcggacgtattggggctgaatcgctcgctcatccgtcccgtcactacgaaggagatgaatgaaaagacgccacgtccccgtttcagcgggctgagtatagaaaaggcaagccgggaactggggtatcagccgcgcacgctggaagaaggaataaagcagatgttcggatggtaaataatgcaggtgcggatggcagcagattagactacagcaactccggctctgccagtcctttctctttgcgataagcacgtaccatctccagaatcacatctccatatttctccacccctttctttccgaagtacggaatacgtacaagcatggccttatccgaaggaagcagattgctgatgcctagaattgccttctgctgaatgacggtgtatacgggcagccctaatgcggaagcttctgcattgcgccatgctaccaagcggttgtaaagttccggatgcagcacatccgtgggtacttcaacagccgtagcatcgcgtttccgctcacgcggacgtttctctttatcagcctgcttactgcttccctgcccttctttggcagaagcacttctccctttgcctttacccttctgcgaagccgaatcatcaatggaaagcagtgctttctgcttcaagtatcctgccatatggaaaccattctccagcacataatccagcaaatcagtcttcatgtcaaacacttcctccagctcctccatggcatcccggagcttcttcttcaactctttattatcagaagttaccgtactcgccatcaccgcatccagcggttgcaactgctcttgaaaataagtggcggcagagtgtatgcgcccctgcaaagtcgggtcggctgcatagtcctgcgcagtatcaatcaggcgggtatactggatactgaacttctgggctactttcgtcactttgtcgtgaaaacgttccatttcctccttgcaggctgcgagttgcttgggaaagagcttgtacaagtgttcgtctatcagccgcacataccgccgcaaagcctgctccatgggctggaaatcgaacaagcccgacagcagttccaggaaataggtctgctgcaaggaacggaagcgtttctcgtccggctcgtttctccgtgcctccatcgtgaaggtatctactgcatggtcactgataacggcctttgcagaaagcggggcactgagcaccactccctccaatgtcttgcagcggctcagagccacataggtctgcccatgcgcaaaggaggcactggcatcaatcacggcacgttcaaacgtcagtccctggcttttgtgaatggtaatcgcccacgccagcttcagcggatattgccggaatgttccttcaatatcttctgtaatctccttggtttcctcatcaagcacgtatttggcattcgtccactcttcctcttgaagtaagaaggtagcgtcgcttcccttactgcgcacttcaattccatctgccgacacggctgtcacctctccaatcatgccattgtagtaacggtgctcaccggagatgtcgttcttcacaaacattacctgggcaccgcgtttcagttccagtacttcatccgtgggataggaatattcgggaaactttccgtcaatcttggcacgaaaggcatacgagcgtcccggaagttgttccagctcatggtcattaatccgttgggcctgataattgtgggtcaccaggcggatgtatccttcttctttatctggtacgaaattgggaatataccggcggttcaaggcttccagcacttgcccgtcacaacggttttcgcgaatgcggttcagtaattcaagaaaagtcccatcgttctgccgatagactttctttagttctatggtgcaatattccgtctgcttcaatgcctggctggagaagaaataaggcgtgtcatagtatttgcgcagcatctgccactcatcgtctttcactacgggagacagctgctgtaagtcgccaatcatcagcagttgcacgccgccaaagggtttgttccggtcgcggaaccgcctcaagacggcatccaccgaatcgagcaagtcggcacggaccatactgatttcatcgatgaccaataaatctatgctgcgtataatgttgattttctctttcccgtaacgaaaacggtaggttgccttgccatctgcgctgaatgagctttcgggcacataaggagcaaaaggtacttggaaaaaagagtggatggtgacaccgcctgcattgatagcggcaattcccgtcggtgcaagtacaatcatccgtttcggactctctgccctcagttttcgcaggaaagttgtcttaccggtacctgccttgccggtcaaaaaaagatgagtgcctgtgttttcaatgaattgccatgcaagcgctatttcgggattattctccat

SEQ ID NO: 391 - DNA, 25678 bp, unidentified
  source 1..25678: mol_type = unassigned DNA
ccattcatttgttttatgtaagataccacataatcttccacatagattctgcagtgcttgtccgcctctccgatctgcgttatgttcttcggtaattccatacaaaaaacacctcccatgccgtttctatcagttatcactaactatagcatccgcacaggaggtattttagcgttctttgtcgcacctcttcaaaaacagttcgacaaagtttgcaccatattctatgtattcttagctatgcttcaaacttatatacggtaacagaatcgtattctctgccgttctccccgccaaatacataggaggggaaattctcatgatgaatggtatccgggaaatactgggtctccaatgcaaaaccgcagcggttgccgtaggtcaccccatcttttccgggctgtacatcaataaaattgcctgcataaaactgcactcctggcagggtggtgtatgccttcattactctgccgctcttcgggccttttactgtggcaatatgccgtaatgtaccgtcatcgttccatccatcgatcacgaaattatggtcatagcctccggtcaggagtaactgctcatactcttcccggatgtctctgccgatcttcttgggctgtgtaaaatccatgggtgtgcctgctaccgcacgaatctcaccggtagggatcgatcctgctgccaccggagtaaagtgagaggctctcagccacagttcatgctcttcaatgctgcctgcaccgtgaccgtccagattgaaataggaatggttggtcaggttgataatggtcttcttgtcactggaagcatggtaatgcagagtcagctcattctcttcactcagagagtaggttacggataccttcttattgccggggaatcccagatgtccatcctcatcctccagagaaaatgtcacgctgttctctcccatctccgcatcccagagtctcttatggaagcccagctgcttatgagtatgtaaattgttggcaccgtcatttttgtccagctgataagtaacgccatccagcgtatactctgcaccgccggtacggttcgcacaggggccgatcaccgtgccgaaaaagctgtcgttgccgtaatagctctcaccattgtcaaatcccagcaccaggtcgtccaccttgcccgtggcatccggtaccagtacgcgcaccagagtagcgcccagatccgttatctctgctttcatcccttgatcattactcagggtatacagagatatctctttcccttccgcacttttcccaaataaactttttattactgccattgtcttgtcctccctcttttaactataattctactctaccctctaaggcacggagtaatgttacctcatcaatatattccagatctcctcctacagggacaccactggcaattctggtcaccttgattcctgtgggcttgataagcttgctgatatacattgccgtggtctcaccttccaggctggaattggttgcgataatgacctcctccacatcaccctgcagacgttccatcagttccttcagcttgatgtcaccgggtcccacacccagcatcggggaaatggcaccatgcagtacatggtacacaccttcgtatttaccggtcttctcataggctgccaggtctctggtattttccaccaccataatggtacgatgatcccgtctgggattcgcacacaccgggcagagttccttatccgtcagagtatagcattccttgcaatagcggacattggctctggcttcgatcatgacgtttgccagcctgtccacgcgttccttcggcatattgatcagatgaaaagccagtcgctgtgcggacttactgccaatccccggaagggctgccagttcttctattaatttattgatctgtccgctgtagagttccattagaaaggaaatcctcctaatccgccggtcattttgcccataagctctgcattggcttcatccgccttgcgcagtgcttcgttggctgctgccacgatagcatcctgcagagtctcgatatcctcgggatccacgatctcctctgccagtttaatggatgtgatctcttttttaccgttaatggtcacttccacagctccgccgcctgcggatgcggagaactccttggtctccagttccttctgtccttcttccatctgacgctgcattctctgtgcctgcttcatcagattattcatatttccgggcattgcgcctccgggaaatccacctctttttgccatgttgctgtttcctccatattatttataattgagttattattctatcttaccttatctgcaagtctgccgcaatcccaaattcacgcaggatcactcttcctcgtcgatctccatgttgatgaccttgcccagatccacataattgtcttcgaactccctgctgctttccacggtctggatcgtcacttcgatctccttaccggagaaatcggacaacagcatttccaactgctgcttgttctgctcgtgagcttctcctttgaaataatcggaagccagtccgtcctccaacaccaccatgagcttgttgtctccacccagacttaatcgggcgtttttcagatacatcttcatgggattctcggcatttcccacgatggccggccatttccgtacgatctcctggatatccccggggaccgccttcggcaactgtggcttcggctttgccacaccggcctgcggcactccctgtgctccgggagctccggcaggcatttgcgccgccgtaacgacaatgccgttttccactttttcctccacctggcgaatacgatccaggacagcttcctgatccgtctccatctccggcttacacagcttgatcagcgcgatctctaccaggatacgcttctgcgccgcatagcggatctgtccggacagttcggagaaaatatgaatatagcggatgatctggtccatggacagcatggaagcttcttccttcagattcgccagattgtccgtagacatgtctatgacatcctccagattatccgctgtctgtaccaacatcagattccgcagataccaggtaaagtccgtgacgaactgtaccagctccctgccctgcatgacgatctcttccaacagttcaatgcagcctaacacattccggtccataacgaagcgcagcaatctgctgaacacttctgtatccactgcccccagcacatccagggtcatatcgtaggtcagttctttgcccagatggaaggcaatacactgatccaacaggctcaaggcatctcgcatagaaccgtccgctacttttgcaatgtagcgcagagctctgtcctccacctgtacctgctcggtgtccatcagttccttcatacgatccgtgatggtatcaatggagattcgtttaaaatcatatctctggcagcgggacaggatcgtaatggggatcttgtgcacctctgtggtcgccagaataaaaataacataagagggcggctcttccagcgtttttaacaatgcgttgaaagctccgggggagagcatatgcacctcgtcgatgatgtagaccttgtattttccctccgcgggggaataggatacctcgtcgatgatctcacggatattgtccacaccgttgttggaagccgcatcgatctcgatgacattcatgctggctcctgctgcgattgccttacaaatacggcattccccacaggggccgtcctctgtggggtgttcgcagttcactgttttcgcaaaaatcttggccaccgtagtcttaccggtacctcttgttccggtaaacaggtacgcatggccgatccggttcgctcgcagctgattcttcaatgtcgtcacgatatgatcctgacccttgacatcggaaaaagcgtccgggcggaatttccggtatagtgctgtatatgacatgttttttctctcttccttataactattcagagccatcaaatattagcagatgcttggcaaaaatagttactcattaattttctgtcttaatcgccgaagcagatgcccagcagcttcgcttcctgtacgatggtagcatcgggatccacggtctttaacttgcccgctacatcctctaacggaacccttacgatctcacggttcttgtaacctaccatgaatccatactgattatccaggatcagcttgcctgcctcggagcccagacggctggcgaatactctgtcataagggcaggggcttccgcctctctgcatatggccgggtacggtgacacgtacttctctgccggtcttctcctggatctgtgcagccacctcgtaggatacggaagggaacggatatttttccatctttttcttgtaatcttttttggtcagggcagcatcttccttggaaatcgcaccctcagccacagcgataatggtaaaacggcagccctttttgtccctgtcttcgatcttctcgatcaccttatcgatatcataagggatctccgggagcaggatgatgtccgcaccgcctgccattccggcattcagggtcagccaccctactttatgtcccataacttccacgataaatactctgccgtgggaagctgctgtggtatggatgcagtcgatggcatccgtagcaatatctactgcgctctggaaaccgaaggtcatatcagtaccccacaggtcattgtcgatggtcttgggcagggtcacgatattcagtccttccttgcgcaacaggttcgcagtcttgtgggtgccgttaccaccgagaattaccaggcagtccaactgcagcttataataattctgcttcatggcttccactttgttcagtccgttgggatccggatcctggatcgtcttgaacggggtccgggaggttcccaggatcgtgccgcccttggtaaggatgccggagaaatccttgtctgtcagcatgcggaaattaccgtaaatcagtcctctgtagccatcgaggaagccatagatctcgacctcttccttactgttcgccagggtcttcaccacacctctcatggcagcatttaatgcctggcagtcaccaccgctcgtcaacattccgattctcttcatcgtaggatcctccgttttctatatttcattattttctcttgcgtttgctgtaactatgcaaaactgtcttcgttctgccaatacttatttctattttaatacatttattttcatctgaaaatagtttgttgtaatttccggcagatttctcccctatggcaaaacaaacctcagaagcaccgggcctctgaggttcgcttatcatcttatcatacgttatttgaatttaaactttcctttgatcatggtcacgtagacagctgcgccgccaccgccgaccactacggctccggctgctgccgctgccgccacgcggcctgcgttcgttcccttaccggaggtctccgttatctgccctgtgccggattcctgagagtcggaagtctgggcggtcatggaatctatccgctcctcctgcggtgcttctccactcgattcctgcgtgtcctgtgcctccccggagggctttgccgcatcttccttacggttttcgtccgcagcgggtgttgtcgggggcacgggaattacagaaggctttaccacaccgggtgtggcaggcgttgccgtggctgcgggaggtgttgccgcgcccgtggccttctggtccgtattggacgcctgactgctgtcatcatcgtcatcgtcgttactggcagcaggcttcttcggtgcgatctcataaccgcagacggtacagatctccgcccgttctgtggtggccgcgccaccggatgcatgcttttccgtattgctggtgattccacagacaccacacttatgccagtgtccggtcatatcggacagatatccttctgcccagctatgatccgtcttcggaagaacgatctctgtcgctgttatgctcttgcttccgtccgcggatgcaaaatacagtccgcagacgtcgcaggtccagtattcgatgctgccctctgcctgacaggtgggttccacccggtcgtggcggttcagtgggccgtgaccggagttccatgtcttcgatacggcggggcttgcgttataatcatcggtttccgcatagcggatctgtgcagtcaccttcttgttgtgaccgactccggtggatttggtctgcccccagtccgttccatcgaagctgaactccacgtcagtgcggtctgtggtgatctgcgccgccagatcgttgccgctgacggtaaaggtcatgtcaaaggcatccggatccggggtatcctcgcggtctgctttttcggtgcgacggatgtgcacatcaacatagaaatcctcataattctgtgactgtaatttaaccgataatgtggcagtcttgtcgatatcttccacagtattttctcccagggtaaatatcagctttccttccgaatattcaaccttggaatctactgccaaaatgttagcatcatctgactttaccatactgattaattctgtcgttcccctgtcttccggcagtcccggtatctgtacttccttctctcctttggctgcccaactgtaatataaattctgcattggaattgccgaaactttcgccttttcaattgccagcttcaccgatgcggtcaacgtctgatagtattccggatgttccggaacaaatgtcgccgtgtaggtctcgctgtcaccgacataaggaatctcatctccgtcgatcttccagcttccgtcaataacattattccccagcttcgctgtcaatccgttcactgtaaggccactcagtttcgtgccataggttccgctggcaatgccctcaccttctacggtaagtgtcgccggattgatattcacggtcagattcttcttcgtctgctccgggaagaaagaagagtttgtcccggtgtaaacgagggtgaaaatggtctcgcccacggtctgcgccttgtaagttgcgatgccgttcttgaaatccgctgcgcttaccaccggggtatccccgatccggatctcaaagctgccctccgtatcttccgcagagatgggctgttcgtctgtcacaaagtttaccagtgcctttgcgttaaaagtaatatcttgtccataggtgggagtgttggtatctgctctctcaaactgcagaccggtggtgtaatttacaccaactgcattattttccccaagcgaaggatagtaggctatgccattctctttgtcgttggctttcttcgtccagatggcctgatcaaagccattgtctttgagtcctttgaaaaagctggaagaggtcagttgttgagtagaacgtcccaattgatatttatcttctacgttacaaatatcgttattgaaatagcaattcgttacaccataatcttgactatttgttattccagcaagataggcatcattctcggcagtatcaatcgtagctatactaatgcaatgattaataatatctactacagctccactcctaccgcagattcctgccgcagaacttccctgcacgtctcctgcaaaaaagcactgggaaatcttagtatcttgtccggcattgccacagattccacctgctgtatacccttttaccgttccggtaaaggagcagccataaatttcgcccgcagacaaatttccacaaattcctcctgtttcactataactcgaaacaatgtctccgttggcagccaacaacagtattactttaccgcttttgccggatgagttgcctatttgtgcgaacaggccagaactataaacaccatcttcttttgtcatatccacatggcttatcgtatgtccgtctccactgaattttcctgtgtacggagttcctggatctccaatggaactgagttgtactccactcacatcaatatcgttccccagaacatagtttgcactccattttgtctcatccctatcctgtccgatggctgcgaattcctccgccgtggtgatcagggtataggtatcccagtcgttaccattcgttgtaacatagttgtataccggtacgggagcagtcttcgtctctttgatatctgccacctttgtcagattgatgtaagtccctgtggctgtaccgaatctgccctgtgtagtctttgcagtgctggtatcgacactgccctctttccagtttgcagaatcgaagccctccggaagtgcaccgcaaagctggctggtagtcaggggaatcaccttatcgttttctccttctcccacaccggcattattcaaatcactgttgtaatagcagttgccgataaagttcatataactcgaatccgtgcttccagctatgccaccaacattttttgccattccctgtaatcttaccacaattcaggcaattactgatgttatacctattcgctgatgcaccggtaataccacctacagagccatcctgtagagaaactgttacagcacctatattataacagtattgaactacgccaccggttccattataactggcagtgcccatgattccgcctgctgcataatttccacttactgaactgctattgtagcagccggaaatacttcctgtcagacttccgcatacaccgcctacctgccgaatcgcataaatcgtgttttcgatactatagcagtcagaaatatttgctccttctccagcaattgcgcccacaaagcttttaccagaaatatttgccctctttactgtgacactttttatatagctggaatcagcggtaaagttgtagcactctccaaacagacccacatagctgttttcctttcctgtaattgtcattccggttattgtatgtccgtcgccattaaagcctccccggaaagacttgccatgtgtacctatcggcgtccactcctcaccgctaaggtcaaggtcagaaaccagccgaaaatgcttccattgataatccgtgccttcattcacctgctgtgccagatacgcaagctgctctgcattttcaatcagccagggatcatcttctgtgccattacctttggtaaaagctaccgctgtaccatcccaggtatctactgtttccccttccgctctcgcactcaccggcacggtgatccacaccagtgccgccagggccagcagggccagcctgatctttacactccatgcttttgtacttttcttcataaccctcatgcctttctatatcctgcaaaatttcaaatatttcccaaccctttgcagatgtaaaatcccaatcttgtttttatactttccgtatcatttattataccgaaaaagcaaaggcatcgtcaatattttccacacgattcgtctcatatttttataaaattatgtcaaacaagtgcgcccaccgcaaaatcgagcaggctggctcatcgtaaacacaaaaaaggagccaccggatttctccggtcactcctcgttgccttctctgaaaaatatatccagttttcccagacatttgatcaatgtcttcatttcttcctcgtccagatcccgaatgatcgtatggatcattttcctgtggaaatctctgtggtggaaaaaagcttttctccccttctctgtcagggtcaccagcaccacccgtttgtcctgtgtgctgcggttgcgggtgagatatccttttctctccagactgttcatattcgtggtcagggtacccacggtaacgtggagttccccggcgatacgggacatactctttggttcctcgatgccgatagcctccagaatgtgtatgtcattatttgtaatatccttgaattcttctgttatgaccgcctttgcctctgcatccatcacgttatggaacaggttcaccaacagttcattcagtacccggttgttgctcttctccatagttttcccaataaatgtttctctggtataccggcaatgctcccagaccgcaggcttcctgtctaccggaccgcgtccatgccgttgtcgtgtccttagtcgttatcagtataccgtctaccaggtcatcacgcaagccccaatcgtaagcccggcgccaaatcccgccagaacgatgcggtcaccgcggtgtagctttccctgcttgtgtagttcatccagaagcaccggaatggaggcagaggacagattgcctaccctctccagatttgtaggaaatttttcgcgatccgcatgaaggcgtttcgccactgcatcaataatacgtgcgttggcctgatgcagtacgaacaggtcaatatccggcacagcaagtccggcatccgacaacgcttcctcaatgcattgcggcacccgtctggtggcgaaccggtacacttcctgtccatccatctgaatataatgttctctgtcatccgtctgctgtttttgatccgtttttgccgctgaagtccttgcatatggggttgtcagttctcttgctccgcattgcaggactccgccaccggtgccgtcggagtgcagtgcccggcccagaatgcctgctgccggtatccgtttctcctccgccgtctcctgcatccctttctctgtctccggcaaagcgttactgtattccaccgcccgagactccgtcctgcatcgctccacaactaccgccccggcgccgtctccgaacagaatacagctgccccggtccgtccagtccaccagcttggacagcacctcactgccgatgatcagtgcattttctgcaagtcccgtccgcagataagcatccgcagtattcagggcaaataaaaatccggaacaggccgcattcacatcaaaagccaaagcattcaccgcgccgacagctgcctgtacctggcaggcacagcagggcagatactgttccggagaacaggttgccaccaggatcagatcaatctcttccgctctttttcctgcctgttccaacgctttacaggctgcttctgacgcaagtgtcacaaccgtttcgcccacagacacatgacgctcaccgataccggttctctcccggatccattcatccgaggtttctaccatctgctccaattctttatttgtaacgatccttcccggaagtgcacttccggttccggtgattcttatggtcctcacgccatttcctccatgatatccactgttctttctattttctgcgcccgccaggcattgctgccacagaacaacagtccgttatccacatctcccatcgccgcattgatcaatgctctggtgatgcaatacggtgctgtcttcggatcgcaggttttaatgcaatgtctgcatccggtcataaaccgctccccggccgccaccttttccagaaaagcattctgtatagctctgcccggcattcccacagggcttttcacaatgacaatgtcttctttccgtgcgctgagatatgcctgcttgtatgcatctgccgcatcacattcctctgtggtcacgaaacgggttcccatctgtacccccgcagccccgaggtacaggcaatgctccagatccctccggtcataaataccgcctgctgcgatcagtggaatttccagttctgctgcctgccggatcattgccgtaagttctctctcatagttctccggtgtgtaagcatccagctcttcccgcttaaagcccagatgtcctcctgccaacggtccctctgccacgagaaagtccggctttctgtcgtattttttcatccagtatttcgtgacgaccgacagggcacgggtgctcgacacgatcggagccagcatcgtccggtggcttcgcccgtgcattccgctttccgtctctgccacaactccgggcagatctaacggcagtccggcaccggagataatacagtcggcacctgccagcactgctgccctgacataatcctcgtaacgctgcgttgccaccatgatgttgacaccgacgataccgcctcttgcggtctgccttgctttttctatttcttttccgatagtacgcagattacaggcgatgggatctctgtcaaaatccggctcccggaaaccgatctgggcagtagaaataatgccgatcccaccggcagctgccactgctcccgccagaccggacaggctgattcccacacccatgcctccctggatcacgggaatatctgcatgtaattcccccaggatcatttttccgtgcttcatcccacatcacctctcattaccgctttaatacttgcggaacctttcataacgttcctctgcgatctgttcaccggtcatgccggtatatttttgcaggaattccttgatatgttccttgagatacccgccgatggcttccacggtactttggtctgccccgccgtattccggtacgatcctctcgatcactccgaggcgtttcaggtcctcggatgtaatattcatgacttcactggcttctctggcacggtcagcatccttccataatatagaagcaaagccttcgggagacaggatcgagtatgtggcattttccatcatccatacctcattgcctaccgccgtagccaatgctccgccgctgccgccttctccaataaggatgcacaataccggtaccttcagggccgacatctccagcaggttccgggcaatggcctcgccctggcctctctcctccgcctccacgccgcagaaagctcccggcgtatttacaaagctgataatgggtctgttgaatttctccgcctgcttcatcagacgcagtgccttacgatacccctccggcatgggcataccgtaattgcgtctggcacactccgcaaaatccttgcccttcacatctgccagcactgtcaccggctgcccgtccaggaatgccactgcacctaccagtgctttatcatccccataataacggtctccgtgagcctccaccacataatcaaaaatgtagggaatataatcggtcgctgccggtctgtccactctccggacagtcttgaccttttcccatgccgttctggggagtgtcaggaatgaacgctccttcacgatctccgtaggttcaaaatggaagtcaaaatttttcttaaaatccgcataattcccctcactgcaccgatgcgtcgtgatcaggaaatataaggtcttcttcagattctcccggcggacgataccgtccacaaaaccatgctcctgcaaaaattccgctgtctggaagccatcagggaggcgctgtcccagagtctgcttaataactctcggtcctgcgaagccgatcaaggctcccggttccgccatgatcacatctcccagcatagcaaaactggccgttacaccacctgtggtgggatctgtcaagatcgtcgcatagagaagtcctgcttctccatgccgtttgatcgctgcggaggtttttgccatctgcatcagtgacacgattccctcctgcattctcgcaccgccggaacagcagaacaaaaataccggtagtttccgttccgtagctttctctatagcccgggtgactttctcgccgaccacatgccccatactgcccatcataaatttggattcgcagatgccgatcacagccttttccccgtagatctcgcattcacctacggtcacagcttcttttacgccggatttttccctggcctccgacagcttttcttcatagccctcatatttcagtggattgctctcttctatctcctcgaaccagggccgaaagcttttccggtctgccaccatgcggatccggttgtgggtcttcacccggaaataataaccacactcatagcagacatatttatttttcgctgcccggtctctgtttatcattttcttacatttcgggcatttgatctctgtttctgtatctacacttcccatacctgcacctcttattctgcgtcacttttatctctctgtcccacccataagaaatcacttccgcagactatttttatttcaacgcaaaggtaagttctgccttcgctgccagttttccgtttaccgtggcgatcgcttccccgacacccaccggtcccttactgcggataatggtggtctccagctccaaggtgtctccggggcgcaccatctgtttgaattttgccttatcgattccggcaaaataagcggtcttgccacgatgctccggcagagacagaattgctacagcccctgtctgtgccagtgcttccatgatcaacacgcccggcatcaccggattccccggaaaatgcccggcaaaatacggttcgttaaaggtcacattttttcgtcccactgcccgaacaccgggctccagctcctcgatagtatcgatcagcagaaagggatgtctgtggggcagaatctccatgatttcctgggtgttataaactgacattgttcctccgttccgcgaatgctgtcgtatcaactacttcctcgcattctgcaatcgtcctcgttgatgctctgccttctatcctgtgtcttgaacatctgctgcggttattctgtgtacttcttcaacagcagactcgcattatgtccgccgaagcccaacgaattggtcaatgcataaggcacctcttctttgtagctgtcccggcaataattcaggtcaagttcctcctccgtctcacgcagtcccacggtgcggtggatatagccttcctgaatttcttttacgcaggtgacaaactccactgcacctgctgctcctaaaagatgtcccaccatggatttggtggaattgatcttcaggtcatacgcatgttctccaaatgccagcttgatcgctctggtctcgaacaggtcattatgatgggtgctggttccatgggcattgatataggtaagctcttccggtgccaccccgccgtcttttaaggcattcagcatggcggtggctgctccgctgccatcctccgcaggggatgtaatatgataagcatccgaagaacagccgtagccggtcagttccgcatagatcttcgccccgcgcctctttgcatgctccagctcttccagtaccacgatagcggaaccctctcccatgacgaagccgtttctctccttgtcaaaaggaatggatgcccgttccggatcctcactaaatgacagcgctgtcagtgctgaaaatccggcaattccgatgggggtaatggagctttccgttcctcccgctatcattacatccgcatcaccgtactggattgtacggtatgcttctccgatggaatgtgtaccggttgcgcaggcagtaaccacattcaggctcttgcccttcagcccataggcaatgctgacattgcctgctgccatattagagatcatcagaggcaccagcatggggcctaccctgccggggcctttttccttcaggcggtcatattcccgctccatggcctgtaaacttccgataccgcttcccacactgcagcccaccatataaggatcttcctgttccatagtaagacccgcatccgagatggcctgtccggcagccgccacagcaaactggcagaactgctccattctgcgggcggattttttgtccatatattgtgcgggatcaaaatccttcacttccgccgccagcttacaacggtaatccgcagtatcaaaataagtgataggaccgaatccggtcttgccctctttgataccattccagaattcctctacgctgtttccaatcggagtgatagctcccatgcctgttactacaactcttctatttttacccatacgtgatatactccctcgcgtcctgacttattttctatcctgctgtactgttagcggacatattttctattctgctttactgttgccggaggtattttttacattgccataccgccgtccacgcacagcacctggccggtaatatagtccgaggcatctcctgccaggaacagaaccgcctgtgcgacatcctccggtcttcccattttcttaagcgggatctgtccaaccgcattatcctgtaccgcctccggaagcttatctgtcatatctgtccggataaatccgggtgccacggcattcacacagacattcctggatgccagttctctcgctacacttttcgtcagaccgatcagtcccgccttggaggcggaataattagcctgccctgcattcccgacgatgccactgacagaagagatattgatgattttcccatatctctgcttcataaaggtcttcgtcagatgccggatcatgtgaaatgcgcctttcaggttcgtatccaggactgcattgaattcttcttccgtcatccgcacgatcagattgtcccgtgtgatcccggcgttattgacaaggatgtcaactctgccgtatttctctgttactgcctttacaaaggcttcactctctgcaaaatctgcaacattgcatttcacagcctccgccatgccgccttggcttcggatgtccgccgccaccgcttccgctgcttctgcagagccgttataattaatgatcaccgtggctccttctgctgccagtgcctgtgccactgcttttccgatgccccgtgatgcccctgtgacaatagcaacttgtcctgtcagactttttcctgtcaacatgccagttcctccatcacccggtccagatcctccggtttctcgatattgtatactttgacatttctgtcaattttccgtacgaagctgccgagtgtcttccccgggccaatctctatgaaagtgtccacgccatctgcgatcatccgctctacgctctgggtgaaatgaacgggactggatacctgttgtttcagcagttccgcaacctgtgacgcatctgtcacataatccgctgttacgttggacacgtaaggaatccaaggggttgacagcttgacgcttttcaattcttctgccagctgttctcccgcagttttcagcaaagctgaatggaatggtccgctgacctttaagggtacacagcgttttgcacctgcttctttcagcgcttccgatgctgctgctactgcatctgcctctccggtgatcacgatctgccccgggcagttataatttgccaccgagacgactttgccggtttcttttgctgtctgtccgcagatttttgccacggtatctccgtccagtcctaatattgctgccatggctccgccttccggataggcctcctgcatatagataccacgcatccggatgatccggaacagatccggcagctccatcacaccagcggcagccagcgccccatattctcccaggcttaagcctgctgccatctccgctttcagtccttttgcctccaatactttcagaattgccacttccatggtcagcatggcgatctgtgtgtattccgtaatgttgatataaggattttcttcaaaggtcagctgttccatggagtacggatgtccgctttccgcctgtacttcccgcttatcctgccaatacagattctggagcaccttgtctgccagcttccataccgcctgtgcttccgggtaagtatcatagaactccttgcccattcctatgtactgggagccctgtcccgggaataaatatgcgatcctgctcattttgtcttctcctaattactatgtgatgctattgttctcctcggttacagcacattttttataatgcgccgttttccatataactacgccgcctgtcgctgttcgaaatctgttgtcagcggttacctgtcgctatattttatttatgctgtccttgtgccgctatgcactcctgcgcctgctgtactgtttcttcaataatctcacggcaggtctgttctctgcggatcaagcctgcaatctgtcccgccatcagtgttccgtttacggtatctccgtcctgcactgccttcctgagagatcccagtgtcagcttttccagttccatgaaatcggcattctctttttccagctttagatactccctggtcatctgattacgtaaagaacgcaccggatgtccggtagacattcccgtcactacagaatcaatatcctttgccttgatgatctgattcttataattttcatggacgatggattcctttgatgcgacgaaccgggtgcccatctggataccttccgctcccagcataaaagccgccgccattcctctgccatcggcgatacctccagctgcgatcaccgggatagataccgcatccactacctgcggaaccagcgccatggtcgtggtggaaccgatatgtccaccgctttccatgccttccgccaccacagcgtccgctccggcgcgctccatcatcttcgccatagccacactggctaccaccggaatgactttcactccggcattcttccacagttccatgaattttcccgggtttccagcaccagtcgttaccgcttttactccttcttccacgacaatcttcgctacatcctccgcattgggattgagcagcatgatattcacgccgaagggtttgtcagtcagttctttgcatttacggatttcctcccggacaacctcaggcggagcggaagcggcaccgatgatgcctaagcctccggcatttgataccgctgccgccagcttatgttctgccacccaggccataccgccctggaaaacgggatattctatttgtagaagttccgtgatctttgttttcattgtctttctgatccttctcgtcattctgcgttatattacatattctgatgataccagggtcaaaaggtctaagcccacatgagcttgctcataagtgggtgaaagaccttgggacccgccccgatatgagcataaaagtgggatgataatcccacgatatgcgaatattgggtagggtgctatgtgccagtggcacatgtctagcacggaccgaagcggagcggagacatgggagtgcgtagcacgaagcaatccgtaggtatcaaaatcgggggcttttgcctgcggattcttgcattcaggcagatatgtcgttcttacgcatgctcctgaatatatctgataacatcacctactgttgccatattttccaattcctcggaaggaatggatacaccatattcctcttcaaacgccattaccagttcaaacagatccagggaatccacttccagatcctccttgaaacgggttgcctccgtgatctctacatcctcctggtttaactgttctctgatgatggctgctactttttctaacatgtttttgctctccttatgcatttcattattgtgtttctgataccttgctttactactttgtcgtctccggcgtgttcacttttcattcataaatgtttgcgacaccggtcttatgctttctccatattaccgtcggtaaaatgttttgactatcaaagcatttaaatgcaatatactacacagatgttgttctgtcaacatctttttttattattaccgcttacaaacttattatcatcacgtaagcagtaataatctcattgcaaaagatccttttcccggaaaaatactgctacaaaagcgcaattcccttgccaggcggtaaaatccggtggtttccatcggaaaatttgcaaaaactaccgcctgcaaaaataatttttcaaatcaggcggtaaatgccatcgcaaacaatagaaactactaggttttttcgtttctccccttgccaaacggttatttttcagataaaataatctacgttgtaatcttttggagacgtatcgaagtggtcataacggggcgcactcgaaatgcgttagcccttctcgggcacgtgggttcaaatcccaccgtctccgcacataaaaagccggtaatctgtcaaaacagactatcggcttttcgttttagaaaaatgtgcaaaaacgtgtttattttccagaaaaatgtgttatgcctcccgcagaatctgcatgatcgtatcataatgctccggatcatgtgggaaggtgcagcccgagcaatccttgatccgtctgccatttttctcgaaatacctgggattcccggggcagtgctccaagcggtacatggggcagtagcagaacaggcagttgaagtctgcaagtcccttgtggcaggggaaatatttacaatctttattctcaaaaaaacgataggaattttccatttgcaacactcacatccttccataacctgcaaagtttgcgcattggcgcaaatttgcgtgcgaaacatagaacttcttcgcgaaagagcctttgctctgagtgattagaagttcttttcacactttacactacacttcttccgccatacacattccatgggcaataccctgctccttcagctgttcctccagctggttcaaggcatcatcttcatcttctgcaaacaccatcgcctgatagacttcctccggtccttccggtgccagtgctgtcacctcatacatctgcatggcaattacctctttcttcctcaaaatacacgttcacccttctctttattttatacccgtttccccgtttttttgcaagcgaaaagcgccactccggggaagagtgccgcttttcaggagagatttatgtattgaatgttgctggcgaaatattaacccttgacgcttcccattgccacgccctggacaatgtacttggaaaggaacaggtatacgatgataacagggaagatagagaatgcaatcgttacatacacctgacccatatcaaacttcaggaagtctgcggaacgcagctgagcgatcaggataggtaatgtcttcatcttgtcatcatgcagaaccagtgccggtgtgaagtagttattccagttcgctacgaaagtgaagatcgcctgtactgcgattgccggcttcatcagcggcaatacgatggaattaaatgtacggaactcaccggaaccatcgattctggctgcctctaccagagacaggggcaatgcactttccatgtactgcttcatatagaagaaagtagcaggtgctgcgattgccgggatgatcagggggataaagttatcctccagcttcatatcagctaccaactggataaatccgagtgcggtaacctgggtaggaatggtcatgattgccaggataaaggtaaacatgaacttctttaacttaaaatcatatacatggatcgcatatgcggtcatggtagagaagtaggtacacagcacagcactgcaggttgctactacaaggctgttgatcatacctctgactaccggcagggttcctgccatgacacccttccagttctggatcagatgtgtgctgggcagcagggtaaatccctgtgtcagctcgcctttggatctggttgcatttacaaacagtatatagaaccaaaacaggcagagaaaactcataataaccagtacgatatatgcaagtgctcttctggcatgaatgcccagacctttttttgtctcgtttgtttctacgctcaacatttctgccacctcctacttatcctgtttgccgttcgagaacttaaatacgatcaagctcaggatacctgtgataatgaacaacattacagacaacgcaccactcattccgtagttcttactgtacaaatggttgttcaggtacatgatcagggtcatgctggatctcataggatcgcccttaccgttggtcagaatctgaggtacatcgaacatctgcagaccaccgatcagggatgtgatcattacgtagatcagaatcggcttcaacaaaggtaatgtaatcttgaagaatacctgggtagaggttgctccgtctacctcggctgcctcgaagagggaagtatcgatacccatcatacctgccatcaggaggatcgttgtattaccaaaccacatcaggaagttcatcaatgctaccagacctctggtactccatatgtttgtaaggaactgatatggctcttttaagattccgatctgcatcagcatttcattgataggaccaccatcagagaacagcgtgaagaacaacattgcaaatgcggaagccatgatcaggttcggcagatagataactgtcttgaagaatctctgtccctttaatctaaggctgggatccgagaaccatgcacccagaagcagagatatgatgatctgcggtacaaatcccagtacccacatgatcaatgtattcttggtgtacatccacaggtccggattggacaacagctttgcatagttaccaaatccgatgaaattcggtccgatctgtgtcagtccggaacgataattttcaaaaaagctgtaataaaatgtcctgaataacgggatcaactggaataatacatacactactacaaaggggatcaggaaaatataaccccacttattatagcgtaccacctttccgcgttttacctttgccataatgattcctcccttttgccgtcatgctctcttagcgactttacgtttttcgtgcctttctttgtttccgatcaggctcgcagcagctctcttctttttgttcttaattatcttcttctgaaaaaagcttctgccaaccgggaattttgagagaaaaaccgtgcctacctgaccagccaggcaggcacggttctcaattccttattgtttcgctattcgcctatcatttcggattagtgagtaagctcaggatacttctcttctacacccttgtagaacagatccagtgcatcatccagagaagccttgccatcgaagtagttcttcatagcatgctggaactcttcgttacatccctgatcgtatgcagacaggttgctcagatcgatcttctcagcgcctgcgcagaacatagccagagggttctgtccgcccaataccttgctctgataagaggtatctgctgccatagcttccatagcgggtttgttgtttacgaaatcatcatcagctacaacgatctctttcatgatgtcttcatcagtggtcatcttcaggatgatatccttaaccagagaagcgttgtcggttccggtagcaccgcagatccaagtaccgccccagaaaaagccctgaggtccttcagtagcgccccagccaccctgatttgcgatagatccatcggtatcagctgccatggagaagttgatcagccaagcgggtccaaagtagcagaatactttgccatcgggatagaagcctttgctccagtcatcagaccacaggtcgaaggtaccggtctccttagcgtcaaccatcttcttggagtcatcaacccacttcatcaggttgtcatcgattacgatcttgccatcctgtacccatttgctggatacgttgttggagtatacacgataagtatcgtttacggaagataccatgttgtaaccggctgctttcatcttctcagcggttgcggtgaaggtatcccaatcagatacagacttctgaacctctgcaggatcatcggttcccagaacagccttagcagcctcacggttgtaaatcagaacgccggggcagccctgccatgaaacacccttcagattgccgttggagtcggtaacaacatccttggtgtactgatactggttagccagatctgcatcggtgatgcccagatccttaacaggcattgtgtagtcggtatcaacatatttcaatgcgtagtcagcctcaatcaggaacaggtcgatcttgtcatcagctgctgcatcagcctgctttaacagtgtttcatccagattgttctgataagcgttgtcatcagaaggagtgatgttccactttacagtgatgtcgccgatcttaccggtggttccgtctacttcttcatatccgggataatgatctgtcagacggctcttgaactcctcgttccagcagtagatgttgaagactttgccttcctctgctgctgcaggctctgctgcctcggtggatgcaggcgcctcggtcttagcttcggtggaagctgcgggtgccgcatcggtggatgctgcaggagcttcattgctgctgccacaacctaccagcatgctggcaagcatagcagttgtaagtaaagcactaagtacttttttcttcatgtttgtttcctcccattttttgttgaatgtttgttgtaagtgtttgttgcatttatattcatatgtcggcggttgcgtcgcttccatataaatgcctgattaattgtctgtcggaattctggccaccgacttgccttcagcaactttcccgggtacgatgacctgttctatgatggtggtcttgggtctctcaatgagactgatcagttctctggctgccaggcagccgatctgttctgtgtcctgttggactgtggtcagtctgggctccaactgccttgctgcctgtatgccatcatagcctgctaccgagatatcttcagggatctgtaatcctctctgtctgatagcgttgatgcctccgaaagaagcaaagtcatccggatagatgatgcatgtcggtggattcgggagatccagcagttcattggtcacacgataggttgttgttgtgtctctgtaagctgcttctctgatatactcgtccggaatctccagtcccagacgttccgccgtccggtagaagctggacaaccgtcccgaggtaaccgctgacattgctccgtgaatataagcaattttcctatgtcctctactatatatgtactccaacagttctttcattcccgcaacattgtccgacatgattgcgatacgattgttgaacaggtagtcaatggtgactaccgggatggaactctgtaccagttcgatgacttcgggatctccgaaatcaatacaggcgagcaccactccgtcaaagcctctgtacctactgtgttccaggtaggacatccgatccggccggttcttgcagctattaatgaatgtaatgtcgtaaccgctcttctctgccgtcctcttgaaactgtccagcacactggaaaagtaatcgtgggtaagaccgcttctggcttcatctgcaaagaggactccgatgccgtaggtcctgttcgtcttcaaagctcttgcggaaaggttcggggaatatcccatttcctttgcgacccttttgatagttgcttttgtttcttctccaatgtccttgtggtcgttcagtgccttgctgacagttgcaacggagactccacaaatcttggaaatgtctttcagtgatgccatatctttctcctgttccatgtcttcgtcattccgtccgacctgttttgtaacttaatcgttttcgtagttttaatatataacatctttgagcattttgcaatacttttttgcagtttttttcaaaaaagtatccactttgtctataattaacaatttcagataggctgttttgtacatttggcttgtacatagattgtgtttcttctatataaaggcaaagtgtgcgataacgtttgctattattttgtttcgtaaaaccggtgtttcgaaggttctttcattttgtatcttctgcccatgtttccccactgtttttgtatacattgcgcattttacgggctttttcaagattcgtattgcatttttccctttgcttctgtataatacaaatcagaaatccggagcacttaatcgtttacttaacattaagcactccgcagcgaaaaaacaaacactcaacatacaacaacatgaaagaaggagattttcttatgaagtatggtcattttgatgatgtgcatcaggaatatgtcatcaccactcccaagactccgcttccctggatcaactacctgggctgcaatgagtttttcagtctgatatccaacacctgcggcggatatac

SEQ ID NO: 392 - DNA, 24165 bp, unidentified
  source 1..24165: mol_type = unassigned DNA
ggcctcattttcgggcagcaatgccttaggctctaccagtaccggtgcatatacggtgttgaatttgtgtacgatctctctggtctgttcgatcatgggcagctggtcaccacctacgggaacggtggtcgccttgaaagcggtaatatcggaagcctggctgatgggataggtaaaaaatcccacagggatgctggcttcgaagttacgcatctgaatctcactctttacggtcgggtttctctgtaatctggctacggttaccaaatccatgtaatagaaggttagctcgcacaattcggagatctgagactgaatgaagatcgttgccttgctgggatccagtccgcaggacatgtagtccagcgccacttcaataatattctggcgcaccttctcgggattctcgatattatccgtcagtgcctgtgcatctgcgatcatgataaaagtcttcttatattcaccggaattctgcagctctacacgtcttctcagggagcctacataatgtcccacatgtaatcttccggtgggtctgtcacctgtcaaaataattttgtccatttcgtcctctcaatccgccgtctatgcggctatacgtcattgcttctatcataccatctttttgcatagaagcaaatgatttttctacagaattaacgctttgtgtgcaagccccctcgcattcattctgctgttctatggctgaactattgcaagcagcttatccagaattttatgtgccacctgttccttgctcatcagttccagactctcctcggaattctttgtgatcagtgtcacaatattggtgtccgtaccaaagcccgctcctgcgctcttcaaactgttggcacagatcatgtcacagtgcttgctctccagcttcttccgggaattctccagcacattttccgtctccatggaaaatccacacaaaatctgtcccggtctcttgttttccccaagggccttcaaaatatccttcgtccgcaccagagggatcgacatgtctccgtcttttttcttaatcttattgtctgctgtcactgccggggtgtagtctgccacggctgctgccttgatgacaaaatcatagtcctgcgctctggacacgattgcatcgtacatctcttctgccgtctgtaccggcaccacatttacaaacaaaggcggctccacatccgtatgggctgccaccaccgtcacttctgcgccgcggtgcattgcagctctcgccagggcataacccatttttccactggagtgattcgtgataaaacgcaccgggtcaatgggttctctggtggcacctgcggagatcagcacctttttgcccgccagatccttctcgcaggcgatctccttcaccacggcttcgaacagtacggactcctccggcattctgccgtcaccgatatcgccgttggccagcattcccgtggccggagtgatgatctcatagccgaaatgctttaatttttcgatattatcctgcacgatggggttgtgatacatattatgattcatggcaggggacacaatcttcttgcagggacatgccatgaccgtagtggtcaacatatcatctgcgatgccgtttgcaatcttgccgatcacattggcagaagccggtgccaccagaaccacatccgcccgctttgccagtgccacatgttccacactgtactggaaattgcggtcaaaggtgtccaccagacatttatgtcccgtcagactttcaaaagtaatggggttgatgaactgcgtggcattctgtgtcatcagcacttccacatcacagtgctgttttaacagcatccgcgctacattggccattttatatgcagcaatacttcccgagattgccagaactacggtctttcccttcagcatagtcgtctccttttgcctgatttatcaaaaatacttcaaaactgtactcctaaaataccataagtgcatattttatgcaaatatcacttttctttttgtccgggatatgatataaacagtaggagtgtcccgaatcaccggggcagcttgtattgtatctcccagagggagaatggtaacaaggaggaaaatttcatatgaacaaacaaagtaagacaatgcgactcacgttgatgggattgtttgctgcggtacttttgctgatggcttataccccgctcgggtacctgaacatcggccccctggcaatcaccttcaatgtcatccccgttgcactggctgcaatcactcttggccctgtaggcggagccgccatgggagcagtattcggattgaccagctttttgcaatgcatcggcgtgggaggcaccagcgccatgggagcaatgctttttggcatcaaccctgtgttggccttcatccagcgtttcatccccagacttctggacggatttctgctgggatatgtcttccgttacagccgcaaagccgtaggagacagaattgcctgcatgatcaccggattttgcagcgcatttttcaacaccgcatttttcatgtcccttttagtactgctgttcggcaatacttcctatgtgcagggactgatgggtggtaaaaacgcgattttattcatctgctcttttgtaggtgtgaatgcggtcttcgagatgtgtgcatccacgttcctgaccggagcggtagggctggcactgatcaaggcaaaagtcattcctgtatatcagaaagcagagtctgcagcataacaggagtatacccgtggtactgacaatcgacatcggaaatactacgatcggcatcgggggatttcagggaaataagctgctctttattgagaagatatcgtcccgccgtcccctgtctgatgccggatatattgaaaaactgaatatgatcttgaacaaacacggcctgtctgccgaggcctttgagggatctatgatttcctcagttgtgccttcggtgacagccgttttttcctctgctctggaaacttttctgggacggaaacctctgattctttcccataagctggatctgggctacgagatctgtacggaattcccggaaaaggtgggttgtgaccgactggcagatattgcaggagccatttcccgctattccctgcctttcgtcaccatcgacctgggcaccgccacgacttttaacgtgttggatgagaaccgtcgctttttaggtggcctgatccttcccggcgttggaaccgcccacagggcacttttaggcaagaccgcccagctcccgaaaggggacattcatatgcccgcccacaccatcggtgcgaatacgcaggaatgcatcaccgggggaatgctcttgggcaacgcctgtgccatcgacggactgatccgccgtatccagacagagttagggcaaaaagcaacggtcgttgccaccggagggtacgcaacgaccgtcattccacattgtgaaacgaagatccatatcgatcagaatcttcttatgaaaggtctgagatccatctacgagaataatacctctactggatcaccagattagagtagcccatcaggctctcatccacagcatgtgcgacttctctgccttcacggatcgcccacaccaccagggactgtcctctgtgcatatcaccggtgacgaatacattttccacactggtctggtatttgccgggggcagtttttacgttggtgcgttcatttaattccaccccgaaagcatcggtaatatatttctgacttcccaaaaatcctgctgcgatcagtacgatctccgcatccaggatctgctcacttccggcgatctcctgcatcttcatgcgtccggtagccggatccttttcccaggacagcttcacgatcttcacggctttcaggctgccgttcttatccttgataaattccttgaccgtagattcatagattctcggatcatgtccgtagactgcaatggcttcttcctgaccgtaatcggtcttgcagactttcggccattcgggccagggattgttctctgctctcttgtccggagccttgggcatcatctcgatctgggtcacagacttggcaccgtgacggatggaagttcccacacagtcattaccggtatcaccaccgccgatgatgaccacgttcttacccttggtctccacatattttttatcttcaaagttcgaatccagcaggctcttggtattggctttcagaaaatccaccgcgaaatagattcccctggcatctctgcctggcgcattgatgtctctaggattggaagcaccacaggccagtacgacacggtcaaaatcatgtaacagcttggatgccttgatgtccttaccgatatccgtaccggtgacaaaggtgacgccctctttcttcatgatggctatcttacggtcaatgatctgtttctccagcttcatgttggggatgccgtacattaacagtcctcccacacggtcagagcgctcaaatactgtgacctgatgtcctctctggttcagcagatccgccgctgccagtccggaaggaccgctgccgatgactgccacctttttgccggtacgcaccacagggggcttggcggccgcataaccctcgctgtaggcgttttcaataattgcatattcgttctccttggtggagaccggatccccattcagtccacaggtacatgccgcctcacacagagccggacatactctggacgtgaattcggggaaattgttggtctttttcaggcggttgtaagcctgttgccagttgccggtatataccagatcgttccactccggcaccagattgtgcaggggacatccgctggccataccgcagatcatcatgcccgactggcagaacggcacgccgcattccatacatctggcaccctgtaagcgctgcttttccttcggcagatgctcatggaattcgttaaaatgctgtattctcttcttaggatcctcagccacgctgacttcccttttatattccataaatcccgttggttttcccatgactctctccattctgcagacgcttcggcgtcggaagaatcgcgaactaaatttcatatttagttctgcgataaactaatttgtggcgcccgcggcacaaattagtcgtgtgaaaagcaatctatcaagattacttttcacactggcctcctactttctggtgttggcatagaatgcttcgatctgtgcctgctctgcgctcagtcctttttcctccatctggacgatggtctttaagactctctcataatcatgagggatgatcttcttgaacttaggcagatactctccaaagttgtccagcacttccttacccttggcggaattggtcagtgccacatgctcctggatcatggatttcagttccagcacatcatatttggatgtgatctcactggaagataccatttccttattcaggcgtttgtacagatcgttgccttcatccagtacataagcgataccgccgctcataccggctgcgaaatttttaccggtcataccgagaactaccacacgaccgccggtcatgtattcacagccatgatctcctacaccctcaacaactgcgatggcaccggagttacgcacgcagaaacgctcgcctgccacaccgttgataaatgccttaccggaggttgcaccgtacagtgccacgttaccgatgatgatgttttcctccgccttgaacttgctaccctggggaggatataccaccagcttaccaccggataagcccttgccgaagtagtcgttgctgtcacctaccagttccagggtcagacccttgggaatgaaggctccgaaggactgtccaccggcacccttgcacagtacatggtaggtatcctcttccacatcatcgcccagttttctggtgatctcacttccgaggatcgtaccgaaggcacggtcggtgttgctgacatccacttcaatgcttcgcttctgtcccgcatcaatagctttgcccagttgctttaacagcaccttctcatccagcgtcttctccagttggaagtcatagacctgcttgggatcgaaggtcaccttctgcttgctgccttcgtaagggttgcttaagatctgggtcagatccacttcctcctgacgatcggtcagattctcttttctcttcagcagatcggttctgcccaccagttcatctacagtacgcacccccagtgctgccatatattcccgcagctcctgtgcgataaatttcataaagttttccacatattccggcttaccgcggaagtttttccgcaactccgggttctgggtagccacgcctaccgggcaggtatccagattacatactctcatcatgacacagcccatggtcacaagaggtgcggtggcaaaaccgaactcctcggcacctaaaatggctgcgatggctacgtctctgccgctcatcagcttaccgtcggtctcgatgcggactttattacgcaggccgttcatgatcagggtctgatgggtctctgccagtcccagctcccagggaagtccggcattgtggatggagtttctcggtgccgcaccggtaccgccgtcatagccggataccaggatgacctgggctcccgccttggctacaccggctgcgaccgttcccacaccggcttcggataccagttttacagagattcttgcctgggtgttggcatttttcagatcatagatcagctgcgccagatcctcaatggaataaatgtcgtgatgagggggcggagagatcagggacacaccgggtgtggagtgtctggtcttggcgatccagggatatacctttcctccgggcagatgtccgccctcaccgggttttgctccctgtgccatcttgatctgaatctcctgtgcgcttaccaggtaacggctggtaacaccaaaacgtccactggctacctgcttgattgcggaacaacggttcagtccgtccggtccgacggtcagacgatccaggtcctcaccgccttcaccggaattgctcttgccgtgcagatggttcatggcgatggccatggtctcatgggcttctttggaaatggaaccgtaggacatggcaccggtcttgaatctggtcacaatggactctaccggctctacttcctcaataggcacaccctttttcggataattgaagtccatcagtcctctgagattcttgatggaatcttcgttgtttaccatggcagtgtactgcttgaacatctggtaatcaccgcgtctggtggattcctgtaacatatggatggtagcgggattgtacagatgctcgtcaccgccgctgcgcatcttgtgatgtccggggctgtttaaggtcagatcgtttttcagtcccagaggatcaaatgcctgagagtgcaggtcgtctacctgctgctcaatatcttttaaggtaatacctcccacacgacatacggtgttggagaaatacttactgatcacttccggtgcaataccgatagcctcgaagatctgggaaccctgataggactggatggtgctgatacccatcttggatgcgatcttgacgatgccgtttaggacagcattgttgtaatcatccactgctgcatagtaatccttatccagcatattgctctcgatcagttccttgatggtatcctgtgccagataagggttgatggcgcaggcaccgtaacctaacagcgtagcaaaatggtgtacctctctgggttcgccggattccaggatcagtgcgactctggttctcttcttggtgcgtaccagatactggttcagggcggatacggccagcagggaaggaatgggcacatggttctcatccacgcctctgtcggacaggatcaggatgttcacgccgtctctgtaagctctgtccacttccacgaacagtctgtcaatggcacgctctaagctggtgttcttgtaatatacgataggtacgacttctactttgaatccgtctaccttcatgttcttgatcttcaacagatccgtgttggtcaaaatcgggttgttgaccttcagaacattacagttcttcggggtctcctccagaatgttgccctcggtaccgatgtatacggtggtggaagtcacgatctcctcacggatcgcatcgatgggcgggttggttacctgtgcaaacagctgcttgaaataatgaaacagcgggtggttcgtcttgctcagcacgggcagtggggtatccacacccatggctgcaatggcttcgctgccgttctttgccatcggcagaatgctctgcttcatttcatcgtaggtgtagccaaaagccttctgcatccgctggcgctcttcgtaggtgtattccggtacacgatagttcgggatatggatgctcttcagttcggtcagattgttgtccagccattctccataaggctgtctggaagcatatttttctttgatctcctcgtcatcgatgactctgccctgtacggtatcgaccaaaagcatcttaccggggcgaagtctttcttttactttgatcttcgtgggatcaacaggaaggacacctacctcggaagacaggatcagggtatcatcgtcagtgatcagataacgggaaggacgcaggccgtttctgtccagtaccgcacccatgatatctccgtcggagaacaggatggatgcggggccgtcccagggctccatcatggtagcgtaatactggtagaaatctctcttggtctgggacatggccttgttgttcgcccagggctcggggatagcgatcatgaccgcaagaggcagttccatgccgctcattaccaggaattccagcgtgttgtccagcatagcggagtcggaaccggtcttgctgatggcaggcagtactttgtgcagctggcctttcagatgctcggattccatgttctcctccctggccagcatcttgtcggcattgccgcggatagtgttaatctcaccgttgtgtaccatcagacggttcggatgggcacgttcccagctgggattggtattggtggagaaacgggagtgtaccatggcaatggcggattcgtaatcttcactctgcaaatctgcgaagaaggtacgcagctggcctaccaggaacattcctttatatacgatcgttctgctggaaagagaaactacataggtatcatcggaagactgctcgaagacacgtcttgcaatataaagtctgcggtcaaagggaagtcctttttccacatcggcaggctttttcacgaatccctgcatgatatagggcatgcactctacggccttatgtcccagcacattggggaaggtaggcacttcacgccagccgaggaattccattccttctttttccacaatgatctcgaacatcttcttggcctggttgcggcgcagctcttcctgcgggaagaagaacatgccgacaccgtattctctctctccgccgatgtccatgcccagagctctggtcactctggcaaaaaatttgtgggggatctgggtcagaataccgacgccgtcaccggtcttgccttccgcatccttaccggctctgtgctccagattctctacgatcttcagcgcattctctacggtcgcgcggctcttctctccgtgaatattgacacaggctccgataccgcagttatcatgctcaaattcttcccgatataacggtgccttgggcagctcctgttttacatcaaacatatagttctcctttccggttttctatttctctcttcttaatctgtctgttcctattcagaacctcattcgcaagactgtgctttcagcactttcctgcaactaaaaaaggtcgcaatgagactctttcgagcgcctcattgcgaccttttctgtactatacacctatttttctcatttgtaaatatagatttttccttgaattgtcagataatttgtcaattcagttgttcacacggctgttgtctgtgaattgtgttaattttctttttaaaccatgcttttggcacaactctttggggtttttccctatttttcctgtctccgaccatacactttgcttgtcagtccctgatagattgcagagaaatgtctgctttctgccattgcggtccggagaggtgccagggtcagtgccatcacagcgcggtaacggaacagttctacgggtttcatgtattttgccgtgatctccttatgctctgcggcactgcgtttcaggttctcctttgtctcggagtagccgccgccttcgtaggaagatacggtaagccccagatactgcatgggagccttcgcccggtaatagcaccacagaaaatgttcataatctgcgcggatcttgtattttggttcgtagggcttctgtcggcacaggtctgcggcatagaagcaggactgatggcagggaatgttgcggtagcagacaaagccggtgattcggggcggggatgatatcttcgtgtccgttttcgcgctgtaggtatctccgtaatagatgccttgcagtttcatagggtgctgttccatgaattgtgcggtgtgtgccagaacttccttgtcatagaagaggtcaccgcagtttaagaacagaatgtaatctccggtcacatgagagaccgcctggttcatagcctcgtagatgctgtgatccggttcctggtagagatggatccgcccgtcagtgcgcatggactctatggatccgtcacggctgccaccgtccttgacgatgacttcgaagtctggacaggtctgggccaggatactgtcaagggtctgattcagtttggtgccggggttcaggcatactacgataatgctgaatttcatatgttgctccttttaagatgtaatatctccgcagtcgagaacagggcaaggaacgcggcacgttcgcactctgtcgcagagcgtagcggcacataagtgaccaaagtacggtcactaagtgccgacgtctgcttacggcctgcttatccttaccctgttttcggctgctgggttatgaagtccagttcaatacagtttatgaatgcggtcagaactggtaactaatgtgttttgttatctcattaaaatatatttttctgtttgtgcaaagtgatcaaggatacaactgccactgccaggaaaatcacgcatacaggccagctgacgaagccggtgacggcgatggcggtataggagaggcagtaggcgaggacattggatgccacatggacaaagactgccattttgaactctccaaagtattcgtaagcatatgccatcaggcagccgatgaggaagccgtatacgccctggacgtaattcatgtgataaacgccgaaaatcagggcagacagggctatggcgagtttgatatccatgaatctgcggagatatccgtagataactccgcggaacagaagctcctctgctatgggggagatgaagccgaatacaaggattcctacgataaagtgtgcggaatattgctgggctgcaacttcggtataggcttcggatttgttggtcactcccaggagttcaaacaggaggttgcatccgataacggcaccaatagtggttgccaccagcagggcatattttgccttaccttcttttttcagatggcttaaatgcatatcctctttgttcttcgtgatcagaagctttgccgtggaccataccgccagtgctccgccgatgaagcccagtgccgctatgatactggacacatctccggaatagccgttatatgcaccggtctcatccctcaggatcagcagatctaccagtccaccggaagcaccggactgtgccagctgatacaacagtgccagcagcgcatactgcaccgcattgcgcaccaggataaacatcaggaacgaatacaccatggtccagattctctggtacatgggatttttctttttattgtcgggattgctgttcaccagttcctcgctgccgcgaagcagaaatttttccagttcttccacggattgtacgatgtagtccgcttttgcttcctttaactcttccttgcttccgtagccataagtcacgcccacgctctccacgcccaacgctctggctccttccacatcgaactttctgtcaccgatcatgtagacctgatccggctctatgggattctccttgaacagctgatgcagggtctcctgcaccacctgatccttcgtctctctggtgccgtccagctcactgcctaccaccacggcaaaatattttttcagatcaaaatgctccagtatgcgttccacatagatctggggtttgctggaagccagtgccagaaaatagcccttggattgcaggttcttcagcatctccggaataccggcataaacttcattttcaaaaatacccgtattctgaaaacgctctctgtattttgccacggcctcctccgcctgcgcagcggtaaaactgtagaattccataaagctgtcccgtaagggcggtccgataaaaggctccagcttgtccagatccggttcctcaataccgaaggagtgcagcgcatactgcacgcaggtcgtaattccaattttgggatctgtcagtgtaccgtccagatcaaacagcagatattttttcattcttataattcctttttttgtatctgttccaagccctgtaactatcgcaaaatattcattgaataccgggatccgcaagaatattctgtaattgttatgaggctctgaatagttaccctttctttctatagcttgtggggtccgcaaagcattagaagctgcggatcttgtccccgtcatcctcagtgtttttcagtgccttgatctctacgtcatagcccacattggcattgacctgcacatggaccacatcacccacttttttgccaagcagtgccttgcccagcggagattcgttgctgatcagaccttccagtgagtttccgcgaacggtggtcacgatcttgtaatcctcttccgtgccgtcgtcgatgaattccacggtaacagtgttgttgatgcccacctcatccacggcggagttctcggagatcacctttgcggtcttgatcattctctccagataacggatccggctctcgttctgattcttgtattttttcgctgcataatattcaaaattctcactgagatctccgtgggctctggcttccttcacgtcctccagtgccttgggacgcaccaccagcttacgatactcgatctcatcttccattttcttaatgtcagtgggggttaattcatcgtacataatttctccatttctatctgttcaattacttatatcatttattgacagtttttctcccggctcggcacgctgattttctaccaacagccgtccttctttttcttcggcgaccgaccttcttttccttcggcagacgcctttcttttcttctgacggccgacctttttccttccggcagccaaccttcttttcttgcagaggatgaccggtcgcagtctctatgctgtcccggtgtgcccagcattctacaactgcattgcgtagattaccgccagagacagaatgatctgaataatggcaaaacggaatacggtctgtgtattggaccagtcccacaccttacgcacatgatcatgcaagggagtacgcacatttttcaaaatatgaatcttcaggaaacgaagcagagacaccttaagaagtcccagtcctccatccaggatcagcaccagtgccagcgggatgaacaggaacgggcagccgctcttcaaaatagcgatgctgatgaacaatcccatagcccgggaacccgcatcccccatcatcagcttactgggtgtggcattgtaccacaaatagcccagaatacatacggcaaacagcaggatcaggaaagaataggtctcattgacgtccttcatacggtccacgatatagatggacatgatcgtaatgatcgacagggttccggagagtccgtccacaccatcggagcagttggtcacgttcacggaggtccataccaggatcaccgtgaggattgcgaatactacgggaggcagcgtgaactttacatggaacagtgccagttccaccacgttggagttgtatttcaggaaggtgatggctaccagtgccgccacgcacagatccagaaacccttttttgtattcaccccagggagtcttggaggcgtcatccagaaaaccggtcatcatgcataccacgatcagcagcagatagatcaccagctctgcgcttaagggtgcaaacagtaaaacagatgccacaaatgccagcacaaaaatgattccggcgcctcttggctttcccgcggacaattttccatcatgggcaaattctcttccggcgtccttcggcagatacgggcttaattttgccgtcgccagtactgtcgctccgaaagcaaaaaggattccaaaaaaagcaaggagagaactgcttccctccggcaagatcatctgtaacatactatccctcgtttccacatgagatactcacttttgtactctcatgctgtattttctgataaattccgtgactgttcacaggggcattcgagaaatgaacacctcagaacagtcacaaaatattttaacacaaatatcccggaatctcaaataatttccacaacagttcagttctgaacatatctgggagcagaaatcatgcttgcatgattttgcgggcaaatatgtgcaagcgctaagcgccaatctatgagcaaaggtagtcacgaagtgacataaaagcgtgttaatgcgactcccgtgaacggcgcggctgaactgttacgtttgacagtttccccacggtggactactatattcttatgaacactttctgaaaaatagccataaaaggagaaatactctatgatgatccataagatcgaaccgcataaatattacccggaattccgaagccaggatcctaaaccttccgattatctgctgttatttgacggagaaaaggtctatctgccctcccatacagaaaacagtgatgtaacggatacttccgccggtgccggcatctctgagcatcctcaagtatatcttcctacttttgaagaagtccatggactcttgggaatccgtcagcctatggaacgtttttttctggactgtgaatatctcttttccattgatgaccgagcattcttccgcaagacgacggaggatgccggtgctctcatgctcccggaagaagacctctacgcttccggtgtgttccgtaattttgagccggaatatctggcatttgctggaatcactgccacccagatcaatcgtttccgtctggaccggaaattctgcggccgctgcggacatcccacaattcacagcaccacagagcgggcctgcatctgcccggagtgcggtcagatcgaatatcccaagatctctccagccgtcattatcgccatcgtggataccgaacaggacaagatcctgctgacccgctacgccggcggttcctatcgtcactgggcactggtggccggcttcgtggaagtcggtgagaccttcaagggtgctgcccgccgggaaatcatggaagaagtcggtttaaaggtcagcgatctggtctattacaaatcccagccctggtccttcagcgattccgccatgatcggcttcttcgcgaagctggagggggatccttctattactttgcaggaatcggagcttggcgaggctgcctggttctccagagaggatgtcccggatctgccctccactatcagtgtcggtcaagaaatgatcacattattcaagaatggtggggatccgttctgccagagataattgatacatttgaaagtttttcacttctattccatgatataccttgactttgtgcccccgtggtttcatgccccgggggcttatttagtttcttttcctctctgcgccccgctctctcaatcttcccggggcttatttagtttcttttcctttctgcgccccgctctctcaatcttcccggggcttattcggcttctttacctctctacgccccgctctttcaatcttcccggggcttaatcagcttctttggttctctgcgccccgctctctcgatctccccggggcttaatcagcttcttttcctctctgcgccccgctctctcgatcttcccggggcttaatcagcttcttttcctctctgcgccccgctctctcgatcttcccgggggcttaatcagcatgctccttatatctacgccccatgtacgcaaaaatctgccttcgacaataacattgtcatgaggcagactcctttctgtacttattctcttcactgtttcttcacctagagcatcgtagctgtcatcgcttctcattatctcaataagcggcacttcttcgctaccttcactaacagatatcccttcgggaagctgcgaagctcctgctccgtgatgccccgcatcaatatcagcatgacaaaatagactacagcagcaattacgatcgcaggaatgacagagatccgcatggacttcgtcaccatatacagaccctcgtagattgcccaggctgccgctcccataaacgcggaggcgaacgccggaatgacgaaagtctttacgatctcctgccggtagcctaccgctcttcttaccgcccactggttcagcacacacatcataccggaatacagcgtattggcgatggcaatgctgtacagatccagtcttgtgaacatcagaagcagcactgctgccaccgtctgcaccaccagtgagatccccgcattgatgatcggggtattgactttgccaagtccctgcaaaatcgaactgttcagagtcgacagtgcataaaagataaccgacagtgacaatgtcattaaaagagctgccgccagattcaattcctctgccgtcttattcgtgaacagcagactgatcaccggcttcgccagtacaaaaagtcccacagcgcagggaatcgagatcaccatggtagtcttcactgccagtccgatcttctctctggctcccttcacatcccgggctgccatcagctgtgctacggaagggatcatggcagaagccatagcagatgcaaaggctatgggaatattggacattgtcagggactgtccggagaaaataccatatttttcataaatagataccgtatccagattgcgaagggacggataccatttggtgtagatactgttgttgaccgtactgcttaagttatatacagccgtactcaaaataaacggtgtcaccaccagtgtgatcgtcttgaatatctgtccgtaggaatccacatgttcatgcctgtcacgctgcactctgcgcaggatcattccacgattcagagcatagactcccgccataaaaagcagcgccactaatacgccgacaccggtacccagtgcacttcccacggcaccgtaggttgctctcatcacctgccctgcctgatccgccggaacctccatcgttcccataaacatttggatcagaaggtatgccgcgcctacgctgactaccgcattggcgatctgctccaggatctgcgatacggaggtctgcgccatgctcttatgtgcctgaaaataccctcgtaaaactcccaggataccatagacgaagatcgtcggtgcaaaggtgcgcagtactgtgaccgctgctccggacacgaataatcccgctccgaaaaacagaaaaaggctggctataccgccaaccaccagtacatagatcatggctccgtggaacagtctgtgggcgttacggtattccttctctcccagcttctgtgcgatagctttggaaattgccgagggaatactataagaggagatcaacagaatgatcgtataatagttatacgctgactggtaataaccaagtcccagattcccgatgacactctgtaaagggcccctgtaaaggagccctatgattctgctgatgattccggctgccgccagaattcccgcctgcatgataaaattgttcttggaactgttcttatctgccatatgtaatcttaccttattccagttctttatccgatcagccagtcatacatctcctggtattttccggcggataccttccaggagtagtcggtggccatggcacgatccacgatcttattccactctctcttcctgtcatagtaaatatgctccgcatagcggatcgtattcagcatctcatgtgcattgtaattcgtaaaactgaagcccgtgccggtgctctcatactcattatagggctgtacggtatccttcagtccaccggtctctctgacgataggtacggtaccgtaacgcagtgcgatcaactgactcaggccgcagggctcgaacaaagacggcatcagataagcatcacaagccgcatagattttatgggacagtgcatccgaataataaatgttggcagacaccttgtctccatacttccagtcgaaatgacggaacatattctcataacgttcctcaccggtgcccagtaccacgaactggatatcatcctgacacagttcatccatgacataagcgatcagatccagacccttctggtctgtcagtctggataccagaccgatcatcattttcttatcatctacgcgaagtccaagctcttcctgcagggctcgcttattcttcaccttttccttgcggaaattcactgcattataggcttttacgatatttttgtccgtctccggattgaactctccatagtcgatgccgttgacaataccgcgcagatcatgacttctcgcacgcagcaatccgtccaggccctcaccataaaacggagtcttgatctcctccgcataggtatcacttacggtggtcactgcatccgcgaatacgataccgccctttaacagatttgcatccttataagcctccaacttgtcagaggtaaaataatactccggcaatccggtaatgctctgtaccgtcttcacatcccattttccctggaacttcagattatgtatggtgatcacagacttcatgttgcggtagaaatctccgccatggaaacgctccttcaggtataccgggatcagaccggtctgccagtcatggcaatggatcagatccggctggaaattcaaaagcggtaatgccgacagcactgccttgcagaaatatgcatacttctcgatctcatatctgggatcatccccataaggcttgaaaccaccgaaataactctcattatcaatgaaataataatgcaccccggcttcctctgcctccagaacacctacgtacacattctgccagttgaaatccatgtagaaatgtgtcacatacctgagtttatccttcatctcctgtttcatacaggtatacttcgggataaacactcttacatcaaaatactccttgtcaatatacttcggcaaagatcctacgacatccgcaagtcctccggtcttgataaaaggtacgccttccgatgcggcaaaaagaatttttttcatgtaaaccctccacatatgctacggcttgtattcaaaatatagattgattataccatgtttacgattcatagaaaagagggcatcgataatttacaaatcttttagagtctgccggttccacctcagcttctgtaggaaagccggatcctgtcagcgatcagtgcgataaattccgaattggtaggtttgcctttgcccgtgtcgatcgtgtaaccgaacatggcatccagagtctccatgcgccctctgctccaggcaacctcaatggcatggcgaatagcgcgctccacgcggctgggtgtggtctggaaccgcttggcgatggtcggatacaggatctttgtgatagaactgatcattgccggatcctctaccgacatcatgatagcttcccgcagatactgataccctttgatatgtgccggcactccgatctcatggatcatatccgtgacatccttttccaggtcatggatgacttcctgggtctgttcctttttttctgtcgcttttactgtgctgtctttggcgtttttcgtagaaggaaccgtgatcataatttggaattccttgttggcattcatcagatcccccaggattttgtatactttttcattatcctttgtagttgtaatgtttaatttttccattaaactacctccatgactacaaaactacttttttcacgtaccgttctattataaatagatatgcgtcgtagcttcaagcagaacccgtcgcaagatttttccaaatttcgcagtatattcaacaacaataaataagggcaggaattttgatactccctaccctcatttatcactgtttttgtttgtccaaaaagtaagatacatttgtgctaccgattcaagcaacacaaacaatatatgtaaaataataaagatacaaacagctgtaatgtattttaatgttacaattggtaaaagattctgcataagtgaaatcgctataagtcctactaaatatataatctcaacgattacattgtaagctatattagaaagcaaaatctgaaataaagataattgctttccattaaccggcttatactgatttttgtttgattctgctttttttaagcattgtatattcgcgttgtccgcagatactaaaattgtaatgatcgctacggaaaaagaaattaaaatagctactatgtttatctgtgtatctataaattcagaaaaagtcaacaaaactttttctgaagtgccaatattaaaaaatatcgccagcaataatgcgaccaaagcaatcagcattggaaagaggaacttaataaaaacccatttccttgaaataaagtaatcttttaagggaacaaaaactatatttttcatgtcttattcctcgtttcttctataaattcttgcgctttgtcaaagaaatccgagctgtttacctcattggttacagcttcagctacgactgataaataatgtttcattttcataagatcggtatcaatctcaaattggcctgaagcatttgtcccttttacagaaatcttttttattctattattactttgcaaatcatcataatatgcccgaattagattgtctggaaactttttagctcctttaggacgcttaagccaaatttcaacttcatcgtcaatatcattgcgatctgcaaatcgcataaaatcgtctttgatatcttccttgctgacagtcaatttcagagccgaagttgttcgtgcattttttaatgacgataagaaatcatctcccggcataatctcatgtgataaagtatagtggtacttgtcatcggtatcttcattgtaatttacaaattgcgtattaaggtaatcaataatacaatttatagatataccataatgattgctttcatgtactgcaaggaaacgacattgtccgttggcaaggcgaatgcacaaatgcgtcttttcttcatccccatcctgctgacgcttacgagcacctaattcagtcattgtttcggtatcaatctcatttcgaacgtgattgtactttgcagatttaaaaataatattgtaatttccgttgtttaaatcttcgaatgaataaagccatacaatcttttccgaacttgtaatgtctttcttcctctcggtcaaatcttttgcagtaatgtatggtaataattttgaaaatgaacccactatttgctgcatatcgtaggtggaagaatcattactgtccttttgttttgaaattgtaagataataaaagtaaatcggaacattcttcttgggttcttgactactcattttttatctttcctccccttataatacatcggataacagcttccaactgtcacttttaatattgtcagaataagtatctgtacaaatgcaaagttcgctgctctgtttatcctgccgaacaataccaccaagcaagttatatttattgatataagcctttaatactccaaatttttttgcagtatacttatcaatgtcttcgctatcgccgcacttagtaaatccgcctttcgtttcaattatccaaaccttaccatcagttgtttcaacaatatagtctggatagaacgatttttgctttccaaagttatccgtataaacgatagaaaaatattcaatgcctttatctccattcttgtaaaaccactgaatatttttactgctctcgcaatagcgttcaaaaagcttttctggtaaggagcgtttttcagcggaagaaagatatcccttatatacattcttcgtaaactctgcttgtgactttgcagttccgtcataggtgaatatcatttctaacggaaagcctataggtttttccgttgtttttggaattgctaaacttaattgcaaggattcgtctgacatagcttcactaacatcttcaatcaacgaacgctcattattgattataaaagcgtatagttctcttatttcaattttcaaaattttgtaatcacaacgcaatccattaaggaataatttacgcatgatagtattcgtgctgttgtaatccaagtttactttatagcctatctctgcgacacaatgatgatattccttaccgtgtttatgtgtgctcagtggttcatgtattgaaatatcattcaattcggctatattttcttttgatagagtacttaccgaacctgactttgtatagtcgatgatatccttgtcaaaggaatagccgtgtgcttccagcaagattttgttcttagccgtatcttctgtgatatgatatttcttttcaaaatacttatgtattactctaagcgataactttgcatcacgaggatacggaacatcggttttatattcgctgataagtgtaaaagagcggtgtgccggctttaaaaaaactttgtatgcatcaagtgcccctttgcccaagcttaattttacactttctgtgaatttttcgtccaaagtatataaatagcaattgtcaagcaaatcactcttatagtgtttggcttcaggcatacgacgaatccgcccaatagtctgaatttcaaaaacctcgctcatattatcacgaagctttaccagtatttgcgctcttggacaatcccagccggtagctacagcctgcttgatgatgactgcgataggttctgcgttcaattcttcgatatcttcgagattttgtttcttgttagaaagccatactgcaagagtattgttttcataggtgattcctttactttcaaagtattcttctactctgtcaagtaaaatgtccgatttatttggaatttggacaattataagaggattaattttcgcctttcgattcagatattccgaacgaagttcccgttgtttatcaatcgctttatcaagtagatatgtaatctgatcatcgatgctgatgtgctgctcaaaattttcgttgatgataagtagtttttttattagctcttccgctataacatcttcttcgggaatatcaatcataatagcatttttataatttttaggcgtagcagaacaacggattattttatctgaatggaaaagctcgataatatcatccgcctttatcgtatcattttgatgagattcatcaacgatgattttaaaattcaaaccattattaagagcattgcgtatatgctcaataaaattagtacgttcgctgtcttttagggcattattgcctttctttgttagcttttcccagttaataaaacaagcgtcgttttcttcgaaaccatcagtcataatgtctgacagcaattttgtctgacttccgtggatatactgatccattttttctttgctttgttcctcaaggtttcccttgccaggagtaagccaaataaataccgtcttatgattacttttgaaatattcgtccataaaatgagtaagtataatggtttttccgcttcctgtgcagcttttaagaattatatctctatttggttgttccattgctgcagttaaatcagcaatcgcttttatctgaaaatttgcaagggtaatatccattttagccctccaattctttataatagtagtcaggaataatatttaccgtaatcttcctatctttcaaagtttgtgcctgctgtgcatccatcagtatgtcgtaccctaagtataacttctgacattttgtactattttcaagttgagaaataaaattgtcaacgaatcatgaaagcttatctcagcctataatgaaaataggatactga

SEQ ID NO: 393 - DNA, 11709 bp, unidentified
  source 1..11709: mol_type = unassigned DNA
ttacttaaagagattaaccatagtcgcaatcatcgctgcaatagaagctgtcgtacttcccattcccagaatttcagtagtagtcatcttccttttctgttctttacttggaacaattatttcacaacctggttcaatggctttcttgtttcctgctcttaaacgagaaactgtaccattcatgtatattacatagaccttgcgtttcttggcgtcattaccaaagccaccagcctggttgatgtaatatttcaagctttcaccctttttatataaaactgtattcggatacattacagcaccgttgattttcactgtacttacgtactccggaacaaataatacatctccctcgcgaagcaccatatcagcatctgaaccaggatttttcaaggcctctcccagatttatacctacagaataggtatcggacaaatccaatctttttacagatatggaatctccgcctcccgcttgcgccatacgcagagcatcttccttacggcggaattcttcttcggtcatcctacgtataagacgcgctccttttatataagcatcgggagttactccaccagccttagctatcaagtcactcaaacgttcattctttttcgatagtgcataattaccgctaaaaaggacttctccgcccaccataacattctgttgtttaaaataggacggactcttacgaacataaatttcatcaaaaggctcaagatggaaatcctggcttccttctcccaccaataagccatctttcaaatcaaaagagaaattctggcctactgtagtactgaaagatgtactcttcggatctttcatgcgccgtgcaacttcaacctttgttgtagccgccgcctccaacaagccaccagcctgcaacaccaaatcctctactgtcattttatcagaataaagatatgtacccggattggcaacttcaccatgaatggtaagtgtagcttcttccttcaagtcatgaatacttggaatatataaaatgtcattcttctgcaaaggaatatctgcagccgtcccgttcagcaaacctttcacatctacttgtataacctcatgcgacaagtcttcaagttcacgatcgattatagcacggtttaagaatgcatctccgcgaagtccttccgctttcttaatcagctgcttcactgtattcatcataccgtccaactggtacaaaccttcacgatatacagcaccgcggatttccacacgattctcaaaacgctgtaaaacggaatcaaccgttatcttatcaccgtcatctacgcggaatacggaataatccatctcatccacattataaatttgatgctcacgtccacttttacggattatacgtaatgctttcttataagcatcacccgtaaaaccacctgaatacttcaataatgtacctacggtttcagtgggtttcatttcataaaacatcggacgttttaccttacctaatatctgtaccagtgactggtaaggatccacaagaattacatcaccatcctgcagacggatgtcatctttcatttttcctttcataagtaaatcgtaaacatccaaatccgctattgtatttccattgcgaatcactttaatactgcgcaaactaccaatcggattcacaccacctgcacgatataaagcatgaaatacggaagcaaatgatgagagggtataagttccgggcaccacaacttcacccataacgtttacttgaatagaacgtatttctcctaatgtcaatttaacttgggtagacggaacatttccggttactccagaatatattctggcaaattcttgtttcaaataattattggcttcctttactgttttgccactcagataaaccggtcctaaattattcacaagaatacttccttccggagagattgtttgtcgaatcgttgtttcagaagctccccacacatcaataatcacctcgtcaccaggtcccagacgataattctcgggagtagcaacattcacattgggttcgaaagtcaaattatcgttagtaaaaatattatgaccataaatttgcgaagtcggatcctctgtttccttctcttgagacaaggaacgattatccatcatttgtaaagaatcccctgcaacatccgtttgtctggcagaataagtttccgaggttgtacgcagccctttgactacgccactcatttcaccacgttgacgagaacgcttctcatcttgggtattgctctgcggacttccagatttagagttttcatactttttctgaattctttcaacttgttcctttgtcactccccgccgcattaattcagtagtaatctgcttttgatttttgcccatctgctgagcgctttttacatactgaacaacctgatcatctgacatctgctgagcaaaagctacccctgacaaagtaaataccaaaaagaatagtgttattaatctacgcataagatattctgattaatcttttgagttcttgtaataaatataaatcgggcacaaaggtaatatattatttttataatatacatttattccacctctaagtttcagaaaaagcattaaaaagctgtcactttcacgtcttttcatcgggtagaagaaagcggaaaaattggcactatttttttcattagtccaatcaaaatagcctttttttcagtataactatgttgcaccaaggccagcacttcttcccgcacatgttcataatcatcaacagatgccttttcacgctttatcttttcactgattacagaatccaaaagtccatccccaggccctcccacaatgtacacttctcccccatcccccatgactcccacttccagggtgagcatacaagcttcagacaaggtaatcaaacaatgagtattcgtcggatacacctcacccaaacgtactatgaacatatcagtttcccctttgtcgcgtttcaacctgcaatcagatgactgcacatatatttccgccacacgcttactatattccatagcattttccggatgacgtgcattagcagcagatatcataaccatacgggacactctatactttaccgccaggtctgcaatattcactgtccccgatatattcgtttgaattgcctccgacacaaaatcatccatcagttgtacatgcttataagcagcagaatgaaaaacaagttgaggacgtgtttcttcaaatatagcctccatacgcgtacggttagcaacatctgcaaccaatacacggacctccagattcttccaatgatcagacaattccaactgtacatcatacaatggggattctgcctgatctaccagaatcaactgataaggattcagtgtagccaactggcgaacgatttcccttcctacagctcccgccgctcccgtaaccattactctacgcccctcgatatgggccgtaattttacgcatgtcaacttgcaccggttctctacggagccaatcttctatttgaatgtcctttatcagtccatcgtccatacaatcgcttaagggaggaacggtcattacatgaatatcatgagagaacagtttatccagcattccggaattttccaaatccgacaccttgcttggagagataatgattgtatccactttctttttctttagacggtcaaacagctgctcatcattgggatataccctgcatcccatcgtatgtttacctatcatatcaggttcgtccgaaataaagccacgcaggcgataatgattattacgactaactctcaaggattttgcaacattgactccagtcccatggaatccataaataaaaacattcacgcaatgacgtgcatcaaaagcaatagcttcataaagcatcttcacagcaatgcgcatacaagccatcagagagaaggtgaacatatatgccataaacagaatgctgttcggcaaagtttctccaagccccgaaacagaccaacagcaattccctaaaaacaggacaacatagcttatcgtaagactccaaaacacacgataaatatctacaaaagaggaaaaacggataacacccacataagtacggagaatatgaaagaaacagatattacacaagacagcccaaatggtcagccatacatataaagaaatttcataagatacggacgaaagcctatattgcaaaaaacacgcagaaagcatggaaatcacaacgataattacatctaccaacagcaccgtccatttggacgctatgcgtgaagaaagatatttataatagattcttaaattcataatcagtatcagacttatttgctataggacctacgacaaagatgcttcttttcgttttattatccaatttttatggcaataaagttcaagacattcaaatagaaaattatcccactaaaatatttctaaaaaaaacagagattctttttgccttttcaaataaagatgtacctttgcaccccgtaaacaaaagcttattgccgctatagctcagttggtagagcaacgcattcgtaacgcgtaggtcgccagttcaagtctggctagcggctcgatattcaagcactgattatctggaataatcagtgctttttcttttcaagaatcgttagaataaaaaacgctcttctacgaatatatttgcataaaacacaatgcccttccaaacagtttaatccatagccgcataattatcccaaagcaagtaaagctagtttaaaacagcaccatctgattacaatgataacttgaaacatataggtacattattaaaagcataatacaccttatattatacatagtaatccccaatatttgcggcaacttttcaataacccaatttttcaatcttaaataaaggattgaggtgattgaagaacacaagccaaaatcaaaaggctaccataggtttctataacatactataaacaaatgaaaagaatcaaattatttacagcggctttgctgctggcggctatatccgcaggaaacgatgtgtgggcgctttccgattcaggaaagaaagacacgcgtccgatagaatcacccaaattcttcagtggaaacgcccacccgctgcttccacctccttcaattcagactctttgcagactgtctctacaaagatagacacagacaaagacggcattcacgacctttatttcgtgtttaaaggcaaggagctgaaggtagatgaatggatgtttgagagattttgagttagccttactgtgctttatttccacatttactaagaattattcgtccgacatctgttgcattatcgtccgacagctgtcggacgataatgcaacagatgtcggacgaataattcttagtaaatgtggaaataaagcacagtaaggctaactcaaaatctctcaaacatccattcatctaccttcagctccttgcctttaaacacgaaataaaggtcgtgaatgccgtctttgtctgtgtctatctttgtagagacagtctgcaaagagtctgaattgaaggaggtggaagcagcgggtgggcgtttccactgaagaatttgggtgattctatcggacgcgtgtctttctttcctgaatcggaaagcgcccacacatcgtttcctgcggatatagccgccagcagcaaagccgctgtaaataatttgattcttttcatttgtttatagtatgttatagaaacctatggtagccttttgattttggcttgtgttcttcaatcacctcaatcctttatttaagattgaaaaattgggttattgaaaagttgccgcaaatattggggattactatgtataatataaggtgtattatgcttttaataatgtacctatatgtttcaagttatcattgtaatcagatggtgctgttttaaactagctttacttgctttgggataattatgcggctatggattaaactgtttggaagggcattgtgttttatgcaaatatattcgtagaagagcgttttttattctaacgattcttgaaaagaaaaagcactgattattccagataatcagtgcttgaatatcgagccgctagccagacttgaactggcgacctacgcgttacgaatgcgttgctctaccaactgagctatagcggcaataagcttttgtttacggggtgcaaaggtacatctttatttgaaaaggcaaaaagaatctctgttttttttagaaatattttagtgggataattttctatttgaatgtcttgaactttattgccataaaaattggataataaaacgaaaagaagcatctttgtcgtaggtcctatagcaaataagtctgatactgattatgaatttaagaatctattataaatatctttcttcacgcatagcgtccaaatggacggtgctgttggtagatgtaattatcgttgtgatttccatgctttctgcgtgttttttgcaatataggctttcgtccgtatcttatgaaatttctttatatgtatggctgaccatttgggctgtcttgtgtaatatctgtttctttcatattctccgtacttatgtgggtgttatccgtttttcctcttttgtagatatttatcgtgtgttttggagtcttacgataagctatgttgtcctgtttttagggaattgctgttggtctgtttcggggcttggagaaactttgccgaacagcattctgtttatggcatatatgttcaccttctctctgatggcttgtatgcgcattgctgtgaagatgctttatgaagctattgcttttgatgcacgtcattgcgtgaatgtttttatttatggattccatgggactggagtcaatgttgcaaaatccttgagagttagtcgtaataatcattatcgcctgcgtggctttatttcggacgaacctgatatgataggtaaacatacgatgggatgcagggtatatcccaatgatgagcagctgtttgaccgtctaaagaaaaagaaagtggatacaatcattatctctccaagcaaggtgtcggatttggaaaattccggaatgctggataaactgttctctcatgatattcatgtaatgaccgttcctcccttaagcgattgtatggacgatggactgataaaggacattcaaatagaagattggctccgtagagaaccggtgcaagttgacatgcgtaaaattacggcccatatcgaggggcgtagagtaatggttacgggagcggcgggagctgtaggaagggaaatcgttcgccagttggctacactgaatccttatcagttgattctggtagatcaggcagaatccccattgtatgatgtacagttggaattgtctgatcattggaagaatctggaggtccgtgtattggttgcagatgttgctaaccgtacgcgtatggaggctatatttgaagaaacacgtcctcaacttgtttttcattctgctgcttataagcatgtacaactgatggatgattttgtgtcggaggcaattcaaacgaatatatcggggacagtgaatattgcagacctggcggtaaagtatagagtgtcccgtatggttatgatatctgctgctaatgcacgtcatccggaaaatgctatggaatatagtaagcgtgtggcggaaatatatgtgcagtcatctgattgcaggttgaaacgcgacaaaggggaaactgatatgttcatagtacgtttgggtgaggtgtatccgacgaatactcattgtttgattaccttgtctgaagcttgtatgctcaccctggaagtgggagtcatgggggatgggggagaagtgtacattgtgggagggcctggggatggacttttggattctgtaatcagtgaaaagataaagcgtgaaaaggcatctgttgatgattatgaacatgtgcgggaagaagtgctggccttggtgcaacatagttatactgaaaaaaaggctattttgattggactaatgaaaaaaatagtgccaatttttccgctttcttctacccgatgaaaagacgtgaaagtgacagctttttaatgctttttctgaaacttagaggtggaataaatgtatattataaaaataatatattacctttgtgcccgatttatatttattacaagaactcaaaagattaatcagaatatcttatgcgtagattaataacactattctttttggtatttactttgtcaggggtagcttttgctcagcagatgtcagatgatcaggttgttcagtatgtaaaaagcgctcagcagatgggcaaaaatcaaaagcagattactactgaattaatgcggcggggagtgacaaaggaacaagttgaaagaattcagaaaaagtatgaaaactctaaatctggaagtccgcagagcaatacccaagatgagaagcgttctcgtcaacgtggtgaaatgagtggcgtagtcaaagggctgcgtacaacctcggaaacttattctgccagacaaacggatgttgcaggggattctttacaaatgatggataatcgttccttgtctcaagagaaggaaacagaggatccgacttcgcaaatttatggtcataatatttttactaacgataatttgactttcgaacccaatgtgaatgttgctactcccgagaattatcgtctgggacctggtgacgaggtgattattgatgtgtggggagcttctgaaacaacgattcgacaaacaatctctccggaaggaagtattcttgtgaataatttaggaccggtttatctgagtggcaaaacagtaaaggaagccaataattatttgaaacaagaatttgccagaatatattctggagtaaccggaaatgttccgtctacccaagttaaattgacattaggagaaatacgttctattcaagtaaacgttatgggtgaagttgtggtgcccggaacttataccctctcatcatttgcttccgtatttcatgctttatatcgtgcaggtggtgtgaatccgattggtagtttgcgcagtattaaagtgattcgcaatggaaatacaatagcggatttggatgtttacgatttacttatgaaaggaaaaatgaaagatgacatccgtctgcaggatggtgatgtaattcttgtggatccttaccagtcactggtacagatattaggtaaggtaaaacgtccgatgttttatgaaatgaaacccactgaaaccgtaggtacattattgaagtattcaggtggttttacgggtgatgcttataagaaagcattacgtataatccgtaaaagtggacgtgagcatcaaatttataatgtggatgagatggattattccgtattccgcgtagatgacggtgataagataacggttgattccgttttacagcgttttgagaatcgtgtggaaatccgcggtgctgtatatcgtgaaggtttgtaccagttggacggtatgatgaatacagtgaagcagctgattaagaaagcggaaggacttcgcggagatgcattcttaaaccgtgctataatcgatcgtgaacttgaagacttgtcgcatgaggttatacaagtagatgtgaaaggtttgctgaacgggacggctgcagatattcctttgcagaagaatgacattttatatattccaagtattcatgacttgaaggaagaagctacacttaccattcatggtgaagttgccaatccgggtacatatctttattctgataaaatgacagtagaggatttggtgttgcaggctggtggcttgttggaggcggcggctacaacaaaggttgaagttgcacggcgcatgaaagatccgaagagtacatctttcagtactacagtaggccagaatttctcttttgatttgaaagatggcttattggtgggagaaggaagccaggatttccatcttgagccttttgatgaaatttatgttcgtaagagtccgtcctattttaaacaacagaatgttatggtgggcggagaagtcctttttagcggtaattatgcactatcgaaaaagaatgaacgtttgagtgacttgatagctaaggctggtggagtaactcccgatgcttatataaaaggagcgcgtcttatacgtaggatgaccgaagaagaattccgccgtaaggaagatgctctgcgtatggcgcaagcgggaggcggagattccatatctgtaaaaagattggatttgtccgatacctattctgtaggtataaatctgggagaggccttgaaaaatcctggttcagatgctgatatggtgcttcgcgagggagatgtattatttgttccggagtacgtaagtacagtgaaaatcaacggtgctgtaatgtatccgaatacagttttatataaaaagggtgaaagcttgaaatattacatcaaccaggctggtggctttggtaatgacgccaagaaacgcaaggtctatgtaatatacatgaatggtacagtttctcgtttaagagcaggaaacaagaaagccattgaaccaggttgtgaaataattgttccaagtaaagaacagaaaaggaagatgactactactgaaattctgggaatgggaagtacgacagcttctattgcagcgatgattgcgactatggttaatctctttaagtaatttgaattatgagcgaagaaagaatacaaaacataacttctccacaaccagaggaacaagaaatagatttgatagaactggcccagaaagtatgggctagtcgcaaattggtttttaaggcgtgtggtatcgctgcccttgttggactggttgttgcatttagtattcctaaggagtactctacaagtgtgacgttggctccggagagtggtggcaaatctggtggtggaagtatgggagcccttgcagccatggcgggtatcaatttgggtacttcttctggtgaagatgctttgtcacccgaactttatcctgatattgtaagttctactccttttctgattgaactgttcgatgttaaagtcaaggatcagaaagcaaaagtagacacgactttatatgcttatttgaaagaagaacagcgttctccttggtggagtgcaattttctccgctccttttaaggtgttaggatggacattgtctttgtttaaggatgaaccggaagagggggatgcaaagctggatccttttcgtcttactagagatgagtctgccattgcagatgctttaagtaaacgtatctctgtttccgtagacaaaaagacaggtgtgacaaccttgtctgttactatgcaggatcctttgatatctgcttcgctgacggataccgtgatgcattgcctgcagaactacatcacagattatcgaactaataaagctcgtcatgatttggcatttaccgaaaaactttatggagaagcaaaggccagttatgagtctgcccagaagaaatacgcaaattttgtagatgcaaaccagaatataatattgctgagttatcgcgcagagcaagagcgtttacagaatgaaatgaatttagcctatcaagtatatacacaagtgtctcaacaattgcagatggcaagagctaaggtgcaggagattacaccggtatatacggttgtccagccggctacggtacctttgaagcctgcaaagcccaataaattgatgattttgatcggcttcatgttcttagctggtgtcggcagtgtgggatggatattatttgtaaaagatttattaaagggatggaaaaagcaaacaatatga

SEQ ID NO: 394 - DNA, 28333 bp, unidentified
  source 1..28333: mol_type = unassigned DNA
gcatgctccgggagttcgtggattttgccaatgtatttcactaactctcaatttatttctcttccaccggaatctgcttcagattctccacgggttccaggatctcattactgcggatgtcgatgatgggaccgccggttccttcaatgtactctctggtaatggtaacccttccgatgttatcatccttcgggatctcatacatgatatccagcatgaagtcctcgatgatggagcgcagagctctggcaccggtatcgcgcttcattgccttctcggcaatggcatccagggcatcgtctgtgaactccagttttacctcatccagctccaacagcttctggtactgcttaagaatcgcattcttcggctctttcaggatcttcaccagcatatcctttgacaatccctgtaaagtacaaatgatcggcagacgaccgataaattccggaatcataccaaacttgcggatatcctccacagtcaccttggataaaatatcggtatctttatcgtatttatccttcagttccgagttgaaaccgatggatgcggtcttggtcaggcgctccttgatgatctcgtccagatccgggaacgcaccaccgcagataaacaggatattgcgggtgttcaccgttgccagaggtaccatggcatttttgctgttggcacctaccggtacttccacctcggcaccctccagcaatttaagcattccctgctgtacactttcaccactgacatcccgggaattggtatttttcttcttggcgatcttgtcgatctcatcgatgaagatgatacctttttccgccttttctacgtcattgcccgccgctgccagcaatttggataccacgctctcgatatcatcaccgatataaccggcctcagtcagagaggtggcatcagcaatagccagaggcacatccagaagttttgccagtgtctttaccagataggtcttaccggaaccggtggggccgatcatgaggatgttggacttttcgatctcaatctcatccatagtgtcagtggccactctcttgtaatggttgtatactgctacggagatgaccttcttggctttttcctgtcctaccacgtattcatccagactggccttgatcttatgaggtgccggaatgtccttgatattgaataccgatttgggaccttccgccttctttttcttcttgagtttctgcttgttgggaataccgccgtctccctgaagatccgccagattcacaaaactgatattggggaatccgttctgtccgttaaactggttgaaatcattgggattgttcaacattccctgataatcgaactggctcacagtctccatggtcttgtgcatgcaatcatcgcagatgcagatatggttgggcagcttgaacattctgccggctttgctctccggtctgcggcagataaagcagacatcttcgtattcgctgctgtcctttttgtcctctgactttttttcggtggaattttcttttgcagtatccgccacctgtgtgtttccgttatttttttcgttatcctgagtttcactcacatcggtctctgttttttcctccttagggatcacttctctataatcatcattataattatctgtcatgttattctcctctttgtttcctaccactattccgcagtgtatctcggtaacacttcgtgttccctcgatatccgggcttcgccctatcatccccggctccaaagcatcttcgcagtgtatctcggcaacacttcgtgttccctcgatatacgggcttcgccctatcatccccggctccaaagcatcttcgcagtgtatctcggcaacacttcgtgttccctcgatatccgggcttcgccctatcatccccggccattacgcaataatgcctgcaagcagtcatattgcataatacccgtgtctgacacttctcattgcctacgcttattatactcaatgaagtagcggggcacaagttaagtttttctaaaccatttataactattcatattttggtaaatattacaagacccgggcaaaaccatatgtctcgcccgggtctctttccatttccttttatttacctgttatttctttatttctggcttgcaggtctgctgcccagtgtcagattcagctcgatggatacatattcaccgttctgaggtctctgtaccgttacggttacggaatcaccgaccgcataatactgtaacgttttctgcagatcagagtaagaagagatactgctgccgtcaaatttggtaatgatatcacctttcatgataccggcattggctgctgcgctgccttcctctacagatactacatagataccttccggcatgttgtacatctgggagatctgggaagttacttcctgcagggagatgccgatgtaaccgacttcatcctcagctaccttggttctggtctgacgctccatcagatctgcaatgataggacttgccgaagtaatcgggatagcatatcccataccttctacggcagtaccaccgatcttgttggagttgataccgataacctcaccattcatgttcagcagtgcaccgccggagttaccggggttgatggctgcgttggtctggatgaaagtaccggtagagccgttctccagaccggtagagccgttctccagagtgatctcacgattcagggcacttacaataccgttggtaacagactgaccatagccaagggcattaccaatagcgatgaccggctcaccaagcttcagatcatcactgctgccaagtgttgctactgtaatggcattcttggtatcatcactcagatcatttaaagatactgcgatcactgccagatccatatcggaatccagtcctttgacctgtgcctgtgcttcactgccatcgataaaagtaacggtcagagtatctgcactctctactacatgattattggatacgatcagcagttcatcatcggtcttacctacaatgatacctgaaccgctggctgcttcttcctgtgtatactgctgtccgaagacattggctgtctcggtaaagttatttacgatggataccatggcaggcattactttttctaccacattggatacatcggactctacataagtaacattggtagccagctgtgcactctgggtactttctgtcgttgcctcagaagtgatctcatctaccactgcggtatctgtgctggtcgtaaacatcccggttccctgctgtactgcatagaaaccgattcctgcgaacagtccaaagaacaatcccaggctgacacttaccattgccttccggaagtaaccgccatgttttggggttttcttaggctccgtattgttgctgcctgtggttccgcccatctgataagtggtgtaaccattcgtgcttcctgctgcactctgggtagtactatgattttcatagccataactgctttctgttcttgtctcattcagatctgctccactgaatgtaccggttgtattttcattgccggttccgtaaccggaaaaattatcattctcgtacatattgcttcctcctatcctgttgcaagtgagaaactctttttaccattacctgtttcatttcttcctctcaccttatgaacacagtatatccgtcaattgtgtccgaattgtgataactttctgaagcaattatgaatcctgaaaaaacagagagtctgttctgcctgcaagcagtctctctatgggtaagttattacactctactcaacagtaacggattttgccaggtttctgggtttatccacgtcacagccgcgtcccactgccacatagtaggagaacaactgcaaaggaatgattgccagagaattggtaaagtacggattggtctcggggatgtatattacataatccgacgctttctcaatggccttgttgccttcaatggtgactgccataacaaaggctcctcttgcttttacttctaccatattactgatggtcttctggaacagatccggctgggttgccaaagccactaccagcgtaccatcttcgatcagagaaatcgtaccatgcttcagttctccagctgcataagcctcggaatgaatataggagatctccttcagtttcaaggatccttccagtgaaatcgcgtaatcaataccgcgtccgatgaagaagatatctcttgctcccacgtaacggttggcaaaatgctggatcttctccttctgtcccagaagcagttcaatctgatccggcaggcatcttaaatctgtcagcataccggcgaacttctcctgatcaatagtaccacgtaccctggcgaatttcatagccaacatgtaaagtgcagttagctgtgcactgtaagccttggtggtagccactgcgatctcgggacctgcccaggtatacataacactgtctgcctctctggcaatggagcttcccaccacattgacaatgcccagtaccttgaagcccctttccctggactctctcagtgctgccagagtatctgccgtctcaccggactggctgatgacaatgaccatattacccttctgaagaatcggatcacgataacggaattcactggccacatccacttctaccgggattcttgccagaccctcgatcacatattttgcggtaactccggtatgatatgcggagccgcaggccacaatatggatcttcgtgatctctttgatctcttcatcactcatgttcagctcttcgatcacaatatcattatccttgattctcggagagatggtatcgttgatggtcttcggctgctcatagatctctttcagcatgaagtgctcatatccagccttttctgccgcattggcatcccagtcaatggtcaccggctgcttctcgatctcttcctcatccacggagaagaaacgcagactaccctgctgtaattccacaacttcctgattgtctacataatatacggttctggtatatttcaatatcgcaggaacatcggaagcgataaagctgccgttgtcgctctttcctacgatcagcgggctgtccttgcgggctgcaaaaatcttatccggctgatctgcaaacatgatccccagcgcataagagccttccacacgatgaagcaccttcgtgatggcttccagaggatttcccttgtaataatagtctaacagatgtgccaatacctcggtatcagtctcggatacgaactgataccccttatcctgcatctttttcttcaggggaatatagttctcgataatgccgttgtgtaccacggcaatggttcccgcattgttcatatgcggatgagaattgatatcgctgggagctccgtgagttgcccaacgggtatgtccgataccggaggttcctttcatattctctccgccgtgggtcaggttctccagaaccttaagtcttcccactgcttttctggtgttgatcttctcaccgtcaaaaatcgccatacctgcggaatcatatccacggtattccaacttggacagaccgtccagaatgatcggtgctgcctgttctgttccaatataacctacaataccacacatagtcatacatcctttctgttctgtttccagtattccttgttggaagtaaaagcaagtacccattttttcgggagcctgcgatagttctttcccagtaaataacctgcatatttacaggcgcattgcatataaaaatggggcaatccggcagacatatggttgctgcgcaaatataccgtcacatctttcaccattcgttttccctcggactccgaaggatatgctgcaaaaatctcgggatgctctgcctgcgatactcccaggtcaaagtttctgtgaaactgctgcccgttggtataattatgagaatgcaccacctgcgcatccgccgcataagccacagagtatcctgcttccaccgcctttgccgcatagatcatatcttcattaaatatcgtatgtctgacgaacccgcccagttcctcatagatctcccggcgataggccgcacagacattggagcagaaaaaggtcttgatccccaggctgtccaggtctgctgccgatttgatccgggactttgccggatagttaaattctctggtatagctctccaccggtgtcgaatcctctctgggcagctgtctcgcataggccaccgccacttccccctgcaggggttccaccagtttttcgatcagcctgtcatctttcggcatggcatcctgtgtcatcatcacgaagacatccgcagaagacttttttactcccatccgtctcgtaccgccatgatcgaactctcttttggatacatggtataccttgacattctgataggtttccagaaatctgattccgtagatcagctgttcaaaatatttttcttccgtattcagaagaatcacctgatgtaccggtacgctctgactgcccagtttatccaataatgtaaataattcttttcccggcttatacaggggaatgatcacatctatctccatgtcagagcgctcctcacttttccaatctctggttcattatactttaactcttattgcggcacaagccttttcctactgtccaaaaggcttataaccttcttggtaatgcacaagggagccccggcagattccggaagactcccttgtattcctgttgctttactctatacactgtttcttacttattcatataaggtgatgtgtcagattcaatcttattgctgtattccttcacgttgctggttacggaatagttggcatcatcaaacaggaactgatgcagccatactacattgctttcgagatttaccggaataacacagcttccctttgcaccgatattgccggtgtcacgcatggtctcttcggggaaacctccttcgtccactatgcgataatttgaaatattgcccagcagatccaggatgtccttggaatccagactggtgtaaatgtcgtcgatggcactgttgaataccttggacaatgttgcataatctgctttctttgcctgatcttcgattgcctgaatgacttcacgctgacgggcagcacgcttaaagtcgttaccagcggtataacggatacggcagtaagcagtagcctgcagaccattcaacagctgcataccggtctcagttaccggtgtataatcgcatttcaaaacttctgcaataccgatctgatagttgttgatatgcttgatctcctcagagtccacatcaatatagataccgcccagaccgtcgatcacttcgctcagtcctttatagcctacggtcacaaagttcgtaatatccatatccagattcatgttcagcatcttaaccgcctgctctgctccgccataggaataagcggcattgcatttctggtaggaatccgtaccggtattcaggtacgtatcacgatatacgctgaccagtttgatatcaccggtatccatgttgatgctggcgatcatgatactatcgcttcggctgcccttgtacaacaggctttccttggtggcgtccacaccgaacagggcaatgttcatatagcccttcatagtttcatcctgctgcacctcttcgggaatctgaagttcttctgtctccagaacggttaccttggggccctcattgttggtatgagtcattaccagatacaataatgctaccatgaacaggatcactacgatctctatgccaaagatgataaccttttttctcttcttggctgcacgctgtttggcagacattctcttctgtccgttcgcagctccggttctctgtccactgccggcaggtctctgaccgcttccggcgggtctctgtcctgtaggtctctgtgcgcttccggaaggttttcttccgcttccggcaggtctctgaccattgccgccattgttgttagaatttgttgccatcttgtcttctccttgtactaataagcatttttattgataaatcctgtaaagaacgtcataagaatgatcttgatatcaaatccaatggtccagttctcaatatagtaaatatcatattcgattctcttcttgatggaggaatcaccgcgcaagccattcacctgtgcccatccggtcagtcccggccgtacctgatgttttaccatgtaacggggaatctcttccttgaacttttccacaaactgcggtctttccggtctgggaccgaccagactcatatctccttttaagatattgaacagctggggaagttcatcgatactggtacgtctgagaatcttaccgataccggtgactctggggtcattgcgtaccgtccagccctttttctcttccgccgccgtctgcattgccatgctgcggaatttgtacatataaaacggcttattatgaagtcctacccgttcctgcttaaagatcaccggtcccgggctggacagctttaccagaattgctgatatgagcatgatcggtgaggtaataatgataccgaaaatggaaccaacgatatccattgcccgcttgatcaccatattgcctgtattcgtcagcggtacataccggatattgatcaccggtaatcccatcagatcctccgtatagggtctgctggggatcagactgctgtaatccggaatgaatttggtgtgcaccccggatttctcacagatatccaccacaccttccagataatcataatccttcagggaaagtgtgatcgcgatttcatccagcttgttctccggaaggatgtattccagattaccaagcgttcccagtactttcactcccttataggtcgtgccgcccgggatgtgctcatccagaataccacacactacatatccccattggggattgctgaggattctgtcgatatattcctccgccgcccgggaataacctaccagcaaaatgtgcttcaggttgtacccctttttccgtatggaacgcaatgccttgcgcatgatgatacggaatacggaagtaagaaaaacattcaggacataaaaaattgccatgacggatcgtgaaaaattgatctcacggatgatcatatataaaataatgatcaaagccgccaggccaatggtattcgcctgcaggatactgtatatctcatgtctgcggcgaaccgtacgcttcggggaatacacactgcaccggtaatacaggaacatataaccgggtacaataaagggaagcagcatataataatcctgcaccggcaggacaccgatccccggaccgtcatttaagatataaaatttgatataataggcaaggacaaaagatactgccgtgatcagcgcatctattatcacaagaagcctgttaaagactttctggttgtcttttatcatacgggtcacccaatctttaagtccgaaaagcttcttttcaacgatttcattctacaataacggtggttttttctcaacttaagaatttatgaagcgatttcttaagatttcataagaattcgaaaaacattcaggtataattgccattgaatcttcacataattccatagatgactccattgaaagcgcacttttgcctgctttcccacaggacccacagtacgtttccacccttctgccagtccctttaaatatagttttcccattctcttcttgcaaaaaaacagaaattttatgccaaatccaagcaaaaagaacggcagattcagtatccactgtagtagcggcatatttttgccgatgacatagatattattggaagaagaaagttccgttttccgggaattgtagcgggatcccgtagaagcactgccgtaatgcagaacggatgccgtcggctcgtaccggttctcatagccgtagatccgggcacggtaaccgatatccagatcttccagataagcaaaatgcgcttcgtcaaaataaccgatctcctcaaatacctgacgtctgtaaattgccgctccgccacaggctgagaatatgctgacattcttgtcataatccacagcaggccggccttttccccgggaatatgcccatcccagaacgcagtagcggtctcccgcatcatccagcagctctggcttatcccacataagcattttggcgctgacggaaaagatcttttcatccttccgaatggcatcatacaatcctttcacaaatccagcttctactctggtatcgttgttcaacaggatcacataggggcttcgtgcctcccggattcccagattcaccgcatgacagaagccagtgttctccggcagggcgatcagacgcacctgcggttttcccccctcttctgccggtgcctcttttttgtgacaccattcgctgtccagatattccacgctcccgtcagcagaaccattgtctatgatcagcacttcatattccggtgcattttcctgtccctgacacagggaagccatgcattccggtaaatatttcattccgttgtaattgggtataacgacggttacttccttcatagtctctcccatttctccggatactccggcagatacagcagtcttccccgttttcgtaatgcttccgataattgcagacttaaaagccggatatctgccccggcaggcagtgtggagctgtcaaataccggctgttgttccggacctcttactacttccgtataaggcactcccacgattttttcaaacaattccctgtcagctgaccggatcctgatgcagcgaaggtctaacgcttctgcatcctgggacagctccgcccggtgaagataaccgccaaagtccttcggcagtccctcgtagaacacctttccgtccgcagtcattctgccgccggcgatcctgccgcggtttttcccagacagcactctgccacctacggcagccacatccggtctctcctgtaatacctctgcatattgtaaccgataaaatcctacatgtctggtctcctctgcctttgccgggatcccacgttctgccgcatgatcctgcagtgcacgcagccccgcttcgtaagcatatttcttgctgtggggattggctgctgtagatgcttcatggcatctccagtgatacagcactctgggaatatgaagaattctctcctccccggagcggccatctgcagccagcacctctgacactgcccgcagcaccagatcatagtcctgggcaccgtcgcattctggccggaaggcaagtttcttcatcagatctgcatccatcaccagaaaatggcagatatagttattactcaggattaaatcgtaattaaagtcttctttatggttgggatcgtaatattttgtctcatccccgttgcatttgtcttcatccgaataagcgaatgcaactctgacacctctgtcatttgctttggtaatagcatctgccatctcatacagagcatccggtgtcaatacatcatcatgatccagcaggccgatatattctccccttgcatagggtaatgcctgattggtattcgccgcaattcctgcattttccgtaaggtgtatatagtggatccttgcatccgctgcaatagtttccgcattttccgggagccgttctgtcaggaatccctggtttgtcaacgtctcctccacactgtgatcctctgtggcatccgccagaatcagttcccagtgaggatagctctgttgcataacgcttgttatcattctgttcagatagatttccggggtacggtacaacggcaccacaatgctgagtgtaaccggattatcccattttctgcaactttgcctttccagttcctcttccggacagggcacataaaaatagcggtctgtctctgtcaggcgttcccttacagagatccaggtttccctcaggccgttgcgttgcaaataatatagagttttcttaaggtttgctatgttcagctttgccacggatacctccacttttataaaagagcaaatcgcccttcccgggcgattcgctcttaaaaataacattaactattcagaaccccattcgcaaaatcgatcttccagagctttcctgaataacatacttgcatgctatgatgccagggtcaaaaggtctaagcccacatgagcttgctcataggtgggtgaaagaccttaggacccgccccgatatgagcataaaagtgggatgataatcccacgatatgcgaatattgggtaggattgtgggagtgcgtagcacggaacaatccgtaggcatcaaagtcgggggcttttgaccccgacatcatgctatttgctcatggtggttacagtacagcctttacatcctcggtcagcttctctaccttggcctgtgcatcctctatgctgttacctttaacacccatgtagaacttgatcttgggctcggttccggaaggacgggcgcagcaccatgcattgtcgggaagttcaaaatacaggacattagacttgggaagtccggtagtagtcttctcgccgctctccatgtcgatgactacatcgttcagatagtcacggaatttctccactttcaggtcaccgaatgccttgggcggattcttacgaagcttatccatgatctcggcgatctgtcttgcaccgtcgatacccttcatggtaatggtgtactgggtctccttgaagtaaccgtatttctcatacatggataccatcatatcccacagagtcatgttgtgcttcttgcagtaagccgccacttcacacagacacataactgctacaactgcatccttatctcttgcatgagtacctgccagacagccgtagctctcttccagaccgaatacataattgttgctgccggtctgctcgaagaacttgatctgctcaccgatgaacttgaagccggtcagtacttcgatcagctttacaccataagcttcggtgatgggcttggtcatattggtggtaacgatggtggttaccagtgcgggattctcgggcatagtgccggtagcagtcttctctctcaggatatattctgcgatcagcataccggacatgttaccggtaaatgccacatactcgccggtcttggtatccttggcatacacacccagacggtctgcatcgggatcggttgccagaacgatgtccgcatccttctccttggccagacgcagtgcgtatgtaaatgccttgggatcctcagggttcgggtaatccagtgtggtgaagtttggatccggattctcctgttcgggaactacatagacgtgcttaaatcccagctcggacaggatacgtcttaccggcttgttaccggtaccgcataacggagtatatacgatcttgatgtcatcagccatttcctgaataacatcgggatgaatgatctgcttcttcagctcagccatgtacttgtcatcgatctctttaccgatcacctgatagaggcctgctttttccgcatcttctctgctcatggtcttcacggtatgataatccttgatggcctgtacttcggtgatgatgtccttatcgataggagcggttacctgtgcgccgtcctcccagtatactttgtagccgttgtactcaggagggttgtggcttgcagtcactacgatacctgcggtacatcccagcgtacgaagggcaaaggacagttccggggtaggtcttaaagattcaaaaatgtatgccttgatgccattggctgccagacatcttgctgcctcatcggaaaactcgggagacatgcggcgggagtcaaatgcgatagccacacccttgctctgggtgccgcgcttaatgatataattagcaagaccctgagttgccttacgaacggtatatacgttcatgcggttggttcctgcaccgatcacgccacgtaaaccgccggtaccgaattccagttccttgtaaaaacgatcttccacttctgcctcgttgttgcggattgccagaagttcatccttggtcttctggtcaaaataatcatcattcaaccagaaattcagttcgtccatataactcattttcctatcctcctgttttatcgctatctttatctttcttcagtaaacgctctccgccattattttaccatagattacctttactgaaaagagcaatttaacgtccgctaaccggatctctcagcgcgtagtcactgcgatccagagagaaattcgggttgtaataggggtctcctgcttctagctctgccttccatttttcacggaaatgctcggattctttgttgtaacgctccgccttctctccctgatcatccagacctctggaaatagattcataatgatacagttccgcaaaaggggtccatacattcagcagtcccagtttgcgcagtttcaggcagaaatccacgtcattcagagagatcacaaagctctcgtccagtcctcccacctgctcatacagactctttttcaccaacagacatgctccggtcactgccgtggcattctgggtataacacaggcgtcccatgtagccgaggttctgtaccggaatacgataatgggtatgtcctgcggtgcgatgtgcccccagtccgatgactacaccggcatgctggatcgtcttgtccgcataatacagctttgcacctacagcacccacatcttcccgctgtgcatacatcagcatctcttccatccagttggcagtgatcacttccgtatcattgttcagcaaaaggatataatctccggtggcataggatactcccagattatttatagcagaataattaaagtcaccatgataggtcaccacagagatccggccgtcctcgctgtgcagaatcccgccgtcatgaccgcagacggtatgcagcttgcatctctctgcgtaggaatcattgccggacaatcccagcagctgggaatagtaatcccggatttccggtgtggtgctgttgttctccaccacgatgatctcgtagttgctccaggtgctgttcttctgaatagaagtaatacatctcttcagatcttccacgtgatccttgttggcgatcacgatggagatcttcggatctcccagaatctgatagcggatccggaaaattgtggcacaggctctggtactggtgatctgaaaatgtttgaatccatgctttttcagatgatccgccacggcaccctttgccgcctcgatggcatagggctttgcgtcaatactggcggcggtactgcccgcatggcttctccagtaatacatcagtctgggcacatgtacgatcttttgtgctctgtccgtcagacgcaggatcatatcgtggtcctgcgcaccgtcaaaagccgtacggaacagttcctcgccttccagaagttttctggaaaagacgctgaaatgacagatataattgttggcccgcagattatccggtgcataatccggcttaaaatgcatggtcagcattttattaatattgtcctcctggaaggtggtctcatcacagtacagataatccgcaccctgttcattgatttccttcacataggcatacaatacggaaggatgcagaatgtcatcctgatcgaacagtccgatatagtctccggtggccagcttgtaacactcattggtgttgtaggaaatacctccgttatggtccaggtgcttatatacaatacggccatctgatttcgccgcgtactccttgcagagttcttcgatgtaagcatgttccgcatcggaaccgtccgccagacacagttcccagttctgataggtctggttcatgacgcagtccaacatctgtatctggaactctctcttgttattccacaacggcacgagaatactgatcttcggcatataggggaataccgtttcttcctctttcttcctctgctccgcatcgggaaagcttccggtaccgtaggattccatcaggctcttctggtgactcttgttacggatcttccgcagaatatctttgggaccaccgcaatgagacagccgttccttctgtctctgggcaaaatggatcacacttctggcaggtcctgtagccttccagaatttatttttcttgattcggtccagtttgaactgcagatcttccttctccgattccagtactacgatcttgtccgccagatccgcacatttttcatgctctctctcgtaggcttccttataattgatctcggtgttgctctctgacatatgtctcctccgtgatgctttcaccgcattttagcggatcatgcatctgttttattcttttgctgccggaagctctacggtcagatattttcccgtagtattccaaagtttcagcttgctgacacgattcaccacaagaacagcgatcgtatagtttcccgccggcagttgttctccttctctgaggacacaaaagccgcccaatgccacatttttctgatccggaagattttcctccagttcctgtcggtaggcaggcatcaactgcatggaccacacatcctgtccttctgtttccccacagggaatcagcaacagatgtttttcatagcaggcattatcgtctcccagaattacactgtatccctggatccgctccggtcccgctgtctctactctggccatcaggcagttatccctgcggatcttctgtaattcctctccgccaggaagtccccttttccagaaaggctcctgtaaaacattccgatctgtcagatatgccggaaccacacggctgtccagtccctcccggttcagccccttcgggtaaaaaggatcctctccccggaactgtggatgcatctggtagagcagttctctctcctgtaccagacgctgcattttctcaggactttcatcgcttccccggctgagagattcatggtgatatgcaaagcggtcgttccacaccacattgtagtatcccatttccagaagccggaagcccagttccacatcattataggctacccgcaacacttcccggaatcctccggcctcccggaacacctctgtccggatcaggagacaggctcccgtcacggccacacaatcctgtgtaaaacggttccgtccaaaatagtagcttctgtcatcctccataaattgtagcttatgcaccggtcccaccggcagattgacaatgccgtcatgctggatcttcacggaatccggataataaagtttcagtcccacactgcccacataaggctgcaaggctctggacaccattttatccagccagtcattctcacataattcaatatcatcatttaagaacagcaacagcttgccatctgccagttctgcgccacgattacacatggtggaaaaattgaactccgcaggctcatatacataccggatcggtgttccggctgtccggatttcttccaccagctgttctgtttttttcctgttttcctcgttacttccattatctatcagcaggatttccaccggaacactgccctccgggcgttgcgtcagcgaccgcagacattttcccagtacggaaggattatctttggaaggaatgatcacagagaccctaagctctctggcgaacagttctctggcttcctctgccgctttggccgccagttccacggacagttttgcggattccgctgccgtccggtactcttcccaggggttctgctcatcttccgctttctcccggctggtttctgccggtccctgcagtccgattcccgcagtaccaaaagtgccgtgaaacagcacttcttccagatgtccaatggtatgacagcctctctcaaatccaccggccgccagaaacagccgatccatcaggggacggatctcttccgctttcgaaaatactatttccctgccggtgctctctccttctgtcacaaccccgggctcccccagtttctgcagcagtctgctccgcactgccacgacgcttcccacatagaagaaagcccggtaggtatccggagcccagcaaggcttgaaccaggggatcacacgctctccgttctctgacagcagatcttcatctccatagacgatctctgcctccggatgcttcacaaaatacgcattgatccgctccacagcattttccgccagctgtcctttctgctgcctgtagatcacgaattccgcaagaccggctctttccccgatctctgtgaccactgtttccgcaatctttttttcctgctccgcagcccattgcgcgtaggtcacccgcagctttgccagttctgcttcatactttctatcctgttgtctgacaagcatctgctttactgacgtccgaatgctcaagtttcctgtctccttagaaaaattttttcaccgctcccgccatgtcacttgccacagcagggggaatctgcacgatctccattttcacagtcaggatgttctctgcctttctgtccaatgcatccacccggatcgtcagattcggatcctccgtgggaaataccacgctgggatgctccgcaccgtctgcggactttaagatttttccattggtggtaacgatctttttgtcctgcacaggaaccggctgtccgttcatggtaagctcccggattttacacacgcaggcgcacatggccggatccagccgtaaataatggacatttccatcgaaattcaccgtaaattccgcctgtttttcctctgcatagacgttctccgggaaataagaattttcttcagaaaatccctgtcccttgtcctcatagatctgtaccctgagttctccctccgtctgacggaaccgtccgatccattccgtgggcttataaatttcgccgcctaagagattgcggatctcacccatggacaatttctgtccggtcacatatttctgaaattccatctcctgctctctgtactgtctggcttcgttttccgtgatgcccagacgatccagaatacgatccagttccagtgcattacgtctttcatcttccagtacataacagtatacagcccggaaggccagagatctggtctctatgggacggtcaaaagtccattcataatcaatcagtgtccagtggtcaccatccaccagaatattggcaaagatcagatcaaagtctgccaccggcacatcctccccgtagcccactctctccagatattctgcgaacaggttgtgaaatccctccacatcctgtctgtccaggcattcgtccatcagttccgacagcggtctgcccggcacgaactcaaattccgcataaggtatgccgttctcttctcccagatggcagacattgacatccagactgcttcccgcataccgttccttcaatttttcataagcctccggcatatgacgcacatgggcttccgcttcttttgtcagcggatattttcggaccgtcttacagccttccttgtcccgcaggatctcggtgcggatccggaagctttccgcacggtcattggaatatctggcatatttcagatccagaggtgctccgatcaccgccatataggaattggaaaaaacggaaaacaatccttcctccacaattccgtcaaaagcactcttctcatcgaacaacagcattctgtcccggtcaaaattccgcagattgttggacagctctccacgtcccggaagataagcatcggaatagactgtggtcataaatttataatcgggatacggataataaaaactgcgttctcccacaccgcaggcatcgaaaatgcgctccagctttttccgggaaaacgtgcgtaccacaccgccctccggataattttcaatgccggaaaaccagctgcccagatgatcttccttgcatccggcaaaatatttcaatccgtatttgttctcaatggcaatcacgatcctgccgtccggtgccagatgcttctgcaggatcttaaggaaatcctcgtaaggcgtcttgccgcctatgtaagcctgtccgtactcaaaaacaccgatcagacagatatagtcatagtctgcgggaagttccggttccacatccgtgaaattgcccacatggatcgtcacattttcacattcgctgtggcggtaggcgttgatcaggctgcgcttcttcgagagatccacacaggtcacttccccggcttttctcgccagtgcacccgtgatggctccgcatccgctgcccacttccaacactttctctgttttctgtatgggaaggaaatccacgatattttcccggagagcagacaaatgatacaggatcggccagctctttcgctccgcaatgatcctgtcatattccaccgtactgtatttttttacaatgtctaagatctcgtcctccacacagccgtcgcaataataatcctcgccgggatatttatccagattcagtgtgatcttcccgatggtctctgtcattccttacttctcctccgcatcccatacttttgtttcggaatccatatcataatatcctacggtgttcttgtccgataccaccgtaatattcaaggcatcatacagtctgtgatatacctcgaaggtatcctgattgtagccggtcactcccagagacagcagatactcaccaccctgtaagttcatcttctgggtaaaagtcacatttttcacctctcccggctccacgctgtccagaaaagccttttcaatcatggtatttgtaccggtgatctccacaccgatgacgttttttacagaaaatgcaaaaatgggggccggaatatgatccataaaacgaacccgcatatggatggtaaacatactgcccttcaggatcgcattggtgggaacccctctgtcatccgtaatgtaaaattcctcaatctgtgcctgcttcgtaccgtattccagggcattgggattctgccccttggcctccatggaagcctgggaagcatcggtccccttctcatctgctttttgggcagctgctctctgcaggtcttcatcatccagcagactggcagtctcttctcccacaccctccgggccgtcatactgtcccaccaataccctcttgtaggtgtcgatcatagccttgggactgccttcgcccaggatatttccctgattcagcagatatacacggtcacaatatttgctgatactgctcagatcatgactgacgaacacaatggtcttgcccatcttcttgaattcttcgaatttatgataacattttgcctggaaaaatacgtcaccgacactcagagcctcatccacgatcaggatctccggctcgatattgatggccaccgcaaaggccagccggacgaacataccgctggaataagtcttcaccggctgatagacgtaatctccgatatccgcaaaacttaagatctccggaagctttgcctcgatctccttctcggaaaatcccatcatcgtcccgttcagatacacattttcaatgccgttatattccatattgaatccggcacccagctccagcagagcggaaatacggccatttaccagcactcttcccgaagtgggattcaatacaccggtgatgatcttcaggatcgtggatttaccggaaccgttggtaccgataataccaaccgtttctccctgatagatcttcatgtccacacccttcagggcatagtgaagcttatgcttcgtcttttttccgaagccgaaagcctccttcatccgatctgagggcttatcatatagtttatagatcttctggacattatcgacttcaatggccagctttttcttttcctgcatcaattttaatcctcgcttatcagcgttacactgtctttgtcataccatatggccagagaacggttggcctcgttattttcatcctccgagaggtctcccatgcacaaaaaccagggcttgtagtgataaggttgcagctgtacatcatcctcatctcccaatagcttatccacccgttccagatattcctgatggaaattatacgcttctccggtatgcacatagtaataggccccataagccgaataatgtcctgcctgattgggtgacacctgaaagatcatgataaattccagacccataatcgcataaaaccaccacactgcggctccgttccagttcgccagccatcttgccgcgctgcctgatgccttcttctgcagtctttgctgcagccagccacaccagtatatttcgttcaggaacaacagcaataaatatgtgatcttcaccgcattcagagttctggacaatccggcatgtccgagggaatacaggcttggggtgtaaccggtggcatacaggcagaaggaccacagaagtacgactcccggataccggaaacgatactccgtctccttaagtgcctgccagatcaggggtaacagcatcaccattaccataagaacaatagatcccgtaaactctggaagatgttttactccttccagaaaagatctgccaatggactccaggggactgtatccccagccgacatagctgcgggcccgcacggaattgcccggtgccgctacattcagcccaaatcctataatgtataccagcgtagcaggcaacagccacagtccctttttccggtgttccactaccacacttataaacagaatcgtcaacagcgataagagtccctgcaatgccgtgacaaaattgcttccggccgtgatcatggaaagcagtaccgaggccgtaaatagcagcccggtagcagttcttccttctgctctctccaggcagattgccacagacaacatcaacaatccaaagccgtgcattcccacgtaatgaactccgccgttataccagtagaagccactctgtgcggaataaataaacataaagactgccactgtaatcactgcctgtgctgccaggccggtccacttttccatgcccagtactttccgcaggatcacatgggtaaatgtcatggtacccgccagcaatagcagcaggatgaacactggaccgaggaaataatactgttctccccagattgccggcatcaatgccataaagaaaatagaagaataggttccctgccacgcataccactgcgttctggagcaatccagtgcaccggagatggcagcccattttgactgttcctgctccatggcagctctggcaaatcttccgaaattgtaatcatcataatacggaaccgcatagactgtcagacgaaacaatggaatcagcgtcaacagcagcagtccgcagcatcccacggccagcaggatctgtcccggcttccataaccaaaattttctaaatttttcacgagcacccttcaattactttcaccctttctgttttccccacaacagttttgtaatgcagctcctccccacaaggttcttcatctataaaagttttgctatgctctgttttttataatacgatttctccgttcttcgaactctcgaaatcgtaacaatcattcgtattatagcacgtctgcgaaatgtaccttcaatcgtttgaaaataacggctcccaacccgaacagtactaccgttacgatccagaaatacatggtggaaaagaaatcctggaaaaaccattccttctcataaatagcacttcgataaccgtttacaatatacaccagcggattcagcttcagaatcgtgatccaattgccggacagggaatccagattccacaaaataggagtggcccacatgccgatctgcaatccgatactgatgatctgagacagatcccggaaaaatactactactgcacaagtcgtatagctgagtgccagtacaaaaatgaacaggcagaagctatagtatacgatctgtatcgtatatatggtaggataatacccgtaaattgctgccacaatcaacagcagacacacaaaaaatacatgaataaaggtggctgcaataatcttgatgataggcaggatactgatcttaaatactacttttttcaccagatagttatattccagcagcgcattggttccattgtttaatgcctcactaaaatagaaccagggtacaagcccagccgtcaggaacaatacaaagggtacttccacaccctcccgcaggggagtactcgtattacccatgatcttatcaaaaacaatgtaatacatagccaccgtgaccaccggctgtgccatagcccataccgcacccagataagatcccgcatatctttttttgaaatcatttttggccagtttccagatcagatgacggttctggaacagttccaccggcagtccggtgaatttatcataccagtgaataaaagcaacgcatgccgccgcgatcactacgcaggaaatgatcttcttggccagttcctgtcccggatccgccgcaggtcccggattcttatggaatacaataagtactgccatgatcactgccgttgtcacaaacagggcaatgcccgcttttttacttaccttcattctctttttccttcacgtactcttccaatgtgccccacttggtatccttctcggaaagcgtcagttccatgccttctggaatcggccatttcacaccgatatccggtgtgttgtaagcgataccgccctcatcatcgggatgatagaaatccgtacatttatagcagaattccgcataatccgacagtaccagaaaaccatgtgcaaaattcttcgggataaagaactgcttcttgttctcttcagacaaaagcactccgtaccactggccgaaagtcctggaaccttcccgcagatccactgccacgtcatagacttctccgcggatcacgcgcaccagcttgtcctgaggaaaatgtttctggaaatgcagtccacgcaatacacccttcttggaagcggactgattgtcctgtacgaacacctcaggaattcccgcagccttgaaatcgttataattgtaagtctccataaaatatcctctggtatctccgaataccgtaggagtaatgatctttaatccttcaatttcacaggtttctactgttattttacccatttatttcgtcctcactctctatttttattgactattcgtaggtgatattcatgtccacacgaccttcgatgccgtccacttttcccttggaggtatactgccaggtcttataatatccctgatataacggaacactgcgatactctgccagccagatatgatagttttccagtcttgctgtctgcagattattgttgtaccagttacggctggcatagacacccgccgtgtatccggcattttctatggtcctgcagaacgcttcacataccagtgttctggtctccgcatccagactgtccgcacggccgttaccgcccgcaccttcggtatcgataaataccggatagttcagccggtaatcccggatcagttcgatcaccgcggaagcctcttccacagcttccttctcatccacagcctgggtgaaaaagtatacgcccaccggaattcctgcggcctgtgcacccttcatgttcgtcacgaacatgggatcttccaccaggcttccggttaccgaaccgcggtatccggcacggataatggcaaactgcactcctgcgttttccaccttatcccagtcgatctccttgttccatttggagacatcgataccgacctttgcgttaccggacgtggtctgcagcttctggatctctgtcttgtccgcatctgccagagcacctgccacggcgctgtcctcggcttctgcatccacttcatcctccgtcttgatcaacagggaaatatcgtcaatggccagaaactccactttatccttgacgtgaactcttgtctcactgaccggaaccttatatccctcaatgggaaggagctcaatataatagtctccggaatccagatctccaatgtaaatgataccgtcctgatccagatccttgtaatctcccaaaccgtccagtcgtacgtagaagctctccccggtcaccggacttccttcgttgtccacgatctggatccgcagatccttttctatggaggtggctaccagagatagacggttgctgttatcctttgcagcttccagaattggatttacttcctgatcaaaaaacgtattatcttttaaaaatgccttcagatcattgccgatctgaccatccggtgagaccgtctcttctgcctgatcgccattttccgccggagatgcactgtcacccgctccggcattctgagtgccggatgccggcggtccggaagctgccgtaaactgctccctgttgacatacatgaccagcagtgccaccagcaggatcaccgccatggaggccagaatcgccattttccgcagcttagagtccatttgctacctctaccagatattttccgtagttcgtcttaagcagcggctctgccagagcaagcagctgctctttgtcaatgaatcctcgcttgaaagcgatctcttcaatacaggaaatgtacagaccctgtctcttctggaaagccgccacaaaatctgccgcatccagaagggcatcatgattgccggtatccagccatgcaaagcctcttcccagtgtctctacctgtaaactgcctctgttcaggtactcgttgttgatgctggtgatctcaatctctcctcttgcagagggctttacattctttgcgatctccactacagcattgtcatagaaatacagtccgggaaccgcataattgctcttgggatgctccggcttctcctcgatggaaagtgccttgccgttctcatcaaattccactacaccgtattctctgggatcacgcacataatagccgaaaatagttgcgcccttttctctggcagctactctgcgcaatactgcggaaaagctctgtccgtagaaaatattatctcccagtaccagtgccactctgtcattaccgatgaaatccgcaccgatgataaaggcatctgccagcccgcggggctgatcctgcaccgcatattccaggtgcatgcccagctggctgccgtctcccagcaattcctgaaataccggaaggtctcttggggtggagatgatcaatacctctctgatatctgccagcatcagtgttgacaggggataatagatcatgggtttatcgtacaccggcatgatctgcttggaaatcgcttttgtcaggggatacagtctggttccggaacctcccgccagtataattcctttcatttcgtcctccgatccgcccttttcgggcttctttttacttgttttttaacacaccgaatgggaacgacgttcatcgttcccatttaacaggtattctttacttttcttcgtacatctcattgtagtacttctggtaatcaccgctggtcacattattcatccagtcttcatgctcgaagtaccaggcgatggtcttgcggatgccttccttgaacatggtctcgggataccagccgatctctgccttgatcttgtccggtgcaatggcatatcttctgtcatgtcccttacgatcctccacgtaagtgatcagatcgttgttaatatgtgccttgcggggatcggaatccggaagcatctcctgcagagtctcaatgataatgtggatgatctcgatattctgcttctcattatgtccgcccacattgtaggtttcgaacagtcttccctgttcctgtaccatatcgatagccttagcatggtcttccacatacagccagtcacggacattcttaccgtcaccgtagaccggaagctttttgccatgcaatgcattattgatgatcagagggatcagcttctcagggaactggaaaggaccgtaattgttggagcagttggtaatgttggcagggaaatgataggtatccatatatgccttcaccagcatgtccgagcttgccttacttgcggagtaagggctgtggggatcatacggagtggtctcatagaagaatgcattgtcatcatcgggaagagatccgtagacctcatctgtagatacatgcaggaacttcttgccttctttgaagctgccatcgggaagctcccaggctgccttggcgcagttcagcatcactgcagtacccaggacattggtctgtacgaagatctccgggttgcggatacttctgtctacatggctttctgccgcaaaatgtaccacacggtcgatatcattctctgcgaaaattttgctgatggcatccttgtcacagatattagccttgacaaaggtgtagttctcacgcttctccacgtccttgagattctcaagattgcctgcataggtcagtgcatccacgttgatgatacggatttcattatcgtattttttaaacatgtaatgaatatagttggaaccgataaaaccggcccctcctgttaccagataagttctcattttttctccgttctgcgcacagcgcacattttttgttatagatagggatattttaccataaaacaagcaggatatcaa

SEQ ID NO: 395 - DNA, 6025 bp, unidentified
  source 1..6025: mol_type = unassigned DNA
caaataggtgttagcaaacagtttaaccgcctctgcctcagtgaatcccataaacagagtgtcgatattctccttgatagcgccttcctgcaggagctctgcaaaagtatgtgctgcattcaccagacggacattatccacatctgtaccgacaatgatacgagaaggataaaggttatcgtacagtgccttgctctctctcaaaaattccggactaaagatgatattgtcgcagtggaactttttacgaatagaggctgtatagccaactgggatcgtggacttaatcaccataatagcttctgggttgtactcgataaccagctttataacagcttcaactgcacttgtatcgaaaaagttcttcttgctatcgtaatttgtaggagcagcgattactacaaaatcagcatcagagtatgcttccctcgcgtccagagtcgcggtcaaatccagtcctttttctgtcaggtatttttcaatgtattcgtcctgaatcggagacttcttgttattaatcagttccactttctctggaacaatgtccacagcagtcaccttgtggtgctgcgataacaacgtagcaatggaaaggccaacatatcccgttccagcaacagcaatttttaaattcttaaaatctctcatttctctgtccctctaattcttttacttataaaactcagcgtaccactcagcgaattttctcagaccagtccgcagacttgtacttggcttgtatccgaagtcacgctccagcgcactggtatctgcataggtcacaggtacatcaccaggttgcattggaactagctccttgtgggcctcgaagttgtaatcctctggtagcacctttgcacgaaccagttcctcactcagaatctgcacgaaatccagcaaattttccgggttttggttaccaatgttataaaccgcatacggtggaatcggcagaccatcctcgccgttctttttgtccggagccttcctcatcacacgaacaacgccctcaacaatatcatccacataagtaaagtcgcgcttgcagttaccgtagttgaaaatcttgatggtctcaccattcactagcttgtttgtaaaaccaaagtaagccatatcaggacgaccaacaggaccatacacagtgaagaagcgcaaaccagtggaaggaatgttgtagagtttcgagtaggcatgtgccatcagttcattagatttcttggtggctgcatatagggaaactggattgtcaaccttatcatccgtactgtacggaaccttcttgttggaaccatatactgaggaagaagaagcatataccaaatgctctagattctcacaatgtcgacaggcttcaaggatattgaaaaagccgaccaagttagattccacataagcatccgggttggtgatggagtaacgcacacctgcctgtgctgcaaggttaacgaccactgatggcttgtacatctcaaacatctcagtgatcagtgtcttatcagcgatgttgcctttaacaaaagtaaatgtgggatacttggccagctcgttcagccggaactctttcaatgccacatcatagtaggcattcatgttgtcaatgcctatgactgtagcagaaggatcctcctgatagatccttttcacaaggttggagccgataaaaccagctgcacctgtgactaaaatcgtttttttatctaaagtaactatgctcatacgtattcctccgctataattattttcccaaattatctatctacgcatccgctgtttgcagatagtgcattctttttcctctaatcttcatggcacaacgagccgtaacgacgtagccacactcgctgacgcgcctgtgacctatcgtcggtgtcattccagtatgtgcctcttacttcgacccttccctaccaagcactaccttgatagtcttcagcactatcttcatatcaagtccaaagctccagttctctatatactccgtatccagtctcacaacctcctcgaagtccgtgatgtcacttcggccgctcacctgccacattccggtgatacccggtttcgtagccagtctgctcttgtggtgcatctcatactgctccacctcagagataagtggtggtcttgttccaaccaatgagagatccccttttagcacattgaagaactgtgggaactcgtctatagagaagtctctgatatactggccgattcccttcttcttggtgccgtccggcagtatcttgttgcctatgactctcggatcaaagtccatcttgaacatcttcgaatcgctcatggtgttctgcgccatgagttccttcttgcgctcctcagcgtccatgtacatgcttcggaacttgtacatcttgaatatcttgccattcagtcccactctctcctgcttgaagaagatcggtcccggggacttgatgtatatgataggtcctatgaatatggtgaggatgagcgtgaatacgctgcccaccagaccacctattatatctgccgttctcttgagcaacatctgctttggtgttgcgtagttcatcatggtcgtgaccacggtctcaccatttatcttctggatgagctgcttgtcgccgtgggtcctcacgatggatgatatgcacatgtgaactgtgatgccaccctcgataaatgcgtctatcagcgtgttcgcatatccgtatgctccacgcacatccacgtatatctcgtccacccatgcggttctcacataatcaactgcactgttgtaatccgccaccaccggcacttcctggatctcctgaccgatgagattggcatctatcaccatgactcctactatatcaaacccggagtagttcttctccttgaggcctgccaccacttcatctgctacatgtctggtggtcatgaccaggagcttcttgcccttgccatgctctgcatatttctcaagatgcttcttccacaggctcctcaccgcaaatgtggcatacacatatatggcccacatgagcaggatggtagttctggaatatatagatgtatccttgaggacaaacacatacagaaggagcagtgcaacgatcacgaaaccgttcttgaagctggatatgaattccttgaagtatcctcttctgatgacgccctcatatgtattcagaaatatcatggctactatatccgccagctccgtgatgatagccaacgcgagatagtctctgttcgcatacggatttaccatgccgtgtctgatctggaatgccacaagaaatgacaattgaagtactataagatccagcagcatgaagtcaaagtgcttcagccagccttttgcgcctttctgatacataattttctctcctcatcctctgtcgtcagggtcatatttgtgcccgcatgacccggtctgttgattcatacatgaaatgactcagcccgtgtgattgtcggctgaaccttttcatctgtaaaccatgatacgcattaaatggtctgttatttatcacccacaccggcggcgcggaacgtcctgtggcatggacattcgttttgcgccaccggctagggcttggaactatttaacatagcaggatgattatttaaccttgtaaataattgacttgctgtatgccttgtagttctttgttgcagcaaccttaacagtgattcttacctttgtgcccttcttgacacccttaccaacagtaatcttgccattcttaaccttgaccttcttattggctgacttgtaagtaacctttgcctttgccttaacaccagatacagtgatcttcttcttagaagcatttaccttaaccttaacagacttctgagcagccttgttaattgtgtagtaaattgtctttgtacccttgtagttgttgataccctttacggtaatcttatacttgccagcgttcttagccttagttacaccagtaatcttgtaatcagtacctctcttgagaactgtgttaccatacttaactgtaaccttggttgtctgattcttagcattgtatgtctttgcagcagcagtagccttgtagctctgctgtgcgttaactgtgtacttaactgttgtatcgcctgaatagttacctattcccttgatcttaactgtgtatgtaccagcctttgttgccttaaggcttcctgaaacgactttgaaatccttgttcagggtaagtgtcttaccgttaacaacaattgttgttgtctggctctttgcattgtatgtaagagactttgctgtagcagacttaacgtctaccttagctggtgatgatgtagctgcaaatgcaactgttggcaccatcattgcgatacatacaactatagccaaaagcttctttaaattcttcacaataaattcctccttcccaaaaagttctattgtattgaatatatgataaaacgccctgcacgccactatacatggcgttatatccaaagtgaattatttattttgacggggcgctgtcgctggaggctgcagcctctttgccgtaagtgccataaccatagccgtactggctatagtatttgccatacttgccgtaatatttcttgtatgctctccccgttgtctgggctctgttgagtatgactccaagcagcgtacaacctacctggtcaagctgctggaatgactgtttaatgagacttctggatgtctcacctgctctgactaccagagctgcgccatcgcacagtgatgcgatctgagcggcatccgccacactgccaagcggtggcgagtctatgatgacatacctgtatgtctctgccagcttgtccagaagctccgcaaatctggcgtcctccagaagagctgatgggttctccagaagattcatacaaggtacgatgtatgcattttctacctgtgtttcatagatgacatcctccatctcggactgtcccgaaaggaaatatccaagatcaggaagcttgtcagcatcctttatatgatgtctctcctttatgactgacttacgaagatccacatccaccagcactgcagggaatcctgcctcggcgagcatcttccacaggttgatcgccacgctgctcttgccctcatttggcatgctgctggttatgagtatctttcttgtgttcttgccacagaactttatgttgatcctgagacggttcatcgcctcctccactgcatatgggagttcctgaaactctatgttaagcttcttcatgctctgaccctctctttcctgttgtgtttctttccaaattcatcctctgtgtcgtctgtcctgaactgatcactctcaggtattgtcgtgagcggtactattccgaaatacttctccatgtcgtctgctgagtggatcgtgtcatccatcaggtatcccacaatgacgatcaggcagtagatgagtgctccaagcaatgcacctatggcggtgtacttaaggtagcttggtccgaccttctggtctgctacccttgcaacctgggctatgttaggtgcgcttgtgctcatggtatccgggagatactctatcgacacgtttgccagtgtatttgcaatgtcacatgcctgctgcttgtcagtgcttgtgaccgtgatcttcaggactcgtgtgtctgaaggattctcaagggttatcatcttggcaagcccctctgagtccatgtcaaggccgagcttttcgatgacctggtcgagaaccggatagctgagtatcaggtcttcgtaatccttagtcagggatgaaccgatgttcagatcctggagatttactatggaatcatctgatgctgataccacatacagcttggctgtcgactggtatgtcggcttgatcaggaagtatgcaaatgcgttgaacagcaccgcaccgatcaggaagcacagtatgatgtatgggagcttctcaagaagcgccattcccatgtccagtagatcgatttcggtttcatcatcctctgtattcttgtatgtgttcactgcggctatatgtgtggtctcatcctgcacagcagccattttcttgttggaattcat

SEQ ID NO: 396 - DNA, 35995 bp, unidentified
  source 1..35995: mol_type = unassigned DNA
aacgccactaacgatatcaaaagccatgcacaccgctcccagatatgtccatctccaaccataacttttttatccaacagaagattcagacagataaatatcgtgactgcgaccatcccggctcgtgtcacctgaaacattttttttgtcatacataccgctttcctaaactcttgtcattcattaataccatcacacatttcactgcaagtttcacgctctctttccaattatagagatatggctttgcaaaaattttccagaaatactttcgaatatcttttttcaataatcttttttccggttcttccatagcttccccattcattgccagataaagcacattccatgccagacagctctgtatcactggtgccagaagttctctgtcttcttttgcctgaaaataatctatccgctcatgccacatttcaaaataatccatgcaatcctgttttttataagtaactcccataatggaatctgcacgttgtagatagtagtatatattctccggaatacacaccacacattcctgattctcaaaaacggatacaaacacatactcatcttcgtaatgtcttccacatgggaaacgcagttctttaaaaattttagcatcatacaaagccccccatgctgtaacaagtacccattcaccctgaagctctttttttataatttcttttcccgtataaagctcctgcttcttatcctgagtcacacatatttgatctgtaactttattactctcatcaattatctgaattccgcaaactgcaattgatgtccgattctgctgtaatgcattatacagtttatagatataatcctcatcaacaaaatcatctgaatcaacgaacgccacatactctccctgcgcaatatccaatccgacatttcttgcatcagacaaaccaccatttttcttatgtatcactttgattcgattgtctttgttctgatatttgtcacagattgccgggcactcgtccggagacccgtcatctaccaaaataacttccagatttccataactctgacggagtaacgaatcaacacagattgcaaggtatttttctactttatagattggcacaatcacactgattaatggtttcatttcatctcctcatacatttcttctaatcgccccgcctccacacggatatcaaatccatgttctgcaagctcttttccaaaacttcgtcttgcctttccgttgtctttatagcgtcctgccgctcttaccgctgtcttcgcccattctgccttactttcctccagagacaggaatggactgcccatcacatccacttctctggtgatcgtatcagaaaacacacatggcagaccgcatgcctgtgcttctacgccagtcattggcagcccttcgaataaagatggcatgaccatgacatccattgcctgatataactctccggtgttatccaccattccgaatatttttactgaatttatcaacccaagttgttttattttctcctcaatctgtgggcgtaactcaccatctcccaccagccataatacactgtctttgtggatttttcgtatctccgaaaaaatatctaccagatacatctggtttttctgttggcagaaccggcctacatttccaataacaagcttatcttttgcctgatactgtgttctgatttcatttcttgctgtttcgttataagcatattcatcacagcagatcgcatttttcaacacagtataatcttttttgccaaaaaggaacgctcctgctgcctgcgagcatccgatccgatcggtaatgtacttttgagatatgctccaaagcattctattccgcaccgcttttcctttactctccgcatatacagttgcatggctatgtacaattcgatgactgattccatactttgcagcaaccggcaggcataaaaatgcaatgtagggtgcatgcagatgaacaatatcatattcactgtgatgttccgaaaaaaactgttcaaaatatttccttgtctgtctcatctgtctgccggacaatgccggataagtatagactcttgagccaagttttttcacttctttatcaaatgtctcttcctgctctccgaagatcagataatccatctggacacgttccatattcatatgtctctgataattgagcatcactgtcccgacaccgcccaccgggcgttttccaatgatctccagcacatgggcttcacgcatgatttttttcctccatttatgccttaccctttaagcatttatagcataattttctttacacaaaagaatttttctatgaattttttcttagttattcagatttgcgcaaaaatctcttataagagtactccttcatccaccccggcatcatgagtacgacaaaagttccaacctgcgcctttatatattcaaatgtatttgtaattcctaactcgtgctgctgttttctaagtttttgaaaatccttgtaataagcccatccacttcttcgctttactaatcccatgcttgttctcgcccggacaagtatatcttccatgttccggaactgatatccctgtgacaacatcctgctccatagagaatagtcctccagaaatggaaaatgtttataatttcctgcttttaaaatagaatctttcctatacataactgtcatgtgatttaatggattacgcactttcacatactccaaaatttcttcctgagtctttggcatattcttgacgcggtctatggttccttcatcattaaattcccggatagcaccacctaccacatccacttcaggatgtgcttccatatatgccccctctttctctaatcgatccggcatcgcaatatcatctgtatccattcttgcgatcagatcatatttgcataattccactccttttgccagtgcacgaccaagctgaacattctgttccatagcatgcacatggagataatcacattttttctgatactccgccactacctgatataattcctgtgtcagaggtccatcttcgatcagaaggatttcatctgcagtcctcgtctgaactaatatactttctaatgacgctcttaaatattctggattttcttttttataaacagacatcaatacggatattttactcatattctatctccttagatttttttatactctccagaaaatccaccacttcatactctcccacttcttccggaaatgatagtttccggtcataggtcaggctgccaaaaacctttgagaatatgttaactcttccggcaagcttaccgatgatccactcgaatcccggaacgagccatatacttcttccatagctttcggcgatccgtgctaccatatctgatgtattcacatattggctgttttgtgggcaatagataccatctgcatctcctcttataatccgatataagaactcgcacaaattctcgatgtatatcatgcttctctcattgctcactctcggaaaaacaggtatcttgcccgccagcttctccaatgaagcataatttccggtacaagctttcccataaatcatcggaggtctgataactgctactttgaatgtgtcacttctttgctcacataagtaccgttctgcggcaagcttgctttttccataaaaagtaatcggtgtacattctgtttcttctgtaatctgtcccattgtcattccataaacactcatcgtacttaaaaaaacgaactgacgaacccgctcagcctttgccttatccgcaagttcttctgtcaattttgtattaactgcataatagagtgcctccatttccggctgttctttctgatgtacaattgcagccacatggaggatcgtatcatattttgaaaaatccattttcttccattctgaatttctcacagaaacaaatgtaacatgccatcggtcttccaatggcatgtttccattttttttctctatatactgtttgaatgaagtgccaacataactgttggttccggttatcaaaatctgttttcccattattttccctcaaataacccagcatgtctttttatccgcagctactagctatttatgcatttctccggttccaccttccacaacacctttgtgtgacaaaactgctgtgatcgttccaaaaaagcacttcagatccattatgaatccaaattttttcacatactcaccatccagttttgcctttacatctatctccaactcatcacgtccgttgatctgcgcccatccggtcagtcccggcattacatcattcgcaccatacttatcacgttcttcaatcaaatcatactgattccacaaagctggccttggtccaacaatactcatctttcccataaggatattgatgatctgcggcaattcatccagactgctttttcttaaaaatttccctactcttgtaatatactgttccggatcagccagcatatgagttggcatatcctttggcgtatcaattctcatagttctgaatttgtagatcataaagtgtgtcttatggattccaacccttttctgtttaaaaaggattggtcctctactatcaattttaatcgcaatgcataaaatcaaaaacaaccaggataacagaattaatgccagagcagataataaaatgtcaattacccttttcactcccatataaattttctgtggaattgtaaactgtttcatctttttgattcctttcatgtatctgcaatttatgcaagcatcagacaataaatagatatacctgtgcctatcagcattaaaaacgctataagactctgataattctctaatttcatgctgcatctcactttttggtttataaaaatgagactcagtggaaagatcagcggcaaataatatcttggtgatactccgttaattaccatcgaccctaccggtgtaaaatccaggtataatgccgtccagaccagacatgctgttccaaatattaatactgcattccatattttcatcatcaatatttttcttttcatctgtgcatcatatgttttttctgtcattccaaaatcggtcacaaatgtaaacaacatcgtaagcagtactacaaaatatcctattccatcatagattccacggtatgcaaaatttgcaagcactttggaaccaataaaataagatgcaaacgttgttccaagtgatttcaacaaaactcctgtatacgtcaacggatatcccaaaatcatagataactgacttgtctggctcgtatctcctccacggtaatctcctacctctgctccgcttgtaacattacctattaacggcagtataaaggacgcaaacattaatattaataagacaaagattcctgctttaaacagattcttttgtctcctgctataaaacttgtccttcggcataagccaatataatgccaaaaatggaatatagaccgcctttgaaaagcatcccacaaccatagcaagaatagataccatcgtccgttttgtttgaattttttcttcactcaggtactctgttacaaacaatgctatgcccaacattaaaagtgctatcacaaatgcatcatatgtaaatgacgaaaaaagaaataccgttgtcggcagcaacccaacacacatcaatgtacgttttccatacttgctgaaacgaatcgcacacgtaacgacagccgtacaaaacagtaaattaaaaaactttcctaaaaatactgttgctacataagacaatcccagtgttcttcctaatccaagtcctaatatctgtggaagataagccctttgtccatatctgagaaatctacctttttgtgatgataatacaacggtatcatttgcctgattaagccattctcctatccattgttcttcctctaacgtgtcccctgttggtacgcgcatttctacatttgacatcacagcatcactgtactccatataattccatacccaggagtctgtatatgctatattataatgaatctgttcatcccatgaatcaaatgaatgatgtgctgataagataatcaccgttcctaatgcaactgataccattgcgtacatccattcgggtctttttccaaaaaaagtacaatgagaaacaaataagtaacttagcaacaatactgaaaatacaagcagaaactttgcccaggaaaataccgtgtgatttacaaatattattgaatttaacttatccgcatctttgttttccactgtcaatttcaggctgtcaactttctgatctacccatactgcagattttccaagcaaaaacgatgcagtatcttccagttccatcacttctttttgtccatatccatcatagaatgtcactttcattctggagctgatatccgtcttgctttgataaatcaaatagatagaactcacatatcttccatcaaataaaaaatcatacgttgtctctccatctttattctctgccttttgtacttcgctcacctgaaaagtctgctcatatttttcgtttttaaacgaattccactgtaataatacctgttctacaaataacgataggaaaaatattacaataattgcaataaaatctctaagatatatttttttattttttagaatttgttttatctgttccattttcctttttcctatcaagctgcaaaataaatcccattcctgcaagcacaagaattaagatgacttcccatattttttccatattagattccctgttttctggttctaccgattctgaatagagtatgttggcaccatcttctgcacccattcccgtatatcatccggttcttctaccacatgctctttgatttcttctaactgttttaaaaacttctcttcatccatctgtattggtttgccaatatgaattaatttattggctgtttcctgcatgccttcttctttcatgagcatctcttcatacaatttttcgcctggtcttaatcctgtaaatacgatctggatatcctcgtcaggtttatgtcccgaaagaagtatcaggtttctcgcaaggtctacgatcttgaccggttctcccatatccagaacaaagatttctcccccttttgcataggctcctgcctgtaacacaagagatactgcttccggtattgtcataaaataacggataatatccgggtgcgtaacagtaaccggtccccctgcctcaatctgtttcttaaataaaggaatcacacttccgttgcttccaagtacattaccaaatcgaaccgctacatattctgtcttagaacgattattgtatgtctgaataatcatctcacagattctcttggtagcgcccataatattcgttgggtttactgccttatctgtagaaatcatgacaaaacgttttacattgtatttatctgcggcctgaaccactttccatgttcctaaaacattattttttactgcttcattcgggctgtcttccatcaacggtacatgtttatgcgctgccgcatgatatacgatctccggacgatatttatcaaaaatcagatccatgcgctttgtatttcttacggaagcaatcaatacgaccagatcgagttcaggataatttctctttaattcctgctgaatatcgtatgtagtattttcataaatatcaacgatcactaactgttttggattgtgtgatgcaatctggcggcataactcgctgccaatcgaaccacctccacctgtaaccataactaccttatcagaaacatatcccataatggaatcaagatcaaccgtgatcggatcacgtcccaaaagatcatttacatcaacatcttttaatttgctgatactgacatccccatttaccaactgatacataccaggtaaacgttttaattcacagccggtctgtttacaaatatctaaaattgcctttgtctcttttgcactcgctgtcggaattgcaataatgatctcatctacaagatactcatttgcaatttctatgatatcatttctatctccaaggactttgacaccatgcatatattttccaattttgcttttatcatcatccacaaaacctacaatatgcatattcacaaaacgactgccggaaatttccttgataattgaatttcctgcttctccggcacctactacaagcactctcttaagattcttctcatccactttttttccaaaaaaagttctgactgcccgataagaatagcggctgataaacataaacgccaataataatgttccataaataaaataccagcttctaggcagcggatactcctgatctctgtaattcagaagaatcgtcactgtattgagcagcgtatctacaatacatgctgctgcaagatacaataattcggttacccctgcatatacccaaaggctgctatacaaacgaaatacataaaatacaataatcgcgatcactaacgttgccggcaatgaactccatacaacaccaatataatactttggtacagccgaaagactaaattcaaatcttacaatcaatgccgtgatgcttgtcaatattacaatgcaaatatccatcagcaccataaatattctcttgatccataatgttttatctaagtttttcataagtccgccacttttctctataaattattttgcatatacttcataatgttctgtattataaattttactaaatccaatgctattaaaaaattcaatattgtcatactcagaattaataaccagacaattgcagccataggaatctgtttccatctgcagctgttccagattctcctgtgtaaaagataaaccttcaccataaataactgcaaatctggtatcatattcacgaagctcgcctgccacctgttccggtgcaagaactcttggtttttctacaaattccaactgttcagcgatctccatgacttcatttgatattttataactattcgtgataaattccaaatgctgcgacgtataatttaatcccatccctgcctggagcagtaaaatatatatcactatgacaattattttttctttcttagtgggtatgtttatcagatagtctgtcattacaactccaacaacagctactatatttagtattccatagaccatccaatgatctgtgttctgaccgctcatatttagtatgccatttgcaattcccggcgtcatcagaaaaagtataccaaaaatctcatatattaacaaatttctttgtctttttttatttataatcaagaaataaaatattgcaacaaaaaggaaaaaaacatttgttcccatcccattgtaagaaaaatatgcatttttaatgtcttcccacaacccggacatatttataccccttccttacaaaccagacaagaatcatcagcaacatcatcaggaacacataaaaccagcctttgtgatgtaacaattgtgccgccggatataaaataataaataatactgcctgcatcataaccggatgttttacacaatcggatactttatttttttctcctccatacatgaaatttaacatacgcatcacttgtaaaaacgcatatggaagaatgcagcattccaacattacactaccattccaacagcttcggaatatgcctgtcaccggagtttctaccgctgtatatattggtacataatagataatttctacaattattaaaaatactgcctgcattttttcctgcttaaaaaagaactttccaatttcccaataacagcacataaaaaatggtaaaatgaataatggaagtattacctttatcagcaatgccggatgtaatccggaaacccatgcattgaccgcatatagcatctcataaggtgaaaatatcttttccatctgcgtggcaggatactgctcgccagtatatggttgatatatatatgcagaattggtatcaattgatgtcattactgtttgtactgtctgctccatctgtggttttacacaaactacagaaaacaatattgctattatggatactaccatggcaatttttacggtcttgtgtccattttctgattttcttttatgtttaaaacatccatatattgcttttttatttgctaatatggatgccacgcatatcgtaatcgtcgcaagcatccaaaccatactaagtttttctaatgtacagccacgatataaaaaaagtaccgcaacaccccaaaatattccaagcatagcaacaaatccatttgcatatgtgcttgatatatttctcctttttacacctgctgctgcatcaataaatgcacctgctaacaatggtactaaaaaaaacaaataaattaccagcaatattcctgctgcatttttcattcattttctcctaacactttatcgactttgcgttctaataaagttttatatactttcgtccccttaatatactccagttcgttttctactttgtccatatgacattttaactcactaagtgcactgagtatcggattgtcctgcaaccctgcttccctgattctaaatgcaattttgatctctctgacattattttcccattgattttcaaatatgatctgcggatcttccgatgcaaatataaaatcatgatcttttgttatgatggcattgtgccgataatgttcaatttcatattcattgttatcttttgtcacaatttgcaccttgagattttgcaaaacacatgaaacatttaatggatccaatcgtatttctgatacatcctgtgtgaattcaatcggaatattcaattttacattctgtcctataatatgatttgtaattgccttgtcttcaagatagtttgttccatcatttaagaacacctgtaagaataagttttcctccggaagcagttttttcacatcgtatacttcttttttgtaagcaataaggcttgcgttatagccatttttcccaccatatacatattgattaaatgcttcattcatattttcaaatataacaatttcttcttccgtaatatcaaagcaatcataaatttcattgattgtcatgatatctttcatagcactgccatttctggtataaaaagcagacaccgcacggtatattacaaatttcactggaattggaaatgaaaatacccattcataatcaataattttatatttgctgtcagtctgatcttttatgatattatcaaagctcatatcgatattcatttcttttccacattccatctcatctgggaaagaaacttcgccaaacacctgtacaaattgtgcatccggcataaatgttcttctttctatattaacattgcttcttatgattccatcatacattcgaagcaaagaaagaaatcttacttcgtctttatcctcaagagcctccaacattgtattgcaaagactctccccggttaaaaattcaaaagcgatctcgttttctgaaatcagtttggatggacacaggataccttcatccttatttttttcataataatcagacatcttcctgatatgtgctactccgtcttttgccaatgctctttttacaaccagtctctgttccccatccttcattatgcaggtttctatctgaaactgttttcttctctcttttgtaatttttgagtaaattttcttcaagatatcacctcacactattttgtaacttctataaagaacgaatttgcaaaaaattcaaattttttttcttttaaaagatttgcatagactctgttttcgttaaaaagcatcattcttgtattatcgaaagtatctaaacctatattaagatcatcttctcgtggaaggtactcatcagaaaaaatctgtacagggaatttataatccggaaacggataataaaattctgctttcccatatccagcatctgtaattattttctttaacgcctctttactaaaagttctcactttactatctgtatcaatataaccttccaaaccatcaaaaaattttccagtatggtcttctctggagcctgcccaatatttcaatccaaatttattttcaatagcaatcagcagttttccatcttctttcaaatatccactgattttttttaaaaaggcttcaaatggatgttcatcatccgtgtaataaccggcatattccaatactccgatcaatgtaatacaatcatacttttctttcaaaacaacatcattgaaatttccaaccataattgtaagattatcgtattctttattacggtttgcattaattaatgatctgcgtttagaaagatctacacttgtcacatgctttgcatttctgcaaagtactccactgatagctccacatcctgccccaatttcaagtacagatgcatcttttttaaaaggataccactccaatatattttgtctgacaggtgaaaaatgatataacactggccaccggtcatcttctgcaagtatcttctctacgtctggttcttccataataagctgtaacagatcattctcgatgtccccgtcactatattgatcctgtccattataaaatgtataatctaacgttacttttccaatctgttctgtcatagaacctcttttctatagttatctacaactattattttttacccaagaatctccttgatatcctttataaaatcaaatacatgctcattttttacatataatggattcgctgtcacatgttctacctgcggtctgtaagctttacagatttcagtcagatgtgttgcaatgttcattggactgatattatccagtgataccatgttatcattgaaatccttaagatctttattcgcataagtattcgtgatcgtctttacatcaaataccgacatctcaagtggcggataacttggatgtggtgaacacatcagtgaaattcctgcgtaagtttcctgcaaagtccgcgcatattcttcaattgtaagctttccaacggagacaagctctttgccgtttccaagcggaattgaacggtgcatctcccctgccgaaagaatctcccattcctcaatatccggctgcatcatcacccattttttcagagccgctactacaaggttaaatgcattacgctccgtacctggacgtccataaacaagaatctgttttttcttatcaacctgtgcaggcatttgctctaacgcttttcttaatccatcatttaagacaggatcaaatgcaaagctatgcgtaaaatggtaatgattttcatcgaagaattctttcaacaacatactgttaaaaattgcaattgttggataatcacttttgtaggtagaatctgcaagcaggtacttcgtagaccaggagtaaaatcctggctcataatcctgaataaaatagagaaaaatatttggtttgattccaaatgtattttcaaatccaacataagcatcctgacaacaatacgctgtccaccagccagtaaataagaaatagtcattctctgacactggaatactgcggttaaaacgattgctgtatggaataatctgttttgcaacgagagaatcatcttctgcttttacaaatgtatactcatcggaatattttttaatggctgctttgtctggctctgcgtctactaaaataatacgtgcatcatagcctaatgctttcactaaagtatcgaaaaacttcagtgcagttgagattccaccaaagacatgctctgcattgatagacggaaccagaaggttcattctgcggttcggatattctatcttacggaaagtgtatggtgtaatttcatatacattcgtatccaattgtggaagtccggtttctctttttctcttcagaagcattttttcctcctgctctttgacagtctgctgcaccgcggcacaaattttgggctgacaacaataataatcaagatttctattataatatggatctccgtttttccggtaggtcttatacatctgatccgacaaatcaaagtcaatctgtgggattttacttgcatccctgctcttagattcataatgatacagacgaacatttggatcgtagatattcacgagtccatgctggtttgcacgaagtgcaagttcaatatcgcttccacatacaatgaatttctcatcaaatccaccgattttctcaattgtcgccttcgaaactgcaagacaggctcccgttaccgccgaaacatttcttgttaccatcggtgacacaaatggcgatccatagtgctgcggtttcattcccttgaatacatgatcagcccagccacccattccaataactactcctgcatgctggatcgtattatcttcatataaaagcaatccaccgacaacaccaacatcttttcgtatagctttctctaccagtcttgtaagccattccggttcaataacttctacatcattattcaaacatacatagacatctccggttgcgaacttcattccataattattaagccttgaccagttaaactcaaacgccgcatctttcacgatgacattgtcatgttcttcttccaccttcttcagataactaaaagtctcttccttctcagaattgttatttaaaataataatttcaaaatttttataagttgtcttcgcataaatactgtcaattgcagcctttaacaaatctgcatgatctttaatcggaataataatggaaaccttcggttcctcattcatgtgatatctcacatcatagacaaacaaattctctgtctcatttgcagtcgctgctcctttgccataaacacggtctaaatgttcctgaatcgcattaagtcctgctgtctgtgcatatggctttgactccgggttggctgctgtggagctcggaagatctctccaatgataaagtatctcagggacatgtccaatcttgtccgtcatctctgtcattcgaagtaacagatcataatcctggcttccgttgaactcaccgcgaaatccacccactttttcaaataaggacttcttgaatccaatcaaatgtcctaaatacatctggctcaggaaaagatctggagaccagtcaggtttacataatggatctctcgtttttcctttcgcatcaataatatccatatcgctgtatatgatatcagaaccttctttttttatcttctgataaaattcatgtaatgcagacggtgcaagctcatcatcattatccataagaaggatatactctccggatgcaagcgctgctgccgcattggttgctcctgaaatcccctgatttttttctaataatttaattttaatccggctatttttcattgcagataagtgctctcttacctcctgctttgtagaacagtcatctgcaatgcaaatctcccagtttttgtaattctgcttttctatagattcaatcgccttatcaagccacttaatttctacattatatacaggcattacaatggaaaaaagaatctctccaccataattttttaatttttctttcttcactctgccgtatccaggttcataatttacactggcagataaacgctgtttaaagatttccggtccctgattttttaaaacttttaatcctttttttattttctgaggatttcttactccctcttttataattgctgcaagcttctgtgttcttcccataatgctcctttttatatacagcgattcctgtcatcgctgattttactcgctgttcaccttcctatagcctactcttcattacaacttactatggagttcaaatcgaaatacccaacagttactttcttagataatacctgtatgcaacacacatcatataatctatgatgcacttccaattcgtctccattatatccagtacagcctaactgtagcagatactgtcctttttgaaatggcaatttttgtctgaatgatactgtaagtgtcgtccctgcctctatcagtccaggctctaacccttcaataagtgaattggttccggtaagatctgttccctttaaatcccggattgtaaatgcaaaaattggatttagcacatcctcatgaaactgtacctttaatttcaaaacacactcttcgaatttagaaacagtattcgtaatctttcctgttgcatcgaaaattccaaagtcaataatctctgcctttttatcgccatactcctgcttatccggatttaaaatcatggattctttccatgcaactccttctattgctgcatgaccgtcttctttttttgggctgtcttccatctttgattctgccattacccttttgtaaagatcgatcatgtcctttggtttaccctctgcaagctttacccctttattcaaaaggacaactctgtcacagtattttccaatgctccccagatcatggctaacaaaaagaatggtctttcccattttcttaaattcttcaaatttgtgataacatttcgtctgaaaaaatacatccccaaccgaaagtgcttcatcgacaataaggatttccggctcaatattgattgcaactgcaaatgcaagacgtacaaacataccgctggaatatgttttgaccggctgatttacaaaatcaccaatatccgcaaaatctaaaatatcctgcagcttttcatctatctcttctttggtaaaaccaatcatggttccattcagataaatattttcaattccggtatattccatattaaatccggcgccaagttctaacaacgcagaaatacgcccatttactttgacttccccatcggttggattcaaaactccagtgatgatctttaaaattgtagattttcctgaaccatttgttccaataatgccaactgtctctccctgaccaacctgaaaagatacatcattcaatgcgtaatgctcttttccaagtggtttttttgaaaatcctaatgcatctttcaagcgatcccggtttctgtcatataatttatatattttttttacatgttctactgaaattgcgatgttatccatgcagttacctttctataacacatctgcaaaatgtggctttaattttttgaatatttttgtcccgattatgaataatacaattgtaagaatccaataataaattgtcatgcctggttgttcccaaaatccagccttattgatcaaagaatccctatatcctgccacaatataatacattggatttaactttaaaattgtaatcagaatcggattcaattccatcccatcaatattccacataattggtgtcatccagacgcctatctgcaaaataatgttaatgatctgtccaagatctttgaaaaatactactattgcagatgttgcatatatcagtcctaataaaagaatcatcatcgcaaaggtataatataacatttgcaatgtatacaaatccggataatacccataacacgcatataaaacaattgtaaatacaataaaaaacaaatgcacaaacaaagccgatatcaatttaataattggtaagatatcaatctggaatactaccttttttaccagatagctatactccatcagcgcatttgttccgccgctcagtacctcctgaaagaaaaaccatggtacaagtcctgctatcagccacaaaacaaaaggtgctgtaattcccgatctgagattaatgccacttgcatgcattcccttttcaaatacaaaccaatataccaatactgttacaatcggctggacaaaagcccagatgattcccagataggatcctgcaaatctggttttaaaatcattctttgacaagtcccatattaattttcgattacttattatttctttcagcatattggcttgttttatttccgttggcatgcttttcctctaactttcattctcttaagctataacttatttacggtttttgacatattctgagattccactccatactttatccttatcagataatgtaagatccgcctcagtcattccttccggcatcggccattccacaccgatctccgggtctttccacaacagtccgccctcatcatttggatgataaaaatctgttaccttataacagaattctgcataatcggacaatacgataaatccatgcgcaaatcccttcggaataaagaactgtttcttattctctgcggataaagtcacaccaaaccatttaccaaatgtctctgacccttcgcgcagatcgactgcaacgtcaaacacctctccatttaccacacgtaccaacttgtcctgtggataattaatctggaaatgcaatcctcttaatacgccttttttggatgcagactgattatcctgtacaaattcgcagtcaattcctgcctctttaaaatcgttgtaattataagtctccataaaatatccacgggcatccccaaatacggccggctcgatcacttttaatcctgcaattccattgcaattgtctgttacttttatttttcccattttccatacttccttttcgaattttttcatttttattcatagatgaaaataaagaatttataatccctctgcgatttccatcagatattttccatagtctgttttcaacaaaggttgtgcaagtttcacaagctgctctttgtcaatgaatccacgcttgtaagcaatttcctcgatacaggagatatataatccctggcgtttctggaatgctgacacgaaatctgccgcagcaagaagcatgtcatgatttcctgtgtctaaccaggcaaatcctcttcccaatgtttcaacatttaaagttccacggttcagatattcattatttacgcttgtgatctctatctcaccccttgcggatggttttacattcttagcaatctcaactacatcattgtcatagaaatagagtcccggtactgcatagtttgacttcggattttccggtttttcctcgatggacagtgcttttccattctcatcaaattctacaaccccatattctctcggatctcttacataatagccaaaaatggttgcaccggcttcattctctgtacgctctgctgcactccgaagaacttttgagaaactctgtccgtaaaaaatattgtctcctaataccaatgccactgcatcttttccaataaatttttcgccgataataaatgcatcagcaagtcctcttggctgttcctgtaccgcatactcaaatctcattccaagctgtgatccatcccctaataactcctcaaacaccggcagatcccttggtgtagaaataatcagtacttctctgattccagcaagcattaaagttgataaaggatagtaaatcattggtttatcataaaccggcatgatctgctttgaaattgcttttgtcaatggatataaacgtgttccggatcctccggctaaaataattcctttcattcttcatcctcctgaaaaaaattcaatttatcactttttggtaaaacgcaaacaagcagtatcatccgacctacggacggtactgctatttgtgctattattattttccctgatacatatcttcataatatttctgataatcaccactggtaacgttgttcatccagtcttcatgttctaaataccaggcgatggtcttcttaattccatccttgaacatcgtctccggttcccagcctatctcagcttttatcttgtcaggtgcgattgcatatctgcgatcgtgtcccttgcgatcctctacatatgtgatcaaatccttgcttacatttgcttttcttggatcagtatcaggaagaatttcctgtagagtctcaatgataatattgataatctcaatattacgcttttcattatgtccgccaatattgtaagactcaccaagctttccatgttcctgaaccatgtcgattccctttgcatgatcatctacatataaccagtcacggatattcaatccatctccgtacaccggtaatttctttccgtgcaaagcattgttgataattaatggaatcaacttctccgggaactgatatggtccataattattggatgtattcgtcacattagctggaaaatgatacgtatcaatataagccttcactaacatatcagaagacgctttactagcggaatatggactgtgtggctgatatggagttgtctcataaaaatagctttttccatcatcaggaagtgaaccatatacttcatctgtcgatacatgaagaaactttttaccagttttaaaactgccatctggcagctcccatgctttttttgcacaattaagcataactgctgttccaagaacatttgtcttgacaaaaacttccggatttttaatacttctgtcaacatgactttctgccgcgaaatgcacaacacggtcaatatcattttcttcaaaaatcttcatgatagcatccttgtccgtgatgtccgctttaatgaaagtgtaattatctctattttcaatatcttttaaattctccagattacctgcatatgtcaatgcatctacattgataattctgatttcattatcatatttgcgaaacatataatgaatgtagttcgatccaataaatccagctcctccagttaccaaataagttctcattccgagatcctcctatcatcacaattatttgccattttaccatattttatatactaagacaagttttacacatcttaggattttattaactatttcagctctgccatataaacatccaatgcgtctttccagtcagccatctgataaccatccgctaatctcatcatataattatccagaatagaatatgccggacggtcagccgctgccggattcatctgtttatactgcttacttgttacatgatttacctttgtgctttttcctgctcttttgaaaatttcctctgtaaagtccgcccagtttgtatctccctcgcaggtagcatgatacagaccataattttccgttccctcaaaatgatggattgcctttgcaagctctactgcacttgttggcgatccaagctgatcgcagacaacactcacttcatcatgagtctccgaaaggttcagcatagtttttacaaagttttttccatctccatataaccaggctgtacgaaaaataaagaaatggtttgaaaactgttgaacaaacttctccccctcgagttttgttttaccataagcactcaccggattcggtgcatcaaattcagtatatggttttgtaccatttccctcaaaaacataatcagttgaaacatgaatcatctttgcgccaactgcctctgctgcaatgcttaagtttcttggacccaaagcattgatacgataggctgcatcccactgcttctcacatgcatcaacatttgtatgggccgcacaattaatgatcacttctggctgttctgcacgtacaagtgataatacctgctcaatttttgtaatgtcaagtgctgtcacaccttccccttccgctacatctgtattaataaatgtcacatcacttcctgcatattccttattgattgcacgaccaagctgtccattacatcctgttactaaaatctttttactcattctcttcattccctctttctttttataaaattttccatcttttatcgcacttcagttttcttcttcctgtcctttacgacacaggatgttattattaaaaatactataaatactactccaaacgaaagggtacaactcagtgccgctcccagcattccaagactctttacgaaacccgatcccagaaatactgcaaatataagtccggctccatatcccagcaataaaaaaatctgttttcccgtaactgttaccacataatagagacaatatacataggcattcagtcctccgcatatcataatgatcaccaattccattcgatatgccctcagatcaactccatacacaagagataatattggtattcccaaaagatacgcacccacacatgctgcaatcgtaagtgcaccaattaaaatcatcatttttttcacaatgtccgtaaactcttttatattttccccttcccaatctttggcaagatctgtaagaagtggccggaatacaaaaaggcttaataaattgatcacaaatgcaggcataaataaaatattatagctgttctgaactgtctcatcgtaatatgtgttaatcgcatatttgggtgcattgttcagataattcataataaaagatgacacaaacaatggccagcatgcattataaatacctaaaatccctctccattcaagatgcaccggtgttggttcaaagtattttttcatatgtaaatcataaaacagcataataaccagtgacgttaatgtaagtgtcatagccgcatataacaggttgtctgttaaccataatataattgtgaatgtaatcgttgaaattccgctccgcattaacatctcttttccggaaatatcaatgcgttctctctgttggaatagtccactatatacatctgccacagcctctaccattcgataccccagaatccaaaacacggtaagtgcttctactccagtataaccatttacaacaatatagcctatcatgcagatcagcataataatacaatttaacattctgctggtaaaatattgattaaatgtaaatttattttttatatccgtcgactgaactggtctgatttcaaatccaccgacagaaaacaaaagctgcgctgtagaatacgccaatgcaaaaaatccacccctgctctctccgctaatccggttaacgataatcaacagaagcatagaggaaagtgaattgcaaagacttccagccatattccacataaatttcttctttgctgttgtttccttcatttatttctgttcccttttttctttctcatcaattgcaatcttctgtactaattcttttactttattgtccaatttagaaatgtccatagtgagttgaaaacatttgacaagtaatataaatataatcaaaagaaatatgaaattagttgtggaatatacgcctaccaactctgacatccaatctgcaatctgtggaaaaatactaaacaaaacgagcattatcgcaaacaatgtccaaaaaatagaatactctatctgtaatttttcctgttttacttttttgcacatataaagcaatgtaaaaacagatacgataatcaatgtaattcgaaatgctatcgacattcttttctcctttatcctgtctattttgtaaaatccactttctttttattgcgaaagttctgtattaataatatagatatcaacattctggccatatattttgcagcattgacggcattaagataactttgtccggcaattctttcatccatctttgcctgtatttctgccacttttgctcccattttaatcaaatacgatacggtatccggttccggtccaaaatttatgttgtttgccaatacttctattaattttttattatacatacgcattccagatgtcggatccatgatttttgcacctgaagtaagtctgatcgcagtggtgatcaatctgcttccaatcatccttgctgtagccggtttcttttcttcaacaaatctggatgcgatcacaatatcatttccttcttctattttccggatcattgctgcaatatattccggtctgtgctgtccatctgcatcaaactgtactgcgcaatcatatcccttttgatatgcatatttcataccagtctgaaatccacctgcaagtcctaaatttaccggaagatctataatattgtaatgatttaaatggcatatctcagatgttttatccattgatccatcattaatcaccacataatcatactctggataattttctgtcaaatgcttcaccacacgttctatattgtcttgttcgttgtatgccggaatgatgatcaatactttcattctttctccccattcatgtcttttgcaatctgcataaccttttcagcagtggcatcccacgtgaaatattttactaatctatcataacttttacattctgcctgtgttcggtatgcatcatcttctattactttttccaaatttttctgaattgattcaactgtattatctctcatgataattccatactgttcatctatgagcaactctttcgctccacctcgataagttgttatcacaaaacacttacatgccacagcctccaatacggaagttggaaagccttccgaatctgatggcaggcaaaatatatctgacgcatccaaaattttaacaatatgttcaaagtcaatttgtcccgtcaatatggtatattgatctgacatttctaacaattcctgatataacgggccatcccctgcaatcattaaataaaccggtatctgtccgttttttatcctgcttatatttatcttctttactgctgatacaagctgtttaatccctttttccggaattaatctgccagtaaaagaaatcacttttgctccactcggaattccatattccttccgataatcaatgtcggactcttttagaattctctgaaattcttcgatttctactgcattatatagtgttccctttgattttatatggaaatgcccgctccactcacaacaggcttctgaaacaccataataatcattacaatattttttcaacaaaaatgtaaggaaatgttcataccatccccccactgtgtcaaacaacttattatttacactcaggtgagatgttccatgctctattacaatggatggaattcccttactttttgcaaattttgctccgtataatgaatgcaaatagaatctcgtattaataatcacaagatcatactgattcctctcgatcagtttttttacttttttaaattctttgtttcttttgaacaccggatatcttccgcctaataaatcgtaacatggcagacgataaatctggattccttcttgtatttcatctcctgataaatcacccgtatttgatgttactatagtaacttcgtttcctgcagcgatcaattttctgctcaaatacaaagtataacgttctacaccaccaacatgcggataatactgtgcagaaaaaatgcaataatgttttgacatttttttcacctgttcaattgctctaatgtattttttcattatgaataataaacttttttaatatataacattaaaattcttgatgtcaatccaaatcctaatatacgatataccctatgaaccagacgaactgccgggtttatatcataagttaacagatatgcatattttttcattatctcacgatcatttttaatttgctcattctgttctatcaagtatgcctgtcccatccagactgcaaacggatacgctaaatacgcataaaaaactttccgatattcttgatccaaatatttttctgcatattgggtatattctattataatatttttcagatcattcaccatataatatttcatcttctgacttgtctgagctgtttcatggcctttgcgatacacataaaatggtttatcataccattcaaaccgttctgcgtaaatcagcattctggcaatccagtctgtatcttcattgcggattccctttttaaaatacagatcatgttcccgtatcaaagaggtttttacaagttttgtccaaactgtaacgctaagcattccagcttttatcagattttccactgcctcttttcttttctttctcgatacaagtgtgcgatcaaaagaagacggttttacagttctatttttatcctgccaatacaccatgtttgcgtgcatcacaacatccggttctgtctcacttatcacttttatgatatcacacaacgcatctggatcactccaataatcatcattgtccataaatgtgatgtaatcaccactggctttctccaatccgacgtttcttgcatctgatgttccaccgttctgtttgtgaatcgtaacaattctatcatcttttttggcatattcatcacatatcatcggactatcatccgtagatccatcatctactaacaaaatttcgaaattgtgatacgtctgcgccaatatgctttccacacattgtttcaaatataaagttgagttgtataccggtataataatgcttattttcatatcttacttaatatctttttcttttaatttttgaaaaaatatcccttactctcccaatccatcctcaatcgcttccacgatcgcttttaaagcctcttcctcgtcttcgccctcgcatatgagttcaatctcatctccggacttgatacatgcgcctaacacgcttaagacactttttgcgtttgcgatattatcgcggtagcggaacgtgatatgtgatttaaactgcattgcatccttacataaaattcccgcaggtctcaaatgcagtcctgttggattttttattactactttctgactaaccatgctgtattaccctccaaattccagtcccctgattttttatccgtatgccggtctgaatcaccatgttataatcagaccagcattttggtattctataacataatttttgtgatcaattccgccagtttccttgcttcttcatcgatcactttctgatctttcccctcgatcatgacacgcaccagcggctctgttccggatgggcggatgagaacccttccctcgcccttgaattttttctcaacatctgccacggcatctgcaatttcctgatattccatgaatttttcttttttatggtttggaacttttgcgttgacaagagcctgtgggagtacttccataatctccgcaagttctgacaatggctttccggtattgaccataacttctaataaatgcagggcacttaataatccgtcaccggttgtattatcgtctaagaagatcacgtggccggactgttctcctccgatgttatagccattttttctcatattctcaagaacataacggtcaccgacttttgtcttttccacatggatgccctctttctgtcccataagggtaaatccaaggtttgtcataaccgtaactacaatggtatctttcttcaaagttcctttggacttcatgtagttgccacagattgccatgatctgatcaccgtccacaacatttccatgctcatccactgcaagcatacggtctgcgtcaccgtcaaatgcaagaccaactgctgccttttcatatacaacacgcgctttcagctcatccatatgagtggagccacaattggaattgatgttggttccatccggatcagtatggattgcgataagatctgctccaagatctgtcagtgctttgacagatgtataatgggatgcgccttctgcgcagtctacaacaattttcatacctttaagatccaccggaacacatttttccatgaatttcacgtattcatctctcaggtcaaagcggtaatcaatctttcctacgccagaaccgatcggaagtaccacgtctttcatgttatttttgatcagagcctcaatctcatcttccatctcatccggaagcttgtagccctctccattgaagaacttgatcccattaaattccattggattgtgtgatgcggagatgactactccggcatctactttgtgttttctggtgagatatgcgatcgcaggtgtcggcatcactccgacaaatattgcatttgcgccaaccgaacagatacctgccattaatgcgctcgctaacattcctcctgaaattctcgtatcacatcctacaataatggttgcctgatgctcctgctcttttgtgagcacgtaagctcctgcctgacctaactttgttgccagttcaattgtcagttccgagcccgccacaccacggacaccgtctgttccaaacattcttgccatgttactattcctctctttgttcctatttcaaattttttaaatctgctaacgttcacttgttttccttaccgttgaggtactctccagttcctcatctgtattatcagcagaagctgatgtatcagatgcgctttcaatggtaaccgcggcataggtatccgcatagctgaccgtatttgtatccaattcaaatgtaatcagtacattatgtgcacccagctttaaatctgtcagatcgatactgccggaaatcgtcttttcgtccagcgcatcgatcacactgcttcttcctgacactgtcaaggcaatgttgtcttcctcatactgtactttttcatccgaactcagtccgatcacctgaagattcgtcaccgggatctgcaaagtctttgtctttactgcctccaccacaactgtaacatcaatcttggagtctgaactgatcactaatgcagtgcctgaaggaagatatgtggaaatgtccacagtcttttcaatatttgaagttgcatctgtaatatctaacacttcttccgggatcgtgatcttattgatggtatttaaaatagccgcctcgcctttaatacgtactttctgtggtgtataggtgatattccctgcctggtatccatctgccggagttccggttgtcaggaattccagttccacatctttcgtattcagtatctgtgcactgatattgactgtgctcacactcagcgtaagctttgtcgtatccacaacctctccctgtgcatcataaaatacaggtgtcacacggtctgtgatatccgttgacatgccatctacattaatagtcgccacaacggtatcgatctgatttaccacagaagccggaccggatactttcataacattcgcatctgtgatctcaacatcaccaagcgcgcatcccgacgcaaccgtaccggttgtgtttgtcttgatcgggaactgctttgaagcagaatcctccagttcaagatccagatacagatctttgctggtaatattaatactgctgttgttacggttacaggtcacgacaaccggcacacggtaagtccctgttttctcatcatattcaattttctgtgcatccgccgttgctgtaaagttcgcattggtaagtgtattatgcacagagcgttttgcatacacgctgaacgtgatcgtattctttccatccagataatctgcccattttcccatggaggtgatataagatttattttccagtgagacactggttgtgtaaggttttgagttgctcggatcatcaatattcacgactacgatccataaaacaacagcaaacaaaacagcaaggattttaaggccaaagttattcattactctctttccgaatttttgtaacatctttcagcctccttctccatgatttcactttcgaagtgtcctgctcacgtttctgaatgtaagccagtttattttttaagaattctgcatctacattccggtaaagttcaccgtccagtgcaatggatacttttccggtttcctccgatactacaattgtgagtgaatcgctcacctcactgataccgactgccgcacggtgtcttgttccaaggtctttgctcaggcttaaggagtccgtcagtggaagatagcaggtggcagaaacaactctgtctcccctcacaatgactgctccatcatgcagcggtgtgtttttttcaaaaatattgatcagaagctggctggtcaggataccatctacggcaatccctgtcctctcatactccgtcagaacgatttcatcttccactacgatgagtgctcctgtttttacttttcccatctcatagcaggctttcaccagctctgtgatagtcttgtcggaaaactttccattctccactttgttgaaatcaaaattaaaaagatttaccaaaatgttcttccgtccgagattttccagtgccttgcgcatctccggctggaagatcacgaccacagcgatcattgccacgttaaacagtttgtcggcgatccagacgatcgtattcatttcaaacaaaactgcaagcaaaacaaaggcaaggatcacaaggattccacggagaagcatccacgctctcgtatctttgatccaaaccagcatataatagatcagaactgaaatgataatgatctctataatatctgtgagggacatctgaagcgtcaggtaagacaccgctttttcccaaaacgtccgcaatattacgcctaaattctgcaccggattcacttccttttaatctaataaattttcgtctatgtccatctcttctgcaaatttcttcttgttcaaacgttccttctcgtttttgccgttaaaacgtttgatctgtttatccttctctgtcaccagagactttggaactgcttttacataataatagtaatcatcatcctcgaactggagtcgttccgttctggagtaatccagattaaaaaacagaaactggatgatcatggcgatcacaccggagatcacgcttccaatgatcacaccggcaattttgtctgaaatcccaagtaaaatgtatcctgctgtcagtccaatcgcttcaaataaaataccggatgcccatgcaaccgtccatgaatgctcaatgtcaagctttctcaccacatagacaatgagtgtcgtaatgataaaaatgccaagaacaaggtacatctctttatttccaatcagctggttcaatgccactactacttttgataccgaagaatccgtctcttccgctgcatcgctcaatgcgcttgcattctcgctcactccatggataaagaaatagatcacagtaccgcaggcaacagacactacagaatacgcctcactcagcagaccggagccaaccggtaccgcataaggaatatgcagcttaaagcagaccggtgtcagaaccgcattgataccactctttggggaaaaacggaaataaataaaatagatgatcgcaaacatgagaagtcctaccagacatacctcaatggataatgcgtacagatccgccaaaacgaccaacgcagcaattgcgatcagtccattgaccggaagcatggaacacacaagtgcaagaatgactgcaaccggagtcttgctgaccagtttcatatatccaatactgttgttgatcacaaggaatgtaaacaatgcaagtacaaaccggatcgccggtttcacatatatttcattttttccgtaaaaacggatcagtttctctttcaattctaataaggttgtcattttagcctcccgccgtttgttttactcctgattttcctgccccccggcagcgttcagtgattattcccagtctttattctcagacattttcagcttgtcttccctctcgtataactgattcagcttcttcagattgccataatacttctttacctcacggcgtccctttgtatatcttctattataaacaaaatacgtgatcgccatgtaagcaatcataaacacaatatactttaccagcacggatgtcagcagttcctgaatatccattgcattcagattctccattaactggttcatggaataaatgccccatgtcacaaggatcagcgcaaagccaatcgttcctgacacaaagcttccaagcatacgcagcgaaacataatcttttcttgcatactgtgtcatcggcttacattcttttccctgatcggtgtcaaatatcgccatttttatcatatgatgtaaacgttcttcgttaaccatgcagatttccttcctgtctgtcacacaatgtatctactataaaataaacccatctcattttctgaaaaagtacattcttcacgcaattatgcattcttattcatcattataacacagtaggcggtattttcaaacaaaaaaaagcagatgcgacctttctacgtttctatctatataaataacgtagctatgcgccctgcttttttataaattctgtccttattttcagatatgtgacattctgttcccggttctatctcaggaatctcatcttatccccttcatcacgctctccgcccgatctctgctgcattggacgtggtctgttcaaagcactctgcagattatttgccatagcagctttacacttgtcacagaagcgtccgcttgtgatcggtctgccacagtgttcacacaacacaccatctaaagaagcttccgagaggatcagtctctcctctttcacccactgtttgatctgtttcacagaaacatccatatcctctgccacctgactgatggatgcctgtggatgttcaccgatataatctttcacgctgctaaatttcttctcaagctttgccctgcattcagggcaaagctgtgcgccactcatataattaaagagttttccacagcccttacaatttcttacatccatagcatattcctcctaaaatccctcgccgatactgatacataggaaataaatctcatccacccctgcctgcaaaagtacctctgccactgcatcgatcgtgcttcccgtcgtatagatatcatctacaattaatattttcctatattttactatatttggtactaactggaaagctttttttagatttatcttccgttcgacatcatttaattctttttgcggcgtggtattccggattcgttttaccatgcgcttttccaccggaagattcattttttctcccagagtctgtgcaaatacggctgcctgattataccctctccccttttctttccaacggtacatgggaacgggtacaattgcttcgatctgttttctccggatccagtctccatagatgcgcactgcttctttcgcataaaaatctgcatattcgcgtttattactatatttaaaacggtacatggactggcggatttctccctgataaacaaaaaccgcttttccctgggaaaaatagtgttttttcctcatgcagtctgtgcagtattccctcctctggtcttctaatggcttgccacattttttgcaggacggttccccgatacagatcactttcttccggcagtcttcacaggtatctttcccaacatatatcacctcatcacagacagggcatcttggaggaaatacaatgttggataacccctcttttattttcataaaatcctttctaaaaatctctccggtttccatcctaacacttttctgccctgcatactataaaggttttcttaagattttaaatctttttctcatgattctcacaaaaaaaggagtgtcatttacacattttttctcaaattccggttgacgaatcctgtatgagtgattataattcaatcattaaaagcattaatgctttaaagcattaaaggctatgatcaatgataaggagaatgaatatgaaaaagatgaacaaaatactctctgtcatgatggcagctgcaatgacagtttccatgacagcatgcggcggcgatacagcctccgacaatacctctgctgctgctgataattcagcagcagcaacagaatccgctgcagcaggcagtaccgatggtcagaaatatacgatcggtattttacagcagttagagcaccctgctcttgacgctgcttcccagggctttgaggacgcactgacagagctgctcggtgcagataatgtaacatttgaccttcagaacgcacagggcgagcaggcaaactgtgctaccattgcaaacaattttgttgccggcaactatgacctgatccttgcaaacgcaaccactgctttacagtgttctgccgctgctacaagcacgatcccgatccttggaacttctgtcacagattatgcaactgcccttgagatcgacgactggacaggttctaccggaagaaatatctccggaacttctgatcttgctcctttagatgagcaggaagccatgatcaaagaattattcccggatgtaaaaacagtcggtatcctttactgttccgcagagccaaactccaagtatcaggctacccagatcgaggctgctttagatgctgacggcatcgcgtacaaagaatatactgcttctgattccaatgatatcacctctgtggtacagacagcagtttccgaagtagatgttatttatattccaacagacaacacaatggcaaacaacacggaaaccatcaataacatcgctcttccggcaggtattccgatcattgccggtgaggaaggcatctgttccggatgtggtgttgcaacgctttctatcagctactatgatatcggatacacagcaggccagatggcttatgatatccttgtaaacggtgctgatatcacaacgatggagatcaaaactgcaccacaggtaacaaaagaatacaatgcagatatttgttcccagcttggaatcacacctcctgatgattatgttgcaattgaaacagaataatctttcatcagtgcaacaagttaaagctttaaatcgttttagtattatgttataatatgcctgcggtattttgcttctacaaataccgcaggtattttatgctgtgggtattttgttctgcaagcaattgatttcatgaatattgttttatatttgtagatgatttttgcaccaaatagttccgcacaggcattttataaaaaaataaggagagatttcttatgacgatgatgttaacaacttatttagcttccctgagcccgctggcattgctccgttccctgccgggcgcatgcgcacagggactcatctggggactccttgcacttggggtctacattacttacaaattattggattttgccgatctgaccgtcgacggttccatggcgaccggaggtgcagtcgccgttatgctgatccgcgcaggcatgaacccatggcttgctcttatctttgcttttcttgcaggaatggccgccggatttatcaccggaatgttacataccgcactcggaatcccgggaatccttgcaagtatcctgacgcagatttcactttactctatcaacttaaatattctcggaagttccaatcaggcagtcagcgttgacaaatacagccttgttgtgtcactccgttatatttcggactcaaccgcaagcaaaatccgtatgtttacgacctgtatcctcttctgcgttgtactcgttgccattctctactggtatttcggaacagagcagggacatgcgatccgtgcaaccggctgtaaccagcagatggcaagagcgcagggaatcaacactgattttcataccgtacttgcactgatgatctctaacggtcttgtaggactttccggtggactttacgcccagtatcagggagcagcggatgtcaatatgggacgtggtgcgatcgttatcggacttgctgctgttatcattggcgatgtcctctttggaaaaatgtgtgccggcaaaaaaattgcttttgcttacacactgctctccgtcattgccggagctatcctgtactaccttgttttaagtgttgttttatggttgaaattcccatccgacgacctgaaattattctctgcaattgtagtagctatcttcctttcaatcccgtatctgaaagcgaaatatagcaggaaaggagtggcaaaataatggctgaaatgttaaaaatcgatcatatctgcaaaacatttaacgctggtacgatcaatgaaaaaattgctttaaacggagttgatctgacattagaagatggcgattttgtcactgttatcggtggtaacggtgctggaaaatccacaactttaaacgctgtcgcaggtgtctggccagtggattccggtaaaatttttattggcggtgatgatgtcacaaaattatccgaatacaagcgtgccaaatatttaggccgtgtcttccaggatcctatgaccggaactgcaaccaccatgtccatcgaggaaaatatggcaattgcagcccgccgtggcagaaaacgtgggttaagctggggaatcacgaaggcagaacgcgacacctaccgggaaatgttaaaaacattggatttaggtcttgaagatcgtctcaccagcaaagtcggactactttccggcggacagcgtcaggcaatcacactgttgatggcttccatccagaaaccaaaacttttactgttagatgaacacaccgctgcccttgatccgaaaacggctgcaaaagtacttgagatttccgacaagatcatctccgacaatcatctgaccgctatgatggtaacacacaatatgaaggatgctattgtg

SEQ ID NO: 397 - DNA, 24376 bp, unidentified
  source 1..24376: mol_type = unassigned DNA
atgatttcctttggctgaaggtctgcactctctaccttcagctttccaagtgctgcggtgctaaccgttgccagttcttccatttcgcctgctgcataatcctctgcatcttccttatccagtccattttcttctgccagcacaatgagggatgctacatctccctcttctttcaagcctgctgctactttgttcaattcttctgctgattccaattcgccaaatttttcaaacataatacttacttcctccttctgatttttctcggcacacagaatatgtgcgatttttaaaaaaataaaattcaaattattccgctacatgatttcggcatatctcctttctcataccatcatcttttaaaatttcatctaagcaggtattccagccaatcttatacgatggtgtaattccatcaggctgcggatatcttccgcaaactttcattttctctggaagttcccgaagtggacaccaatccggctttgcttcttcactatttaatgaaagctcttcacttccagttgcatagcactcatcatcgtctgtgttccagaatttacacatggtgcaatcatctggcatatccataagaaatattgctttagacatctacttcacctaccttcccatcctgtccggagaattgcgccatgctctttcagtttctaactcttcaatctttgttcgaagttctttgttttttactttcagttttttgttttccgacaaaatcctttgcaattcacaagtatttttgtactcacatttttcagtaatcgaatactccgtacacattttgcataattctgtacttgtcactctactccacctcccttcataagctctattgcacgactcataatttcattcgggtcatcatttacccttctgttccactgttcaattgcttcttcttctgtttctctccatctttctaccattccgctgcaaactgaacattctgccaaccactcattttttgaataattcaacatctgtgcttttgctccacagaacgggcatggcttaagctcttcttttacttctgccatcactttctcctttctccggagcatggtgtatatgtgtggtcttttgtacctcttccaaaaaacgctccgcattctgtgtttatgcggtttccatgctccggctgtgacagattttcaagttacttcgtgtatatgtaagttaatcttggaggtctaaacttctgccgcccgctggacggttgttttgcggtttattttaatgtttccttttgcagtctcgctgaccatcatcttgagttcactagttacctcaacagttaccttttctgcaattccatccaccacatagcctgctgcctgatgaagcatctgcatccttgcatctgtaatctccggtttatttcctggtccgaaaagctcttctattctgcaatctgccttttctttccggtacaatcttgatgtataattctgtgcttcataacaattgcactgctctgtggccagttcgttcagttcgtcctcgttgaattcatccagtgcctctacgagctttatctgaccgcaaaatttgcaggctccatttttttctacagccctgtccttgttttctttcaccaaatttttcagcatcttcatactcctttcttgtataccaacttctcccggttccaatccgggtacagctctttcaggtaacattctgcaaattcaagcatttcagttcttaatcccttgttgccattgtccagcaactgatggtgactcctgcaggcggtgactccgttctgctccactccgagtccaccctggctccggttcactacatgggcgatatcccggatgtgcgccccgaagtccttctttacaagtggccatctgccactggcacaaaatatacaggtgtctccgtctctgctgatgattcttgcaattgtgcccttatcaaaggtgcacgcttttgttcttctgctcttgctcataatgtttcattctcctgtcctgccaattggaatacttagtgtgctccgcatagaaaatatttatattgtgtggtgcaagcagctctgccgcccgctgccataaaacactgtgtttcaccggctctccattctgcttcctgaagtctgccgctatccagtcatccaagaaccggttcacaccggattccagatatttactgtctgtgaatatctcaaggtcagacgctcttctcatatgctccatggcttttatcagcccaagcaaggctatctgattggctgtgcctgtgtctttcccggtctcttccagtgtcttctctccttcactggtatctgcttccaggatgccacagtaacacccttccgctttccggaggccatggtatgaggttcttaagtaaatccttgcttccatcttcaaattctcctatccagtttctcctcggtatatcgcatataggaatacccggtataccggtttgtgccgctccggatgctctccgggacgatataatatcccggtgtcggtttcggaccgtatagcagcagttttctcattgtccaccgccggtatctcttcctctccggttttggccggattaaattccggctggttgaatagctgtactcctctttggtcagcttccgggggagacctttcttctttctctcttcctcatccggcaccttcgccatatactgggcgagctgttcaaatccaccctcttcatagaggtttgagaaaaagattcttccatgttgccagcattccttgattaagacatccgtatctgctcctctgattctgttcaggatcatgtgaatatgtattccgcctctggatccgatttcaattactctcatccatttcagttctgttccgagcttccggtaacgtcttgccaactttctcaatacgttgttgaggtcttcttttactccctgcatatccttcctctctcccttccggtatgtgaaggtcagccagaagtcattttccacgaagttcgcttttatcgttcgccggattctgtttttcttattaatctgattctgcaattctatctgccagggggaaggtctctctcttgcggctctcttctctcccttggctccgtaatttccttcccacttaaactcatactcaatcgagctggggaaactgtaaatgtcaacacaatatgccatagcctttgtccttatctttaatattcctaatcgagttgcgaaacaggtctgaaatgccctgtttccttgcatttttgcggcttttatggtatattgtttatgcgggaagtttgcaattcgccaaattacttacagcccacttgaggacgtgcgccacacgttctctttttttatctatcctgcagcatccaccacctgaatgtagacataatctccgtacatttttacccattcgtaacaaccctccagtgtgtctctgtatacatcaatgcttgtcccgttccggatagtctctccccttccgtctccgtccaggtcgattccatcaccggtgtcggtgaaatcgaaatatccgataaagtcaccgattccgccatcttctgccacagcgtacatgatgattgcttttcccagccattcttccttaccggctacggacaatccctctaccggccagctaccattccggcactggttgccagtccatgtgtagcaggtgcaccggatgaggaacggttcaccgagcggattctcctgctcctgcggttgcaccggtgcaacttccatctctccgactgcgttcatggtcttttcggtgaagctattcacttctccagatacttcctgtggtgatgtcatccacatggtgaaaaggaaaactgccaccgctattgccattaatgtgattactctgattctgtagcgcatttttttctccttatctcctcactcatttcctgcactgctccaattgcttcccgcaatgccgactccatcaggtggtcatcactgacatcctgctttttaatctctgctactggcattccggatataatcatgtaccagacgcattcatcccgatactggcttatcagttcatctagtctgtccgtaatctccttgtccgtaatttcctttttcttcttctctctccattttccgaaaaacatatctttttcttctcctttctctttctcgcttctggaagcccgagccaaatatgaatgtctccatcgatactatctctccggtctttctgcggtgcctgctgccataccagtacattccagtggaatctctgtagtaatccgtgattcttccagctttttccgtagaacctatgtactctatccggcgattctccgcttcccagctttccatattctcaatgctgtatgccaggctatatgctttcttcagttcttctttgtctatttcaaagaagtctttcatctcttattcccacccagcattttcatattctttttataggcatccagtgcatcccggtaaatataatatgttgtcctcttgcagccctctcttaatactgcatatccaattggaagtctttcttttctcatcaaatactttactgtctcatggtccatgttcagctcttccgctgcctgttttacagttacacgttccagcttttcatattcctttttttcgctttccattttgtcctcctatcgtctccggtgcctgtttctgaatttttcatattctcgtacatcaatcatccatttaccgccgcctgatgttttccatgcgaatttctgccccggaacatgaacatcatttttcatatcccttacagaaaatcccatggatccaagctctgtaatgctcatcactggtttctgatactccatatttttctccttatgctactggcaattctttctttttctcttcccttctcttctctgctgtctgttctgcttttcctaatatgtagcccttgtcaaaatccgataatgtaggcaaaacttccaccaggcgttccattacatttttttctttttcactcatactctcacttcctctctgtttccttgtaaacacacattagcacacttgtaaactgttgtcaatacttttttgttgacttggcaacataatatgttataatcattttgttaggaggtggcgaatatgaatagtcgtgtgcgtgaattacgcgaaaatcttggcaaaagtcaggaagattttgccaaaagccttgatttatctcggaactttatcaatcaagtggaaaatgggaaaaaaaatctctcttcccgttccatcaaggctttatgtacttcatatgatgtgaatgaagaatggcttattaatggcacaggcgaaatgtttattgagaaaacaagtgatgaacagattgcagaaatgcttgcagacatccagctttccggtgaagattcttttaagcaccggttagcttcagcactggcagctttcacagaagatgattggaatgacctagaacggctgcttaacaaattgtctgggaactaaaaaaagaaccaagggtaatgcgcaagcccttggttctttttttagttgactatttttctaacatatgaatatatgcattttataacttttattttatcacatttttttacaagtcttatgatttccttttttatcaggtccttttccataactcaagccccctttctgccatgagtttaccactgcttctccccacagaaaagtgtttcgcttaagaattccgaatatccggaggaattcttaacatttggcctattttttctatctttcgcacaattctattctgtatacaaatctctaatccttacccccattgcttttgctattttttctaaagctctcagtgttggtgatgttcttccgctctcatagtcatacagggtgctttctcctatccccgtcagttctgccaactctggcattgtgatatgtttctcccttctgatttgccagattagtatttccatgtaaatattctatcattgtgcctgctgcacatccactggtaatgtattccatttcattttatcttgacctttcttattttattttctataatttccttaatattatttttatacgaggtattgggttatgaaaaaaagagtctttctttttacatttttagtttttatttctatcttttcactaaatgcttttgctcatccaggaaggacagattcttctggaggtcactacaaccgctctaccggcgagtatcattatcatcatggctaccctgcgcaccagcaccctgatggtgtttgtccttacgatgattctgaatcagatagtaatgatgaatcagtggctgtcgctacatctgattcctattttcgttattggctttttggaggtcttttctatatatttctttttgtggcaatatatatttacaataaaatacaccccctcaatgaaggagattcttatttttcaaaatttgtgtgggttatttttcttattgcctatgttgttttaattgtatccttgtttttttcggttgatttgcaattatttattgaagcactcgttcgcattgacatctgtgcattattccttttgctcattcttccactattgaaattaattcctttttttgataatgaaacctttgtgaatcttgtagaaaaacttttcttcatattcctaattatgttctttgttttactattgccgtttctttgtgtgatgtttatcaatagataacttttttcaattttggaggtgttaatcatgaaattacctaatggctatggcggaattgttaagctctctggcaagcggcgtaaaccctatgctgttcgtgtctcttatcttgaagaacaaccggatggaactataaagcgcaaaagaaaatatctggaatttttcactaaacgagacagtgcacttgcttatctcgcagaatataacaatggttctgttgtttctgagcatcaaaaatatactgatgttccaacctttgcagaaatgtatgagaaatggaaaaaatatcgttgctcattaaaaaataagccaggagctgctacctggaaaaattatgatattgctttttcaatgtacgctccagttcattccaaaaaaattatatctattcgggcgcaagacctccaggactgcattactgctcacaacagtaaatcccgctctacaataggaaatatgcgtgctatcgttcgtggtatgtggaattacgcaattgccaatgaatatactgaaaacgacattacccaacgacttgtttttgaatatacggatccggacactcctgttcatacaagatttactgacgcagagattactcttctttggaattccttaggagtcattaacaatgtagatattattttaatttatatttatactgggctcagaccagcagaattattagaaatcaaatctgaagatgtgcatcttgaagagagatatatggttggcggtatgaaaacagaagccggtcgcaatcgtattatccctatacatgaagctattgttcctttagtggaacgtcgccttgaacagaagcgcccatacctcatcacaaataaatacggtaatatgtatactcgtgctgtttatacagtaagtaactggctcaccgtcatgaataagctcaacctcaaccatgccccgcatgattgtagatatacctttgcgtccctggcggataatgcctgtatgaatgaagctgcaaagaaaattatcatggggcattctatttccaacaaatccggaaccgcatttaaaattggcggctctggtgatgtaacacagaacgtatataccgaaaaaacaattccagaattggtaaaagaagttaataaattacctgtaaattttgtgtaacccacttgtaacccactcgtaacccacttgtaaccctcgaccttgttttatccccctttttctccctctatgagaatattctgacaattaaaaaagccccgaaacgtgaggtttcggggacttcttttctaatattagcaaacgccctgagcgagcatagcctcagctactttttcgaagcctgcgatgttagctcctgccacatagttaccttccatgttgtaacgttttgcagcatcatcaatgttatgatagatatttaccataatctgttttaacttagcatctacttcttcgaatgtccagcttaaacgctctgagttctggctcatctctaatgcagaagttgcaactccacctgcgttagaagctttaccacagatgaaccatactccgttatcctgtaagtatttggttgcatctaaggttgtaggcatgttagcaccttcacaaactgctttacatccatttgctactaactgttttgcatcatcgataagaagctcgttctgtgtagcacatggaagagcgatatcacatttaatctgccatacgccacggccttcatgatattctgcgctctttcttgcagcagcatactcggtaagacgagcacgttttacttcttttacttcttttaataatgcaacatcgattccttccggatcataaatccatccggtagaatcagaacaggtaacaacttttgcacccatctgctgtgctttctggatagcgtagattgcaacgttaccagcaccagatacaacaactgtcttaccttccatagattcaccatggcatttcattaattcttctgtaatgtataaaagaccatatccggtagcttctgtacgagctaaagatccaccataggtaagtcccttacctgtcagaacaccttcgtacattccacggattctcttatactgtccaaacatgtatccgatttctcttgcgcctgttccgatatctcctgccggaacgtcaacgtcagcaccaatatatttgcaaagctcggtcataaagctctggcagaatgccattacttcacggtctgattttcccttaggatcaaagtcagaaccacctttaccaccgccgattggaagtcctgttaaagagtttttaaatacctgctcaaatcctaagaatttgatgattccgatatttacggaaggatggagacgaagacctcccttgtacggtccaatagaattgttgaactgtactctgtatcctgtattaacctgaacctgtcccttgtcatctacccaaggtacacggaatttaagctgtctatccggctcggttattctctcaagtaatgcttctttacgatatttctcctcatttgcttcgattaccggtcttaaagactccagtacttcttctactgcctgaaggaattctggctcagaagcgttttttgcttttactctttctaatacttcatcaacgtagctcatattatatctcctttacatattaatttgagtattatatatacatcaacactactattttagtatgaaatgaattttttcgcaacgtttttttcatatttgtgtcaaaaactttatacttttgtgtactttttcttcttttttgcaagttttgtaccagtaaaattcatttttataattaaaaagaagtagaaaacagttttttatttcccttctccacttctttttttgtataaatatactattttttatttttcaaatatgattcatatttcttctggaagaacttcaccagttttcccagtgttccaatcagaatctcactctcctggtcagtcaggctttccttgatatcatgtatcatattgctgtgaaaacgtgcatgatgctcatatgcccggactccggaatcggtgagtgatacacggaccacccttttatccctgtcatttctgcaacggtttacataacctttctgttccagtgcttcaattgcttttgtcagggttcctgttgtaacattcatcttcgccgccacttccgacatccgctttggttcatccagaccaattgcttcaataatatgcatatcatttccggaaatgttcatgaattctccggagattaagcatttttcctcaatttccatcaaatcattaaacagctttaccagaatgtcatttaaggttttatccgcattcattcttatctccttttaccagaccagtaccgctgcgccccatgtgagtccgccgccgaaaccagccagtacaactttatctcctctatgtatcataccatgccggttgatattatcaagtaaaatcggcacacttgctgccgaaatattgccacattccgtcaaatttaccgggaatttctccatcggctgtttcaatcgttttgctaccgcttcaataattcttaagtttgcctgatgtaatacgaaaagtgaaatttcctctgcctctaaatccgtctcttccagcacctttgtaatggttgccggaactgtgcggacagcaaatttataaacctcctgtccattcatgcttacataacccagcggactttccatcttatgatatggattattgaccggacggttctcacatgccagtaccagtcccttcgcaccgtctgagccctgcaccacatgacagatattttcttcgtctgcccggactaccgctgctcctgcgccatctccaaaaaggacacaggtgctgcggtcattccagtccataattttagaaagtacttctgctccgattaagagtgcatttttaaatctgccactggcaatatatgcctgtgctgtactcaatgcaaataagaatccggaacatgctgcaccaaggtcaaaggctacggcattcactgctccgatttccctctgcacttcacaggaaagtgtcggcacaagatgatccggtgttaccgtcgctgcaatgataagttccacttcttccggcttcatgtctgcatctgcaagtgctttttttgcagcttctgcggcaagtgatgttgttgtctcttccgttgcaaggtgtcttgcttttattcctgttctgctggaaatccattcatcggaagtatccataatctgacttaaatcgtcattggtaatttttctttccggtaacgcacttccagttccacatattcgaatgttcatgctctgctcctttaaaatttacggaaacgttcataacgtgcttttgcaatctcttctccgctttttccttcatatgattctaaaaattcgcggatacatttatgcatataaactgcaatggaactcaatgcctcatcatctgctccaccatactccggtataattttctcgataatgccaagttctaaaagatcctttgctgttatcttcattacttctgctgcttctttggcacgcttgccatccttccagagaatagatgcaaagccttccggagaaagtacggaataagttgcattctccatcatgcagacttcatttccaactgccagtgccaatgcaccgccacttccgccttctcctatcataaaggtaataaccggaactttcaaccctgacatttcataaagatttcttgcaatagcttctccctgtccgccttcctctgcttccataccgcagaatgctccggctgtattaacaaaggtgataaccggacgatggaatttttcggcctgcttcatcaggcggattgctttacggtatccttccggagatggcattccgtaattatgacgcatgcagtccttcatgtcctttcccttctggattccgattaccgtaaccggttgtccgtcaaggtatgcgataccgcccacaattgccgggtcatccctgtaataacggtctccatgaaattctatgaatttggtaaagatactgttgatataatcctctgcggacagacggtctaccttacgtgccatcttaaccttttcccatgcactcttttcttttgtattgtaagcgcgttcccgcatcaactctgtcggtcttccgtctacttcagttgccggatcaaatttggcatatccacttactttatgcatacgaaggatttcatacagacgtttctttaaatctttccgctctacaatggcatccacaaaaccatgctctaactggaactctgctctctggaatccctccggcagtttctgtccgatggtctgctcaattactcttgctccggcaaatccaatcagtgcgccaggctctgctaaaataatatcacctaacatagcaaaacttgctgttacacctccggttgtcgggtcagttaatacggaaatatataaaagtccggcatcggaatgtttctttaaagctgccgctgtctttgccatctgcatcagggatacaataccctcctgcattctggctccgccggaacaacagaaaagaataaccggaagtttttcttccgtagcacgttctactgcccccgcaattttctctccgactgcatggcccatgcttcccatcataaatctggcatcgcacacaccaatgactgcatcttctccgtaaatcttaccttttcctacggttactgcttcttttaatccggttttctcacggactgccgtcagcttatcgacatagcccggaaaatccagcggattcgttccatgctcttcggcaaaccattcttcaaagctctgtgggtctaataccatcttcaggcggtttccggtttttacgcggaaatatgctccacactcataacagacatagcggtttcttactacctctgctttgtttaccattttgccacaggctttacaaagtacttcctctttctttttttcttcctgtaaaataccttctgtggcatcctttacagctctattttccttgattttatccagtaatctgctcactttactcaccacttccaatcgcaaatgtcaactctgctgttgcagctatttttccatctactgttgcagttgcctttccaattccaatcggtccctttacttttatgatttctgtctctaaaacaagtacatcccccggaaccacctttttcttaaattttgcattgctgattcctgcaaaatatgcggtttttcctttgaattcatcctgacagagcattgcaaccgcaccggtctgtgccagtgcttctataattaaaacacccggcattaccggttctcccggaaaatgtcctgcaaaataaggttcatcaaaggtaacacattttttccctactgcacgaagtcccggcaccagttcttcaatcgtgtcaatcagaagaaacggatgacgatgtgggatgatttccataatttctttcgttgtcagtactgacattgttcccttctcctttatgcctgatattttttcagaagcagacttgcattatgtccgccaaagcccagtgaattgctgatggcatatggcacttcttcttcatatgcctctttgcaataattcagattcagttcctcatccggtgtctcataacctacggttgcatgaatgtaaccttcctcgatttcctttacacaggtcaggcactcgatggctcctgctgctccaagaagatgtccaatcatggatttggtggaattaatccggatatcctttgcatgctcaccaaacgccagcttgattgctcttgtctcaaataagtcattatgatgggtgctggttccatgggcattgatataagtaatttcttccggatttacaccggcatccttcattgcatttatcattgcggttgctgcgcctgcaccatcctctgccggagatgtaatatggtatgcatccgaagaacatccatatccggttacttctgcataaatctttgctccacgttttttggcatgttctaattcttccagaattacgattgcggcaccttctcccataacaaatccacttctgtttttatcaaacggaatggatgcatgttttggatcatctgaagaagtaagtgcggttaaagatgtaaatcctgctattccaagcggagtaatgcagctttctgttccacctgctaccatcacttctgcatcaccatactggatggtacggaaggcttcaccaatggcattcgttccggatgcacaggcggtactgatatttaagctctttccttttaatccaaactgaatggatacattccctgctgccatattggaaatcatcatcgggacgaataacggatttactcttcccggtcccttttccaataatttgctatgctctctttcgattgcctgtaaacttccgactccggaactgatggaagtacccacacggtatgcatcctctgcttccatggaaagtccggaatcctccaatgcttctccggctgccgctacggtaaactgacagaatgcttccattctctttgcagagcggaaatccatatattcttttgcatcaaaatcctttacttctgctgcaagatgacatttatagtctgttgcatcaaaatgtgtaatctctccaatacctaccttctgctgctttactgcagaccagaattccggcacattatttccaatcggggtaattgcacccaatcctgttactacaactctacgattcatgttcttatcctctctatctaaacaatccatctctcgtcattcatcatccgctgttctttctagctttttcatcagccagtattatttctgcatctacatagtcattccgccatctacagccagcacctgtcctgtgatataacctgcctcttcggatgctaagaatgcaactgctgccgcaatttcttccggctttccgattcttccaagcggaatgttatgaagcatattttcttttaccgtatccggtaaatcctttgtcatatcggtctcaatcattcccggtgctactacatttgcagtaataccgcgggaggaaagttctctcgcaacacttttagtcaatccgatgactccggctttggctgcacaataatttgcctggccggcatttccggtaattccggatacggatgatatattgattatccttccacttttctgttttaagaaatagcgggatgtatgatgaatggtatggaatacaccctttaagtttgtctcatagactgcatcaaattcttcatcattcatcttcatcacaagattatctcttgtaattcctgcattatttacaagaatatccagatgtccgtatttctttatgatatctctgagcatggcctgacatgcctcgtcatctgccacattgcactgataggattctgctctgccacccatatcggtaatcatttttaccacttcttcagcccgttctttactgccattgtaatttacaattaccgttgctttgtcttctgccagacgaagtgcaatggcacgaccaatccctttggctgcaccggttaccagtgctactttattctccaacataagctttataatcctccagtttttcaatgcttaccgttttgacatcccggttgattttacgcataaatccagataaagtatgtcccggtccgatttctacgaattcatcataaccgtctgctatcagacgctcgatgctctgctgccatcttacagaagaagatacctgcttctttaacagctcttttaccggttctgttgtggtaacgtaatctgctgtcacattggttacatacggaatgctaaattcctgcagctttgtattttccaatacttctgctaatttttctccggctccggtcaacatggcggaatggaacggtccgcttacttttaacggaaccacacgctttgctccagtttcctttaatgctgcaccggctttttctactgccgcttcttctccggtaattacaatctgtcccggacagttataatttgctatagatacaattccttcggtattgctgcatacttcttcaattgccttcgcatccagtcctaaaacggctgccattgctccgccggttggtactgcttcctgcataaagattcctcttgcacgaatgacacggaatgcatcttccatactcatgacaccggatgcaatcaatgcaccgtattctccaaggcttaatcctgcacaagctgccggttcttttccagctttctttaatgctgcataaattgctgcctctgtggtcagcatggcaatctgtgtatactctgtaatattgatttcttcattttcttcaaaacaaagctttgcaatatcaagtccggttacttttgaagcaagctcatatacggctttactctcttcacaggcatcatagaaatctttgcccattccaatatactgcgctccctgtccagggaacatgaatacaaccttactcattttcttctccttatttccgattcatcagacgttctgcctctgatacgatagaagtaataatttccttacaggacaattcatcctgtatcattccggcaatctgacctgccatcagacttccatttaccacatcgccgtccatcactgctttgcggagggaaccaagggtaagctgttctaattcatctaatgttgcgccttctttttccatcttcagatactcacggctcatcttattacggatgacacggattggatgtccggtactggaacctgttatttcagaatcaatgtctttggattttatcagcttctctttgtagtttgcatgtacgatagattctttagctgccacaaatcttgttcccatctgaacggcttctgcacccagcataaatgctgcagccattcctcttccatctgcaattcctccggctgcaatcaccggtgcatcaatggcatctgccacctgtggcaccaatgccatggttgtagtggaaccgatatggccaccggattccattccctctgccacaacagcatctgcgccaccgcggaccatgagttttgccatagctacacttgctactaccggaattactttaacacctgcttctttccagaggctcatgaatttggctggatttccggctcctgttgtgacaaccggaacctgctcctcaactaccacctttgccacttccggtgcattcggattcatcaacatgacatttacaccaaatggtttgctggtgcgttccttcaccttgcgaatctgctcccgaaccacttcaggtggagcactggctgcaccgataataccaagtccacctgcttcagatactgcagcagccagatgatattctgcaacccatgccattccgccctggataacaggctcttctattcctaacagttctgtgattcttgttttcatattttattcctcaacgccctttgcttttaagtagtcaataacatctcctacagttgcgattttctctaaatcttctgacggaatctctacaccgaattcttcttccatgctcataaccagttcaaacaagtctaaagaatctgctcctaaatcatccttgaaattggattctgcttttacctctccatcatagtttaactgctctttgattaattctgctaatttctctaacattattttgttctccttttttgtcttttctttgataatactttgagtcgcaaatattttgattgtcaaattatttgtaactcaaagtatatacataagcatttctgttgtcaactatatttttaccgactcgcgtaaactacgagaaacacgctttgcgtatttctcgagttatcgcgtaaaaaagaatgtgccttggcacattctcgcacctgcggcggtcgcttgcgacatctaccttatacgccgcagtgcgcatcctcgcagagcgtttttactttacaggaaagcaatttcctgtaaagtaaaaaagacagtgtcggaactttctgttctttcactgtcttatgttagttacttcttttattttttatcacttatgcagcttttttacgatttgatactacaaagtaaacacctactaataatactccgatgcataagaagaataccggattgataccgtcacctgtcttcggtgtgctgtccttctcatggctgcctgaagttactgtcttaccggaattgctgtacttggttgcgccaatcacatttccgccagtcactgctgtgcctccaccggttactgtagtagcggaaccacttccgttgttgctgttggaagtatctgttgaaccattgctattggaattatttccattatccggagtcggctgtggattctctcctccaaggctctggaaactgattccatttccggttgcatatacctgtgcctgtgttcctgaataaccggaaattgtggatggactccagctgctctggcttccgattgacgttacactcgccggaatcaaaattgtactgatactgctgccgctgaacgcatctgtttcaatggtattaacagaatccggaactgtcagtgaagtaaccaacttgcagtttgcaaaagcacctgctccgatggttacagtactggtcgcaatttttgcaccggattttccctccggacaacggattaacctggtcattgctttgttataaaggcatccgtcactggatgcatatgtaccatttcctgatgcagcactgatggatgccagtctgctgcagccggtaaatacattgcttccgatgctggaaacgccagccggaattgtaattccggttaaagacgtacaatcataaaatgctttatccccgatgcttcctacggattccggaattgtaaactgggataatgaactgcactctgcaaatgcctgggaaccaatggatgaaattgaagttccaatagatacactggtaaggcttgtacagttataaaatgtctctgccggaatagaaccgatatctccttctatgctgacagaaccaaggcttgtacagttatagaaaactgcggttcccattccagtcacataagatggaatcgttacacttgtaatggatgtattggatgcaaatacaccacttgcaattgtagatactgactctggaattgtaattgctccaccggctccgctgtaggcaaccagtgttccactgtcatctactgtaaatccattttcatctgttgtctcgtctgcccggactgtctgtcccggcatcactgccagcagcaaacatactgctgcaaaaatagaaaatccttttttcaatatctgcatctctcatctctcctagctttatctgcttgatacattatacttcttatctgcttactgtacacgctttgccagtataaacattcttccgtcctgtgtataattattgcaggtagaaagagtcagcagctggtctccataagtactgtctatctctgtgccatatacagaaagctgtgccacattatttaaatattcctgatattcttcttcggaatctgcattcagaaaattataataccggaatacattttcatcctgatactggacctccgataatcccacttcaataatttcatagactcctctttcataaagagtattaaattctatcgtcttatgggcattgtagaaatcttcgtccagatatttctttaattcgccaaacatcattccgcttttcatattatgtccgtaaatgatgatattggtatccctgtttatgtaatcatttctggcatcgataaaaagggtgccattcaggtcgtcatttttatcaaaatcatgtttcagataataatccggttcttcctgtgaagactgcatgaccggataatcaatatccgtatccggaatatgtaaccatccgattaattccggattttccgcatacagggaaacataatcctctaacataatcagtggctgctctgttgtctctcctgtttcagttgcatcttctgtgatttccggattcatctgctccgttcctgttacaaggtgctctactacattattctgtttcttattctgtaaatccttaagcctgttagcagctttataatccgcatattccgaaatcgcataatatccgatacaggctgtcgcaacaatgatgcatacgatgccgaccaccttctgccaggtaaaatgaaatggcagctttgcttctgcttccgcttcttccttggcaattttttcttctatcatgttctgcgaactatccgcaacaatatctgaaatgcaccagaagaacgattttccgatttcacttttaaaacggattttcttcgtgcgcatcatggtatacaaccggattgctacttccggatcataaatatccagttcatcggtaatatacttgattttctttaaatcttcctgcgcctgcctgtattcccttaaggtttcgaattcataatcacctattttataaatcttttcatccataatttatgattcatctgccttatcttctcatggtccaggtagttttattataggtcattttgtcatctttcgcaagatttttccgcaagatatacacaatgtaccacttcttatttttatatcgtctatatcttgcgctttctttagtctaaattggatttttccagcaaataacggaacatctgctccgctgcttccttatgttcggagccaagggcaataccaagaatacattccttttcataataaccgtgttcaaccggccagcttccggctccaagacggatgcctgctgcaaaagtatctccggtgtccttatcctctacatagaagatataatcctttaactgttccagctcgtctttggaaaagtactgcgccaaatctgctatggcaccggactgggcaagattttcaaaaaccatttcatcggcacccaaaacatctactccaccgcctgcaatcactgtctgcagggactgataggaatagagattactggtatctgtgctggttaaatccacataatatgcatcatttaccacaacctcctgggctgctgtatcatatccatattgctccatgaattctgagaaatccggttcttcatctgccggcatactctttgcatttactaatacaatctgggaaatatcttcctttgtggtcatataatgatgtaccgtcataccaatcaaaataatcactgcaactactgccagtattacaagtctgtaatagtcccagacaaatccgacccgctgtttccaggtcattgtctttaaatcagctttcttttccatattatcgcctttcttcctctgccggagctgtattatctcctgtagtgtcattctctgctgcattaccctctgtcacatctgtgccactctccgcatcagcatcattgcctgtgccaagaggtgccacaaaatctgcatacggtaattctttatgtaaattttccatataatcataccagatttctcccggatagctggctcctgtcagtcctggaagttctgccggaatatcatatccaacccagacgctggtggtgtaatactttgtatagcctacaaaccagccatccttattggaattggtggttcctgttttcgctgcactggcagtctcggacaatgccattccctttgctgttccttgtgtcagaacaccctctaatatattggtcatccaacgggctgcattggttttataaacctgcttttcatcgacaattttctgatagatagcgtttccgtctgcatcctgtatctctacaatgcaggtaggctcccggtattttccatcattttctatggtggcataagccgccgccatttctaccggagagactccattggtaaatccacccagagatgccgccggtctttcatcctccggggacagctttgcgaaattcatctccttcagataggaaattcctgtaacgggagtcatctcttctaaaagattccacgccactgtattaatggaattttctactgcataacgcaaggttacgctgccaagatacctgccactggcattttccggtccatcctcaatcggtgcatcttccaccacagtatccggggtatagccccgctccagcgccggtgtgtatacaatcaacggtttgatggcactgcccggctgccggtaactctgataggcgcggtttagcatatgcccgtcatattcctgacttctgccgcctacgattgcctttacaaaaccggtctcattgtcaatgcatactgccgcactctgcaatgtataaatgccctcttcattgacatcggtaaaatcctgcagcttctcatccactgcattctgaagctgctcttccatatttaaatcaatggaagtatagattctatagcctcctgtataaagagactgttcgcaggttttatactgctcctgataggcatcttcataggtctttcgatcttcctccgaagaaaaatctgtccggaattcaaagccctgctgctccatcaatgcccgtgttgcacaatagcaggcataggtctctaccgcatcataacgctttgttggctctgctgtgctgagtacaatcgtttcctgtctggcatccttatattccctgcggctgattttgccatcctcatacatgttttttaaaatgcggtcacgtcttcctaacgtattatccgggttcttataaggattatacatcgtcggattattcggtatcgcacaaagatatgccatctgggacaatgacaaaaatgaaacatctgtatcaaaatatccccggctcgccgcctgaatgccataatatccatttccaaaataaatattattaagataaaactctaagatttcatccttggtatatttcttttccagctctgtggcaatgaaaatttcttccatttttcgctgccacgttctgtcattatttaggaaaatggttcttgcaagctgctgcgtaatggtacttccgccctgggttacttctccgttacgcaccattgcccagactgcacggataattgccttaaaatcgattccgccatgactgtaaaattttttatcttcaatactgaccatagcttctttgacttcttccggtatctcatcactggtcagatagcttacatccttggtgccacgaagtgacatgattctcgttccattcacatcataaacctggctggtctgctccgcccgaaatgtgtccttcgtcgactcttttacaaaccggactgcctcttcatgcatggcactgacctgactggcatacccgccaaaatagtaatacgccagtccgccgattaccagaagtatcagaactatctgcagctttacaaaaagccagaaaccacggtatttcttttttctttttttcttctctttatgggacatgggattcctccatattgctctattttacactgttccataaaaagttacaaggctactgttccatttgtcttcctaaaaatcccgccgctgtaatagcaagcttgctttcggtttctcccatttttgcagtttcatttttctcatataaaacaactgctccgatggcatctccttcacagataatcgtgctgattgcctggtcatgatagttcccggtatcatctaaggtaattcgtacaaatttgctgtctccctgctgtgcaagaatatttttccggtcttcgatcagttcctctaactgcctgctgattggctttccttcgaattccttctttccgtttcctgcagccgcaatcacatggtccctgtcggtaatacataccagatgcccagtgctctgtgccaggctctccgcatactgtccggcaaactggctcagttctccaatcggagaatatttcttaagaatgatttcaccttcccggtctgtaaaaatttccagtgggtcaccttcccggattcgcagtgtcctgcggatttcctttggcactacaactctccccaaatcatctattctacgtacaattcctgttgctttcattaaaaattcctcctgtttcctacatactttccatttttgtgctgtatgggtagtatgtggaaaacaggaggaattatgcaagccttcctcgtatttacatttttaaatcactggtgtttttattagccaaaatcaatcttttttcatttttggctaatagttcatttatccaataaccaatccgcaatatcgactatcttgattccctcatattgatatgcatcatgtctcgttctggcaataacatacttagggtatgcatctttaatctgcagtagtggtgatacctctctttcaaaagtcttatcatcacttatgttatcagatacctgaatataaattttttcgctacgtttaattgcaacaaaatctatttcctttttatacaatattcccacgtaaacctcatatcccctacgaagtagctcaattgccacaatattttcaagtattcgaccataatccatgttttttgttccaagttttgcataacgaaaagtatggtcactcagatagtatttatcattgctcgacaaatatttttttcctttaatgtcataccttcttactttataaaatgcgaatgcgttgcacaaatactgcatataagagcctacagtcgtatgatgaattttttcatgcatacttcctaatgtatttgtaatactacgggcagatgacaaatttgaaatattatccattaaaaagtccacaattctatccataagctgcacattccgtattttgtatttttttctgatatcccgtataatcagagtatcaaatacatcagc

SEQ ID NO: 398 - DNA, 18205 bp, unidentified
  source 1..18205: mol_type = unassigned DNA
tcagattttggcgagtgcctgttccagatcggctatcaggtcattgatatgttccgttccgatggataaacgtacagtgccggggtaaatctcctgttctgcaagttcctgcgcattaagttgcgagtgtgtggtacttgccggatggatgaccagtgatttcacgtcagctacattggccagcaacgagaaaatctccagactgtcgatgaagcggtgtgcttcttcctgtcctccttttacttcaaacgtaaagatggagcctgcaccattcgggaaatagcgttgatagagtgcatgatccggatgatcggagagtgacggatgattgactttcttcaccttctgatgattattcaggaagttcaccacttttagcgcattttctacatgacgttctacacgcaaagaaagcgtttccagcccttgcagcaggatgaaggcattgaacggactgatcgttgctcccgtatcccgtagcaaagtggcacgaatgcgggtgacgtaagcagccggaccggcagcgtctacaaagcgtactccgtggtaactcggatcgggctctgtcaactgtgggaatttgcccgaagctacccagtcgaattttccggaatcaacgattactcctcccaaggaactgccatgaccgccaatgaatttggtggcggagtgtaccacaatgtctgctccgtgttcgatggggcggattaagtagggagtaccgaacgtattgtctataatcaaaggtattttgtggcggtgagcaatttcggacaccgcttctatgtcgataatattggaattcgggtttccgagtgtttcgataaatacggctttggtgttctcctgaatcgctttttcaaagttggaaaggtcgctcggatcgacgaaagtggtggtaacgccataattgggcaaagtatgtgccagtaagttatagcttcctccgtaaatcgttttggcagcaacgatgtggtcgcctgcacgagtaatgttttcgaaagcgtatgtaatggcggcggcaccggaggcaactgccagacctgctacgcctccttcgaggacggctacacgttcttcaaaaactccttgggtggagttggtcaggcggccgtagatattgcccggatcttgcaagccgaaacgtgcggctgcatgagctgaattgtggaatacataagaagtggtctgataaataggtactgcgcgtgcgtctgttgccggatctgcttgttcctgtcctacatgaacctgtaatgtctcaaagtgtaaattctttctttccataatcgtatgctttttaagtttaatattctctctttattttcttgcaaagttatgggatgtagatatatcgaacaatatatagtgaaaatatagaaaataatgctatttttgtatcgttatacagaataaggcaactgctttattcttaaaaatcacctgttagaagaatatttttcttatggatacttttgagaaattagataaagtggatttgcagatactccgtactttgcaagagaatgcgcggttgacgaccaaagagttggctgcgcgggtcagtctttcatcgactcctgttttcgagcgccttaaacgtttggagagtgggggatatataaagaagtatatcgctgtgctggatgccgaaaaactgaatcagggttttgtggtcttttgtagtgtcaagttaaggcggctgaacagggacattgcggctgagtttacccgaatcatacaggacattcccgaagtgaccgaatgctataatatatcgggcagttacgattacttgctgaagatccatgctcctaatatgaaatattatcaggagttcattctgaatgtgttgggaaccatcgatagcctgggctcgctggaaagtacgtttgtgatggcggaagtgaagcaccgatatggaatacatatttagtgggaggattgatgtatttcctattttggctactctttgttttcggctcaggtttccggtggattgcctataatgtctctgtataagctgccgtcatggtccttgtattttgcgtattggtagaggcggaccagtatatcactgtaatcaagaatggctgtatttgatttctgtgataaattggtgcccaggataccactgcctatgataccggggttgtataatacggcgtcttgtctgatagagttcattatcagttctgcacaaatatagtctttaatccttgcctcttctagtcgggtcgtgatgtatgagttcagatggcttttgtcatgttgagtcataaagccgtaccatagtaaacatttcatccctaattgggtagcttctattaatatatccagataggttagtcccgatgttcctttcttatctatctcataaggatcgatatgaatgaaagaatctttggggagtgatggcagtaacctcatgaccccttcgagagaatcagtattatataggtggacggatgtctgtagttccgcttgcttcgcatagcgttctacattatccaaagcactcttttctatatcgaagtatagaaatttttgggcctgtcttcctaatacttccattgctaaagccggggaacctaaatagtatcctctttgcatttctgcactttctatcttatagtaaatggaatcctttaaaacttgattgtcttcctctgctgctttttctaagaaatagtaaatgccatattgttgttccgaagtctgctgcatcggatagaaagcgcaggctgaatttgtttctacatagatttgtggatgctcgttccgaagaacttcgcaaagtatcagatgtttcagtacatcaggctgtttgccgtaatgagtataagttgccatgatactaaaggtttatagtgatgatataaatggtatacagcaaatatacgggataattcttagattcttgcatctgatttccaaaattatcctgtacatttgttatgtgatatgaaccttattctttgaacgcaatgaaatggcaacattgtaaatagcttcgctctatatggatgatggacaatggtgaaatctgttgttcaagtcttttgtggctaaacaggtcacccgatattttattattttatttcagaaactatataaagaagcaataacaatgaatacaaatatttatccgcgcaccaatgaccttcagaccgtctatctgaatgcagttatcaataatcctcatataaaggttggtgactacaccatatacaatgattttgtgaatgatcctgttcagtttgaaaagaacaatgttttatatcattatcctgtcaatggagaccggctgatcatagggaaattctgttcgatagcctgtggagctaagtttcttttcaatagtgcgaatcatacgttaaattctttatcgaattatccgtttcctatattttttgaggagtggcagttggataagggaaatatcacttcggcatgggataataaaggggatatagtgattggaaacgatgtatggattggttatgaggctgttgtcatggcgggcgtacatatcggcgatggagcgattattgcatcgagggcggtagtcaccaaagatgtacctccttatacgatagtaggcgggacgcctgcgaataaaatccggctgcgttttgacgaagatacgattgcgcaattgcaggaattgaaatggtgggactggagtactgataagatagctcattatttgcctcatatcatgaatggggatatggaggaacttatgaaataaaaagtatcatagcgacatagaatggaagctccaataggatctatgaaacatagattttattggagcttcctttttataatctttcttttaaatacttattgatacatctccggtcccaatttatccctcgcttgacaattttggccggaatgcctgcaatgattacattcggctcattaaattcttttgttacaatacttccccaaccaacgatactgttgtccgctatcttcacattcttgccaatcttgctatctttccctatccatacatgcttgccgatttctatgctcttggcaaaattgatcggttcaccctttaaatctgttattgtatgtgcatcggtacaccatatatcaattccccagcttaactgactgtcatctccaatgctaacatacgagtcatcttcctgcaaatacaatgtaaccccattgattacaacgcggtttccgatatctatccggcaattgttggctgttcttgaaacaccggcacccagtcccggcagctgcccgatgatcagcttcaatcccgtcatgcctaatatggtagaatatcgtaagatgatcgttcctatatttacgatattattatccccttttacgatcaaaagaaatccgttgctgagcagcaattcctccgcactctcttcagtgtcgaaatacattgagatatgattgttatttcctgtgattgtaatgttagcctgattaataatcttattgaatttatcatttggagaagaaacgcaatcaattctgttgtgtgggaatattaatgtaaattcattgttctgtccgataatctgttccatatcattaatacttgtgggttatatccgtatctttttgatacgacttttatttcattcctcaaatgtacgaaaaagaataaactaaaactcattcgatagtcctttttcttagcttgtgttctcgtggcgatttctaaaggctttctatactatatttattaacttcgttgcctgatatttattcgtgccactatagtggtacgcaagaggaactatagttccctttgtgttctattatagtagtccgcaagggaaactatagtggtacgaactaattataggactaaaaatataaatatcagggaaggaaccggttagttattcgggcttttttcataatgcttttaaccggttatcggattctgataatgagcgttataaaacaagtttttcggtttaaattctgttttttcattcgaatgataatacatgatcaacttgtttccgatagtgtgtattatgcaggatgatgatataaaggtaattattagaattgatttcttatttattatatatagctttgtaactttaaaaaacagagaaggtatatttgaaataaaagttttacaacaaataatagtgtatacaaaataaatatcgggagaatcactatgtacagaataatcatcttattaatttcattgatactatcagtacaatgtttttcacaaacggagtttactacttgtctgtttgacatatccagaaacagagtgataccgatagcgatttatcagccgcagaaagtaaattcaaaaacgaaggttatcatattcagccacggctatgatgggaataaaaacagtaagtcgaaccaaacctattcctacctgacacgttttctttcacaaaaaggtttttatgtgattagtatacaacatgaattgtccgatgatcctcttttagcgatggaaggcgatttcatgcagacccgtatgccgaattgggaacgaggaaccgacaatatactttttaccattcaggaatttaaaaaattgaaaccacaattgaattggagcgaactcatcttgatggggcattctaatggaggggatatgacaatgctgtttgccactaagtacccgcagttgatcagtaaggctatatctatggatcatcgcagaatgatcatgcccagaacgttgaagccacgtctgtatacattaagaggatgtgactatgaggcagatgcgggagttctgcctaccggacaggagcaggaacaattcagaatgaaagtagtgaaactggatggagttacacatagcaatatgggtgagaatggaacggcggaacagcatgacctcatcaatcagcatatctgcaaatttctgacggaaagataactaaagcatcatttctattttatctggcagttttaaaccgaaagcctgtttttcttgtaactttgcagccgattttagaaaaagaagtttggaatgaacaataaatacgaagaacggctgggaacagaacgtatgttaccgcttgttttcaaaatggcacttccggcagtggctgcacaattcgtcaatctgctttatagcattgtcgaccgtatatacatcgggcatattccgggaattggcaccgatgcgctggcgggtgtaggggtgactacctctctcattatactgatttcttctttttcggcaattgtcggcggcggtggtgctccgctggctgccattgcactcggacagggcgaccgtgtacgagccggaaagatattgggaaacgggtttgttctgctgatattgtttactttgctgacttctgttatcgcatatacttttatggaacctattctcctctttacaggagcttcggaaaacaccttggaatatgcggttgactatctttccatttatctcttgggaacgatatttgtcgaaatatccacagggttgaatagctttatcaatgcccagggacgtcctgccattgccatgttttcagttctgatcggagccttattgaacatcattcttgatcctatttttattttctggtttgacatgggcgtgaaaggtgccgctttggctacggtactttcccaagcgtgcagtgcggtgtgggtggtaagtttccttttttcccgacgtgcctctctgcctttggagaaacgatatatgggactggaccggaaaattatcctttccatattagctttaggagtatcccctttcattatggcaagtacggagagtttggttgggtttgtcctcaatagcagtctgaaggagttcggagatatctacatcagcgcattgacgattctgcaaagttcgatgcagtttgccagtgtaccgttgaccggatttgcgcaaggattcgtgccgattataagttataacttcgggcatggtgacaagcagcgtgtgaaagattgcttccgtattgtactggtaaccatgttttccttcaacttgatattgatgcttttcatgattcttttcccttcgacggttgcgtctgctttcaccagtgatgaaagactgatagaaaccgtacgttggacaatgcccgttttcttgggtggtatgaccatcttcggcttgcaacgtgcctgtcagaatatgttcgttgcattggggcaggcccgaatctctatcttcattgctctgttgcgtaaagctatcctgttgattccgctggcgttaattttgccgaaatttatgggagtaacaggagtgtatgctgctgaggctatatctgacgcgactgcggccatctgctgtacgctgttgttcttttggcagttccctaaaattttgggaaagattaaagagaatactttgcgtgtggagtaatcgtttctttataattagttttttacttcacagatatgcccagcattacggttgtattctgactgttattccagaccgaatgaggtatttctccttttaccagaaaagcttcattttcattaataatcttttcttccttgtcaagcagaactttggcttgcccgctgatcactataaataaatgattgtgtgggtgagtatgcagcttgacaggttcgccgccgttcggttctaaataggctattgcgccgtctattatttcaccacagttgccaaaaagttttttggctaagaacttcaagtgttccggtggggtgataaatccatctgattcattcatgactatacaaatatatattgttatttatcgtgtatgacacaactacaaaagtagttatttgaattgattttcttttaagtatgatgtcttaattcctgatttgtctccatctgagataatcttttgaaccatcagttgtatttctttggtcgagttttttagatatccgtcgaacatagcttgcattgcctcatctctaaatatcttttttacgatcggaacgctgataaacagcggtaagtagtatagcttgtttactttttctttctttgggttaatattcatttgggagcagacgtaaaagccctctctgatggactttattgttgttttgatgattttcgtattactgataaaagatttcattgttccgccggctttgatgatgcctgctgagatgcctgttatgaatgcataatgtgggataagccaattcataatctgattggaaataaatggcttcatacccgcatccgacattgcatctgctattttttgtattcggggtgtcgtttcgcctgttgtctctcccaacattgttttcgaatatttagatccggaaatgacagcgttaatgcctttttcattccgccctcctcctgccataaaaggaaaaccaaagaaatattgtccggacataaggcattgacttattttttttaagtcatcctgccatatattttggaaaaagagaatatgtgcctttcctgatgattttttaagaacaggcagtatttcttcaagatgaaaactatgggtagtaacaataatatattcaaaatcattatccaccgaaagagtatctgtcactttcgggcgaaaaatgatgttttctgttattttcttgtcattcctgaagtctgtacaatagatatttattccattttcttcaaaaccttgtttttgattgtttctgacaaggatacttatgtcgtgtcctgctttcgccagttgccagccgtatgtgctaccaattactcctgctccataaattagaatcttcatgatgaaatgtatatttattatttgtaagaaagatcgatgaaagctgaacgaaatagtccgtgatagtctgagtaggtcggttcacaaacatcgataaggtcggcgggtgaaaatccggagaagttttttacttcttttatcagatgtgatttgtcataatagccacattcgtatgctaattgttctagtgtcatatccgtatgtgtctgtagcagataatgtaatttctgaaaacgcataatccgcaggaaatctttcggattggttccgatatgttccgcgaataaacgtttgaattgtttataactcaaacaggaaatttcggctaagcggtcaatgttgctttcccctctatgaatagagtttattactgcatttattcgtttgtcttcgtaattgtcggattgtgatatacaaagaagaaggaagtgctcgataagacggacgcattgtaaatcgtctgttgcatcgttcagctgttgttcgagttcaagtaattcaggattgttcagtatatcaagcgggagataactgttatttgtttcatgaagcggagttttaaagaatgccttaatgcctgttggctgaaaaacaatgcagatgaaatcaatatatcctgaaaaggcaagattcgtatagtcagttgcgataccgtaaagatatgactggggaagataatctccattggatgatgaataaatacgatttccccgatgaaaacataatgctgtacaacctagcggaacaagacgctgggagcaaagtgtaacattttccattgcaaggaaccagtactgctttacatacggagtaagtgatgcagagggctgtatgactttaaacttattcatttccggcaaagttagagatattgttgtatatataaggtgtaaaaaaaggacgttgttgaagcttgaatggaataaaaatgtgtaaccgattacgtatttcttgagaaatagttgcatgtattactgaaatccgatatatttgcgtaatcaattacgtatttaataatgcaagtaataaagacatggacttttttaatcagacggggaaattagctatcggaagcagactacgtatgctgaccgataaaatcacggtagatgcggctgcaatctacaaaatgttcggtgtggacttgaaacccaagtggtttcctgtcttctttgttttatcacgtggagaggcaaagacaattacgtctattgctaaagagataggacactcgcatccttcggtgagcaatatcataaaagaaatggtaactaagggattggtgaaagagacgaaagataaatccgacgggagaaggaatatggtaatgttgtctgccaaaggaaaaagaatgtccgactcttttgcggagcaatgtatagatgttacgtccgctatcgagcaaataacgcagcaaacccggaacgatctttggaaggcgattgaagaatgggagaagcttctgtcggataagtctttgctggagcgggtgaaggatgcgaagcaggagcgtgaagctaaggatatccaaatagtatcttatgaaccatgctatcaatctgctttccggacacttaacgaggagtggattactgcttattttcgaatggaagaggctgactacaaggctttggatcatccgcaagaatacattttggataagggcggagacattttggtagccctttacaagggtgaaccggtcggagtatgtgctttgtgtaagatggatcatccggtctacgattatgagttggccaaactcgccgtcagtcccaaagtacagggcaaaggtatcggagtgttgctttgtgaagctgtcgtgaataaggcaaaagagttgggcggcaaaagaatctttatagagagcaatacacgtttgaaacctgctatccatatctatcacaagctgggattcagggaacttcccgaataccacacgacttacgaaagaggagatatacaaatggaattaacgatagaagagtgaaaatgaaaaaggccgatagtgaatttatcaaggggcgtattgccccttgcggactgcattgcggaaagtgctttgctttttctgacggagacatctcttatcatagcaacgaactcaaaaagtcactgggcaattttgatgtgtacgcacagcgttttgtggacttgcttgacgaacccgtctttgcaaagtatccggactttaaggagtttttgaatcacctgtccgtagcgacttgtcagggatgtagaaaggagaagtgcaagttgtttaaaacctgcaatgtacgtgcatgcagcgaggagaaacaagtcgattattgtttccagtgcagccgcttcccctgtgaaaacactggtttcgacgagcatttatataaaagatttgtaactatcaacaaacggatgcaggagatcggagtggaaaagtattacgaggaaatcaaagatattcctcgttactaggtcgtcggttcctctctttatctcatttcctgtgcgtaaatgttgatggctcgcagtgcctttgaaatctcagtcggggtgatgtcctgacattctattcttaatactttctcccagtcctccatatctacattccatttgtagatttggggacatagggtgaaaagagccgcgatatgttttatatcccgcgcattccttattgaggttcggaaaatgagtatttgcccttccatagttgctatcaattacttttgtttaccttgcaaaggtaggcttaaaaaggcttcggtatagaattattcgacgaatgccgtgattactcatgacgaattaagtaatttgggagactaacaatagggcatttgtatagttgtccttctccatttaaaatctttatccggatatggcgataccccatacatcgtcttttagtgcttgaccccttcaaataaatcgcggttgtctcgtgaactctgtgaattgcgcttgaagtcattgaatgtataactgatagtcaacgtaattacagggaatttcggttgaatccgtgtgatcgattgtaaattggctgtctcaatgtcacttctgtaacgggcagaattgaatatatcccgaaaggagagggtagattgcagatgaggactgaacaactgctgacgaatagccagattgacaaaccaaaaagaatccgacctcccttgtgtagtaaccgaaggacccacgaaattcccgtccagctgaatacgggtattcttatgaacccgaaaaaggttattgactgtaaagtcataattggtactcgtttccttttttcctcccgaatttatattattcattaccttataatagtaaatatttccgttgacgtccagattccaccatttagtgactttcaactgggtacttagctccacgcctaacgaatagtcattgcctacgttagccatggagtctaatgtaactcctgcctcgtacggaacgcgcaagcgctcaatcttgtctttacgttttctgtagaacaggctggattgcaaagtgtgctctcccatcgtctttttgtaattcagctcgaaagaatgtatgtattcgggccggatatccggattgccgatttcagctgtgtaataatcgcgataagtaatgtaaggctccataaaaaagagttccggacggttggtacggtacgaataggcgaatgtcagcttctgttcgtgcggcagcgtgtatcccaaatgtacggatgggaacacctcaaaacgattcaccgtgcggtccgaaccttcaatagagcttcgcagcacctggtgtgtatgttcacctctcacccctatctgcacgtcaaatgctttataactgtcacttcccatgacataaacggaatgaataccccgctgaaaatagaaagtgttatagatatcctccctccaataaaattcctttttctccggattccagaattgcatcgtgtaatcgccgtcttccagatacgaatgatattgatacccgctttccagcagaccggtcttgctatacggatagctgtaggacagattgccttggactgtccagcgtttttcgtcttcccacgcacggtgtccctgctgacgttgttcgttcttgtcgaaaaggtcactctggaaatattcaaggggattgtcttcataacccagcataaagctgccggttagggtatgcccgttgtcgttaaacttatgggagaatcctgcttttccgatattgaccgtcgagtgcaggtcatatttgtcgcggctagaatagttggatggggcggatgctgcggcggaattggaatgtgtctctgtataatcgaggtccccttcgcgggtaaacttgtcatataccacctgcaactctgcattgacggaggttttgggagtaaaagcgtaatcaatgcctccccgtagtccatagtgataattcttcccgattcgcggaccatcggacagggaggtggtggttttgtccccaacaacagtcgtcttcctttgttcgaaatcgctcttacggatgggattgttccagtgcccggcaaggtgccactgtaacttcttgtgttgctgggacaacaggaaatccagaccattggagagagccgtgctgccatacgcattgactataccgttgatacccgcttgtttgtttttcttggtgatgatgttaatcattcctacttctccgtccgtatcatagcgtgccgaaggcgtagtaatgatttctatgttctctatctgggtggaaggaatctgttgcagggcctgtgaaccggaataaaagctgggcttcccgtcgatatataccttaaatccactgcttccgcgaaaggtaacttcaccatccacatcgacccggacggagggagtattttccagaatatcgaccgccgttccgccgctgctcatgagattgttcgaagcgtctataatctttttgtccagcttgtagatgacttgccttttggctgcctgcaccactacttcggctatacctacttccaaaggttgcagttcgataatacctaagtccgtcactgattcggaagaggtgatactaatggcgccttgtgtgtagatgtcatagccgatcagtctcaccattaacgagtattctcctttggcaatacccgataagtggaagtcgccgttctctttagtatgggtaaatgaagcgggaccggtttcgcctttcttcgttagtacgacatcggcaaactctatcgggttgcctgtacctttttcctgcacttttcctttgatctgtacgggaaccgccatgaggcagttgaaactaaacataaaaagaatgagaataattgtagttttcatgatcgtgttgatagtttgttttatgctgcaaagttaatgaagtatttccgacattagaataaattggttggctatatagcgcttgtgtcacggaaagatacatatttgtcacgataagacatggacggccggaaatctgtacctgttaatatatagaaaagtgtgtctgtttccgtctttcttttttgatttactttgcagtgttgttttaatctcctaatatacttaaaagttatgcagttgaattttgccaaaagaatgtcctatatcaaggcttcggaaataagagaaatactaaaagttactgaacaggaagatgtcatttcgtttgcaggcggtttgcccgctccagagctttttccaatagaggaaattaatgaaatcaatcagatcgtattgaaggaagcaggtactaaagcgcttcaatatacgactacggaaggttatgcccctttacgtgaatggattgccaaccggatgaatgaacgtttgggaacagcttttgataaagatcatattctgataacccacggttctcaacaagggctggacttatccggaaaagtgtttttggacaagggagatattgtactttgcgaaagtccgacatatctggctgctatcagcgcattcaaagcatacggatgtgactttatcgaaatccctacggatgaggacggtatggtgatggatattttggaagacgtcttaagtaatactcctcatataaagctgatatacgtgatacctacttttcagaatcctacggggaaaacgtggagtctggaaagacgcaggaagttggctgaattatctgccaaatatggtgtggcggttattgaagataatccgtatggcgagttaaggttcgaaggggaatctttaccttctataaagtcttttgatgaggctggcaatgttttgtgtacaggtagtttctctaaaatattctgtcccggtttccggatcggctggattgcgggagataaggatattattcgcaagtatgtattagtcaagcagggcacggacctgcaatgcaacaccatcgctcagatgaccattgccgaatatctgaaacgttttgatattgatcgacatattgcgaagatagtcgaagtatatagaaagcgcaggaatgttgcgattgaaagtatcgaacgttattttcccgatactgtaaagtttactcgtcccgaagggggattattcacatggatagaactccctgaggggatttcggcacgtgatgttttagttagaagtctggagaaaaagattgctttcgttccgggaggttccttttatcccaagggaaataaggaaaatacacttagaatcaactactccaatatgcccgaagaccggattgagaaaggacttaagactcttggggaagtggtaaaggaatatatcagccgatcagaatgattctttgatgatattccccagagtttgcaagcgctcttcgataaaagggctccattgctgaccgaaactcaaacgcatacagtttctgtattggtcgtgcagagtaaacattcgtccgggagcaatgctgattttatgttgcatcgctttataatacagttctgtggtatctgttctttgattcagttccacccaaagcatgaatcccccttgcggagtgatgattttcgtatcttcggggaaatagtcggtaatggattgtgccagatgaagactgttggtatgtagttcatggcgtaacttgcgtaaatgattctcatacctgccgttttccataaagttggcaatggcttcctggttgagggtaggagtggatattaaatgaatatgtttctgacggataatggcatccttaaacttaccgggggcaatccatcctacccggtaaccgggagccaatgtttttgatacggaaccgcaccacagtacaagacctttttcatcgaaagccttgcatggcttgggacgtgaatgcccgaagaatacatcaccgtataaatcatcttcaatcagagggatatcatgttctgccagcatctgtactatttcctttttatgttcatcaggcatacagcttccgagcgggttgctgaaattactgataagcagacataggctaatctgcggcaatacttttcttaaagcgtcgggttcaatgcctgttaccggatttgtcggtagttccagtacgcggagccccatgctgttggctaactgcaatattccgaaataaacgggactttcgacagctatgatgtctcctctctgagctatgacggacaatgccagagagatggaattggtaactcccgtagtcgttacaatgtcattttcagttaagtttccgttccagctatatgcgaagcgggctatgtattttctcagtcggatgtttccttgcgggtcttcataccttgtgccatttccgggaagagaatacattgctttgaccagttccttattgagctttgcgataggtaataaaacatcttccggtattcccagcgaaaaacgagtgatggatgaatcttcgatggaatgatatacctccatgattaagtctgcttcttcctttcctaaagattgggcagacggttgtgtcgttgccggagcggacaggtttaacggcttataattgactataaatcccgatttggggcgggaaatgataaatccttccttctccagttcgtaatatacctgaatggccgtgtttaaactcacgccatattcattgctgatagtacgcaaagaaggtaatttctcgcctgctttccatatacctatttttatttgccaggcgatggtgcctgctatcttctgatataggatttctcttttcattcttattctgtatccggcaaagatacaaaaaggatgtctgtatctgttgtgtttgatctattttgtggaatgtaaaagaatgacttgtgtgaagtgtgtattatcttagcagtcttgggtaaatggataagaatatgaatactgctataatcgataccgtcagaaaaagactgactgaaagtatagatggcaaagtgctggcggcttccgctcatttctttatatcggaatttgggaaattcaatatattaccaagacataataatataatctcattattgaacggagttaacctacgagaatattcccatctgttaaacttgggtcactcatggacaaatataaggcagtggtgagattactagtcatgtcaaatctgttaataatctgaatttagtttaaaaaactgtagtttggtgttgttgaatgctgttttttatgcgttgatattgttattcgtgataatgttattatctttgtggtataaacattgctatgtgagattgccaagaagattggtagtaatacgtaaagtgctgataatagaaaaaataataaataaacagattgaagttatgatacatactgttcctaatcccaagatgacaactcgcgaagttgataagtttcgtgaagattttcgaaagtgtgtgtctggaaaattaacacttaaagaaagaagagctatcaaaattcggactcaaagaatgagtgtagttgctaaaaggattatagctaataatggtggtaaaaacccaatacttggatattaatatttccataaataaattattaagagaggatcaagatacgattctctctttttcttgcggttgtgaagagttagataaattctttcatgaagaaatgtctctttgtatcaagcatcattatattacggcctactgtgttagagatattcaaaataatgaaattgtagcaatattcactttatctaacgattccgttgtaatagataatatagaagataaagaggatttcgttcaggaatcgaaagtcaagattaatgatgagtatattcctacattcgaaaaacaaacttccttcccggctataaacattggacatttaggagtacgtacagatttgcaatgtaaaggaataggagaacagattcttgattttgttttatataccttttcaaactttgatatatcaggttgccaattcattactgtagattcattaaataattcacggactaataagttttatgctagaaatggttttgtaaatcaaaccaatagtgataattgtaattcaactagacgtatgtatttacctatacaactatttgaattaatgggagatatcgaatga

SEQ ID NO: 399 - DNA, 37572 bp, unidentified
  source 1..37572: mol_type = unassigned DNA
cctgcacgatccttccggtgatgctgcggatattctgcgcaccgagcagggtctgaactacgatatgggcctggatggcgcttcgccgctgtttgcaggtgcctgtacagaaccgcagaaggagcttctgtggcagaagctgcaaagcccagaacacctgtggtgtgcctgcggcctttccactgtagatcagagtgcgccgtactatcggcgtgacggctactggaacggcgctgtatggatgccttatcagtggatgttcttcaaatctgcactggatgcgggccttgccgattttgcttaccgcattgccgacaccgttcttaccctgtggcagaacgagtgtgccgaaagctactgttgttttgaacactttatgatcgagagccgccgtggtgccggctggcatcagttcagcgggctttcttctcccattgtacagtggttttccgcttactaccgccccggcaccctcacgaccggttttgatgcctttgtccggcatacggattgggcaccggacaacagcgccttagatgccacactggattttaccgcagcgggccgcagcactgttctggctgttctgcagccgggccccaaagctgttacagcctctgtgccctgcaccgtgaccacacgccacgatgggctgcttgagctgacctttgcattggatgctccctgcaccgtgaccataagcatccattcctgaacccacctgtaaaaagaaacgaacgatgtctgtccgaatgggctgacatcgttcgttttttctgcgctgaaatcagttgtctcccttgcgaacagcagaaggcgagagctgatacttccgccggaatgccttatagaatgtattcgctgtggagaaaccgcactgttctgcaatatccgtaatattcagatctgtcgttctcagcagctgcatcgcatgatccagacgcaattcttccacatactctgtatagctctttccggtttgctccttcaggaattgcgaaagatactttttagagatcttgaactgctctgccgtcatcgccgcattgatctccggattctggaaattctgtgccagccagtccagaatattcttttgaagcgcatcattgtggctatgcttcaggaattgcacatggctgcagatctccacacagcagtcctgcagccggctcagcatctggcgggcagtcagttttgagtcataactgcacagataggcgatatccggacagcgtaccctttctgccgtgttcagcagaatgccgcctgccgtgtaaaaatcctgcttaaagttttccgggtccagattatccaccgagaacagttcactcagaagtgaaaccgcctcttccgtacatccggaaagcagatactcccgaagccgcgctgcattggttgcattgaccgtggtaccgcgctgcgcattgctgttccccaaatagcagatcttctgtgtcggatctgcataggccgctacgttgcgggccttccagtaaatatctgacaactgctccattttctcaaaaggatcgctcaatatcaggggggtcgtcaaatgcagcgcatcatacagccgctctgtgcggaaacacatctcccgcagttcctctgcgtcatccgtttcctgcgtcaggatcaccaggatcaggtcatctgccgttgcctgtacataaaatctctgcccgtaaatttgacggatctgctctgacaccaccacagtacgcagctcttctttcagtgagcactcggcgttttcctgaagagatgggatcagcagcaggaagttataggctttcagctgcaccgcatccgtcagctgctgaagggtttcctgactcacagaccctgtgcgcagcaaaatttccattttgccgtgttccagctcgctgcgtgaatgctccagttcctgtgccagtttatgctgactgttcacatttcggagaaagatctcattcagcactttccgcgatgccagatccgattcgtccagcgtatccagcatcggacgcaggctgttcatatcctccagcgtcatgcagacgctgatcaatacacagcccagaacgcccacgatcagatacagacaaattgcacgctgtactgccaacagacccgcttcgtagagcgacggcggcattccaatgaccgccgttgcattcagagatgccacatatcgcgttgccatcagatagcgctttccctgataggtctcccaacccgtatcatcactcgccagggaaaatgtcgttccgtcatagttatttcccgccaggatcgttccgtcatcggagatcaggcagaaaagcccttccttgcgccattgctgctgcgaaaggaacattgaaacgacatctttttccttgatcagcaccgtcattgcgccgcaaaggcggcccgccgtgttcacatagggctggtataccgtggtatatgaattgccatagctggaatgcatcagtttgacaacatgggcgggctttatcgtcgttacatcgatctgattctgcgcatcccattcctcctgagacacatcctcatactcaagtgctcccgggtaaaaattgctatggctttcatacgcgctccggtcatccaatatgatgccattccgctcaaatgtaatatagctgtatgtgatcacagaggaatcgtaggtcttatcctgtaacgatttgctggctctcgtcagtgtctgataatctcccagaatactgttatcataactgctggcaagcagagtatactccgtttcgctgaacaatttgttcgttgtactgcggatgttgctcaggcatcgctccaactgggtggtgccgatcgccagcatttccatcgcgctggaggactgcgcttggatcgtctggcggatcatcaggctatacagaggaaccacgaccaggaagaacccaaccggaatacaaaggtaccttagaagccttcggatccagtttctaacaaacagtctcttacgcatctgcaaaactccaagcaatgatgatttctatggaactgttggctgcacctgtaaggcgtttatggagccggtgcatacagcacagatcctccctccgcaatttcgcagcatctttttaattattttaccacagaagaattttttcctcaacgtttttattgatttgtaacaaaaatccactttatcaccatgattttcaatgctcgaaaatctctgtcagatggtctatcactttgttccgcaaaccgtgttgtcgttcaaagccaccacccggggcctgattgtctgagtgaactcgaatccctgtccctctgattaaaaagcttactttgatggacttttgtgctccgaactgttgcgaaacacacgattttacggcattttttgcgttactccgccctgtagcagcccctcatgcattttcgagttgtcgcattttgtcgcacttttttgcggaactataatcgggacttttttcattagccatgataaacgagagttcaggatccataatttcggatagatggaaactgcacggttttctgcaacaggaagagtaatctcgggtggttcccctaccctatttccgggtgctgcgcacatcaaaatttcgccggagtgagtttggcggtaggtgtggggaggggtggggattattgcttgatataaaacttttcttacttcttcaccctagatcatggcttgcgtacatcaaatcagcctctattaatattttctccacaccattttattgaccacgccagtatagctctggatgattttcacgactttatcagacacgttctcatccacatagtccggtacaggaatgcccaaatcacgattccggttcatctcgaccgccacatccacagcctgcagcagatggtcaccgtcaataccggcaaggatgaaatcccccttatccagtgcttccgggcgctcagtactggtacgaatacacaccgccgggaacgggtgccctacgctggtgaagaagctactctcctccggcaacgttccactatcggataccacacagaaggcattcatctgcaggcagttgtagtcatggaagcccaaaggctcatgctggatcacacgcttgtccagctggaaaccactctgttccagacgctttcggctgcggggatggcaggagtacagaatcggcatatcgtacttttctgccattttattgattgcagtgaacagcgaattaaagtttttctcggtgtcaatattctcctcacgatgggcagaaagcagaatatatttacccttttccagtcccagacgggcgtggatatcggatgcctcgatcttggccagattctgatgcagcacttcagccatgggcgaacccgtcacataggtacgctctttgggcaaaccagtatcagccagatagcggcgggcatgctcagaataggccatgttcacgtcggaaatgatatcgacgatgcggcggttggtctcttcaggcaggcactcatctttacaacggttaccggcttccatgtggaagatgggaatatgcagccgctttgcaccgatgacagacaggcagctgttggtatcgcccagcaccagtacggcgtctggctggatagcaaccatcagcttatagctttcggagatgatattgcccatcgtctcacccaggtctgcacccacggcattcatatatacttccggatctgccagctgtaaatcgtggaagaacacgccgttcaggttatagtcgtagttctgaccagtatgggccagaattacatcaaagtatttccgagtcttgttgatgaccgctgccaggcggatgatttcagggcgggtaccaacaatgatgagcagtttcagcttgccattattcttaaaagaaacattgctatagtcagccattatttttctcctctcacaccggctcaaagaaggtgtccgggtgcttcgggtcaaagatctcgttacaggtcatgaccgtgaccagattttccgtctcagacaggttaatgatattgtgcgtccagccgggaatcatgtggacagcctcgatcttgtccccagaaacctcaaactccaccgtttcgccagtattgatgttccgttcctggatcagaccatgcccagccaccacaatgaatagctcccacttggagttatgccagtgctgccctttcgtgatacccgggcggctaatgttgatagacacctgtccgcagtcagcggtgtgcactagctcggtgaaagagccgcggttgtccatgttcatcttcagggcatacttaaacttgtccgtaggcagataggtcaggtacagggagtaaagcttcttggcaaaggagccgtctggcattttcggcatcatgagggtggtgggctgcgccttgaattcctgtagcagatccacaatttcgcccagtgtgaccttatgtgtcacggggacgcagcagtaacggccatccgctttgagaaccgtttccacaccatcaaattcgcagtgctgctccttgccttccagcaggtcaaacatcccttctaccaagtcatcgatgtacagcagctccagctcggtgctacggtcgttgacagtgaagggttcgtcattggcaaccgcccagcagaaggtactgacggcactgttgtacttggggcggctgtgtcccattagattcggaaaacgatagaccgccacttttgcaccagtttcttgggcataatcgaagaacagctcttcacccgccttcttgctgcggccatactcgctgttgccaaagcgtccggccaaagttgcctgaatggacgaagacagcatgatggtggccttattgttgtgctttttcaggcagttcaacaggtcaaaggcaaagccaaagttgcccttcatgaaatcttccgggttttccgggcgattcacccctgccagattgaacacaaagtctgccttctggcagtattcgtccagttctgccggggtcgaattcaggtcgtattcatagatttcatcaatatgcagttctttgcgggtcttgttttttccgtctcggatatttttcaggttgttcacaagggcggttcccaccatgcccttggcacctgtcaccagaatgttcattttctcacctccgggcgtaccgctgtgcaatccggaacatctgctccatctggcacgactgcagaattgcaaaccgtcacattgctaccgatacgagcatacttgccaacttttgcaccagtgcgaacgacgctatttgcataaatgagcgcataatcttccacgattgcatcacaatggatttctgtacccgcattcagcaacacgccattgcccacgactgcaccattctgaacacaggcattctgcaaaatgacacacccattaccaagtttggcgtaggggctaacgtaggcactgggtgcaatgatattcgggaaagtatagcccattgccgcagctttctcatatacctgcacccggaagttgttattaccaatgccaaccacgagcaaaccataactcttgcgcaactcaggcaaattcgcaatctcaccaacaacaggagtaccacaaaccccagtcccaacaggttgtccatcgtccacaaaagcgcagtcatactggagcattgcctgctcggccaccatgcgtccaaaaccaccagcaccgacgatcaacagtttctttttcatgtgaaattatttcttcataatagtgtttctaagcatcttttttatcttatcgagaaatggaattctattaagtcgaaaagttttccaaactttttcatcgactggaatctttccgatttttatgtatttatcatatattttcagcattccttgttctttttctgccggaagatgtagaattgtgattcgattatattcataacaagttgaaatcagcctgaatcctgcaccagtccaaaaacgataaatatacgctcctgcattcttaatgctttccctcatctcattcgctgcaagagataaaataaactcatcacctttcgttgttataaaatttttctggagcatttcataatagacctgctcgcatgtgtcaacaaaagcttttgcattctctgcagatgctgcaaaaaattctccgccataatgtgtaatcagtttcctttgtccgcagtaactctcaatctcatcacacagcagaacataatcccgtgtgttcaggccatgattgatatcatatagcatgatattctgcctgcattctgtccaaatagcatcaaaacttccctgaatgtagacatcggtgtccatgtagcaaattgactcatacttcatacaagagagcttttttaggacgcaaagcttataaaatgcaagcgcccatgtataactaccttgaaatctaaactggtcaaatgggatttccatcactttaatctcccatttatcaaaaatagacagaaattcttcaggaatattccatctgccaaagtttgtaactagcgcaacatccgaatccggattgtaataattagccgaaatcaatgccacacaagcattctttaaatatatttcgattttgccttttccctttatagagacattgacccctgaattcatattttcttcataggcaaacggaatgcaaatcaaattcatgccagttgttcctctttacagactaattttacttatcttctttcaatgcattctgcacatactcagtggtcataattttcttaacggtaccttccacatccagccgggtggtgttgtggctggtgtaagactcatcggccatggtgtggacctcgcccttgaccacgaacttatcgtagttcaggtcacgattgtcagcggcgacacggaagtagtgccccatgtcctcactgcgcagacgctcctcgcgggtcatcagggtctcgaacagcttctcaccatgacgggcaccaatgatgttcgtgccagtgtcaccaaacagctgctgaacagcctttgccagatcaccaatagtggaagcatcagacttttggatgaacaggtcaccgggatttccgtgctggaaggcgaacatgaccagatctacagcctcgtccagattcatcaggaaacgggtcatattcggatccgtgatggtgatgggattgcccgccttgatctggtcgataaacagtgggatgacactgccgcgagagcacataacgttaccataacgagtgcagcagatggtcgtaccgccacgctcagccgccacacgggcatttgcaaagataacatgctccatcatagccttggagatacccatggcattgataggataagccgccttatccgtagacagacagacaacacgcttgacaccggcatcgatagcagcatgcagaacattgtctgtgccgatgatattggtctgaacagcctgcatcggaaaaaactcacaggacggaacctgcttcaaagcagcagcatggaagatgtagtcaacaccgggcatagcgtccttgatggactgcgggttgcggacatcaccgatgtagaacttgaccttcttggctgcttccgggtgttttgcctgaagctcatggcgcatatcgtcctgcttcttctcatcgcgggagaagatgcggatttccttgagatcagaatccagaaagtgcttcagcacggtggagccgaaagaaccggtaccaccagtgatcataagggttgcgttattaaatgcagacatttttatttcctcctatgtgcagtcaaaacacatctttcaagcaaattgcatcaagcataagtttcacatttggtcgcattttgcgaataaacagtggaaaaatcatgattgttgaaatttgtgttactactgatgcgaacgcagcaccagaagctccaaacaatggaatcagaaaatagttcattacaacatttgttattgccgacccgatatatagatatttcagatatttttgacagtcataacttataacccaaacatttctcgcatctcccaaataagaaaatgcaatgtaccatgtaacaattctcataggggtaattgctggcagatacgcttctccatacaatatcaaaatgatgtattttgcaaacattgtatacaatattgaaactccagcagaagtataaaacacaatcgcatataattgcctgcactttcgttcaaaaagctttatatccgattcaaatgcctccaatatcaccggatacattgagtcattgattgctgccagaataaaacaccatagaccacatacagtaaccgctgttgaataaaatccaacttctgtctcatccatcatttgctttagcatcagtttgtcggtacttccataaatcgataccatcagtgaaaccaaaataaaatgatggctactattcaacaattcttttacttttctccacgaaaacgaaagagatggtcctccatgccttctataattgtaataaaggcatactgcaaccactagatattcgattgaagacgctgctgcaaaccacaccacattcttttgaaacacaagcaatgagattttataacccatcatcaccgtgtatccaattgcggatgctatcgcagcatattttgattcaagttttgcttggaaccagtagttcaaggtatcaaaaacctgtggaattgctcccaaccccagcaacaatactactaaatgtgttgtcctttcttctcgatccagaaaaagtgttgcaaccataataagaacaactgaacagatacttgatatcatccgaacgccaatagctgatcctgtcgtttttccctcttcatttggatgatcaatgaaatttttaacaattaccgaattgattccaagtacacaaaatgtcgaaaaaaaagatgtgaacgatgatgcataattaatcaagccataatttgatggtccaagatagcgtgcagtaagcatgctgacaacaaaggacagactcatctggtaaatccgaccaataatcatccagctagcatttctcgtcactttatttttaaaaatattttttatttttttcattaattttatctctaagcaatcatttcacgatgtaatgtgcaaacttatacacatagaaaagatgatgtgacaaaataaacatccattgattgcactccttactcgatggaatataatcttctttattatcaagaatatattccaagagttttttttctacatctcggtattcgtctcttgtacgaacagccaaaatcctaagcacattcattcttgccttcagcagcatattcttagcaaggtcatgcatttggggaaattgttcttcaattttcttgtacttcaaatcagacactttcaaaatatcaaaatatttttcagaaaaaaccgtcctagatgaactttccgaattcgcccgataaaaataaatcacatcgtttgtcaaaacaaaaacattttgtttacagagaagttgaaatacaaaataactatcttcatttattcttatatctggagtaaaccgagtttttccaataaattctctccgaatcaattttgcacatgcggaatacgtaaacaagtgatcttttagagaattttcaagagcttctgcaccagtccaaattattctgtcttgaaaaagttcctgattctcacaacttcttccagcaacaacatccgcattcgtctcttctgcaatgtttaccgtctttgccaagcagtcttcaataagctcatcatccgcatcgagaaatacaacataatttccagttgcttcatcaattccttgatttcgagccaatgaaacccccaaatttttctgatgaaaaactgttatccgttcatcagcaaatccatattcttccgctattcgccctgatttatctgtgctcccatcatcaatcaaaatcaattcccagtttgtatatgtttgtctcagcacagactgaatacaactatccaaatatttttccgcattataaatcggcacaataatgcttacaagcgaatcatttaccgaaccaatcattttccatcaccttcgcttcgctgcagattccattttcatatggacttttagttttcttggcaaatattatattttcgcacaaatcaatcagtctttctgccgccacatctgcattccacaaatctgctattgtatggtaagcattcaatccaagcttcatgcgatactcggcatcatccatcaatctacaaacctgttgttcaagctgcttttggtttccgttttcatagatcagaccattctcttcgtccttgatcaaaaacggaaccgatccaatcgcatggcttgccacaactgcgcagccgctgttcatagattcattcagaaccgcgccccagccttcattgaaatcactggtgaagaggtaaatatcggctttttccatataggaacggacttcactcgccttcatagcgccaggcatttccacgcagtcttccaggctcttatctctaatcatgttatggagctgttcttccatttcacccgtaccaataagggtcattttgaaagaataacctttttccttgagagactccgccagccgaatggaagcatccgggtgtttccatccgatcaatcttcccgcccacaggatggaaacgcacgggcgcttcagcccatctgatgcagccgacagttttcctttcatcagctcatccggatcatatttttttgcctccggaaaatatccccatttgtagcattttccacgataacagccaaaacgagcataatcgcctgcagtataggcacttgctgccagcatataaagcggcttggactggaatcgtccgtgatgaagccacatcccacaaatgatatgcgcaatattgttccaatgaacgccctttttcaatggcctctcactgtacttaaaagtcagtttattctttttaaggcgtgtgataatataggagtccggtgcactcccaataattacaatatcactttcgagagccagctgttcagctttttcccgcagctctttgctttcatttgcttttatctcaaacgtgtatgtatctttatccagactccagcctaatttgatgcgttcctccgtcatcggctcagtagcgacaaatttgaaatcctcgcccagacgattcaccattgccttacagaatggaagctgatgcgggccaaggaaatttgatataaatgtaattttcactgtcttatccctttcttctgctttcatttccagaacggaacatacggactgactcccagatatccccagcctgtgtttttatagaagtacaacaaacagaacacaacacatccgcaataaagaaccatcttcagaaattttgaccgtgtcgatttttcaatcgactccggaattaggaggcattcaaagaaagcgaagtaataccccacccggccaatattcatatgataaaggcccaagcattggattgccgcagctagatacatacaatttatatacaggttccacggggcatcacatcgaataagaagggagcttataaaccagatcagagcatacaataagaaacaggcgtatgctcctgtaaactggatcgtattatagctgccaaacagtgtcgcagcgacttgtataatggccggtgctatgaaaatctcaactataaatgctccaagcatcaaaaaatgaacgatatgatttttgactttgatttttgaaagtggccatacgactatcccaatcagcgcagacttatggaacattgctgccaaaagaatcaatgctgtaaatttgagccactgctcctcctccgcttggagtacagccagcaaaaacagacctattgcaatcatctgccggattcctgagaaggaaaacgtaaacaagccgaatgtaaaatagatcaagatgctcaagcacggattttttgctcttctataaaagaaatagaaaattggtgcctgacatagcacagacatgatagcaataaacccctgccttggcacatggaatactgccagcgtatgaatcaggatacgaaaaatcagctcaaagttaaaaacgggatccaaccatccccgctgcgcactaagctcataccctcgcaggtactgtaccatatctccaccaacatactctgcacggagactctgcagtaacacggttgacaaaaaagccagacagacaaaagtcttctttttatctttcagtcggacgtgttttatcccgccataaagggttcctgtccataagatcaatccataataaggaatcatattttaatccgtactctgctccaaaagctttttgtatattttctcataattttccaccattactttttgagaaaatattttttgaccagcctcacaacaatttttcttttcttcatgatgttcagatacatttttcacagtgtcagtaagctgttccatatcaccatgtggaataaaatgcacgtatttttctgggaagcttccttcgccttcatctccatgaaaatagaaactgacaatttctgtgccacagcaaagtgactccagacaagtggtcggaaggcattcacgatagcttgtcaataccatcacatcagctgcagagtagaacgtcgcaagctcctcctgtccatttgcacgaccataatagataccgcaaaattctttcgggggcgggttattcaatccgtccacaacaacaaccacgtacttttcggaatccaaccgttgggacagttccgtgataaactttccgccctttacagggttggtatagcttgccgtcacatgaaggatcatcttgcggtcgccaacatttagtttttctcgaagaaccagcgcttctttttctcgataatgaaatacatctgtgtcaattccatttaatacggtgcagattggatactgcctcagtaccggcgactgtgccgctcgctctcccacccaattcgaaaccggacaaaggatcaggtcatcaaacccttcaaatgcttctttcatcttcttccagttccacgcagctgctccttttctggtggaattgattgcttctttttgatttgggcaattatgacaaccagtcttccattcattgcattcaaatgcgtacccgcaatttccggtatacataaactcagcatgaagcgttaaaacggttggaatatgattctttttcagataatttaaaagtcggtagatatccacaaagtaaccattgatgcactgcagatgcaccacatccggtttttcccgctccaatcggtgcaacagtgtcagtgttccaaatggtgtcacagcatacggctgacctgtcagccgggacagaacattccatgccttcgcctcaaactctgtacaggttttatgaacccctgcttcctgtactttctgacgacgtccatataaaacaacactgtcaaatccatttttctgcaggtttttatggatatctctcgtgatttttccagtgcttccatagtcgtatacacaattaatttgtagaactttcattttgtgacttatccaccacttcttgcagccatttgcgaacctttcgagggtttacatctgcgttatgatttttcaacgccaatgctctggcatttcttacaatctgctcccgtaattccttatttgtcagaatctcctcgagacctttttccagatcttccggccttgaaatcacatatgcggcattattttctttcagataatcgattgatgcgattccctctggaccataagcaagtaaacatggaccgtacattaaagactctgcaatcttagttgatactgaaaatcgtaccaactctttcattgcaggatcaaacgactccgtatggataaccatcacgctttcactcataacttctggtacttgttctgctggaatcgcccctcggaagttaattcccggtgcattctttaacgggctaatgtattctgcttccttagagcctgaatacacatctataactttcgtcagggtatcatcattgatttcagaaattgctcgtcccaattcaagtagagtcttatatcttccacaacttagattaccaatataggatactctgctagcatccgattttaataccatacttttgttatctgcagaggtatgcagagtaacgcactgcttgtgaaaaagattggtatatgccttattcatctcatcacatattgtaaaaattgcagctgcattttgtatggttttattaaccacgttcataaacagcttctgtcgaatcccgccgagaagctcgcctttatttcgattatttataaagtaatcatccatacaaactacagcaagaggtttactcaaataccgtgcaatttcatcagctaatcgatatgaaaatgcatcatctcccggtgctagaaatataatgtctgggttcatagaatccagccacgccaagagtttcttatttttccaattacttaatttccaaatcgtgtcccgtgcaagaagcatccatgctttgtgtgcggcacccaatttgtaagcatcatcaagtctgatgttttccggttcatccacaaccgggggaacaatttgggttttatcaaaaacagttccccgaattttatgattcaaaatagacttcactgcgtctaaatccgaaaagcgataatagttttcacatacatctgtattggttggctctccctgccgtaaaaaaaattgtgatacattgtttgcgggaaatgcactaaaatatgccattagtgtctttcccatattattcgagtagcttaagacaggttgacttataattaaaacattcatttaaaaccctcaacttctcgacgccttacaagtaatacttgactacacccttcacagcgtatctcataaatgcccatgcacttgttactgcattgagttttagtgccttacgatatattttccaccgttcctttgccgcattgctcttcttatttgatctcgatccgctaacctgtcgataatgcatcagcactttcggatcaccgtatgcagtcgggcaaaccctgagcagctccatccacaggacataatcctcatggtaaaagtccgcattgaaaggatgcccctgcatcagttccgtcttgataaagctcgttgagcaactaataacgcttgacaccagcattttattaaagttcgtttgctgcggaacgataaaaggcttcttaatgaggttgttttgttcatcgataaagtcataagagcaatagacaatatctgcgccatttctcgctagtgcaagttggcgctccagcttgtcttcggtccacaggtcgtcattatccagaagagcgatgaactctcccttagcctccttaataccgacatttcgggcattggccacgccagcattgtgttccaatgcaattaccctaattctgtcatcgctctgtgccttctgctggataagctgcaacgaatcgtccttcgagcagtcatctactaccagcagctcgaaattggggtaagtctgattaagtacactgtcgattgcctgctctacaaaacggtgaccattgtagttcggcatcacgacagaaatcagaatgctgtttttcatgccgccctccactgtttgcatccatacagtgcaggtgcggcggaattaacaacatagatttttctatgagggttactctgtgttaccccccccccccggagattttcaggttcgtgtacttaatcacattttttatcatgtaccagccctcataataagcggcctctatcggattcaatccgatataccgatatgtattccaattcatctttgcagccttgaacttgttgcccgacttcgatgattttgcaattctataaatgagcagcggctcatctacaccataggcctttcgtccatctttcaggatattgagccacagcgcaaagtcttcatgcattccatcgcctaccgcatagtactttgcatatagctccttacggacaagcgcagaagaattagataagacattctgtttcaacagctgccggtaggtaacttctgcaggagcagctagataccagtcgattggttttccatccgcatccatgaaagccgatccggtaaacagcaggtctgcatttgttttcttttgaagattgatctgcttttccagtttctccggtgcccacgcatcatcgctgtcaagaatagcgacccactcaccgctagcttcttccagcccatgtttccgggtgtaagaaacgccgctgttcttctcattcgaaatcaaccgaacccgatcatcttttttcacgattgcttcagccaacattgcggttttatctgtcgaacagtcgttcacaaccagaagttcgaaatcagggtacgtctggctcaagactgagttgatcgcttgttcaatcgttttttcagcattgtacgctgccataatgatactgatcagaccaaaatcattctgcatcacttcgtctcctgttccatcgccgtggtcgcaccttctgccacaccttccgtgctctccggcataaacaagatcttgacggttgccagcatgatcttcagatcctcgatcaagctgggatgggcgatgtacatcagatccatctgcagtttatcgtaaggagtcgtattgtacttgccgtacacctgcgcgtaaccggtcaagccagcctttgcctgaagccgcagtgcaaactccggcatttcttcgcagtactgggctgcgatttcaggccgctccgggcgggggccgacgatagacaagtcacccttgaggatattcagcaactgaggaagttcatccaaacggcaggcacggatgatatgacccaccttggtgatgcggtcgtccttatcgccggtggaaaggcgagccacaccatctttttcggcatccacacgcatcgagcggaacttcagaatctcaaactgcttaccatctttggtcagacgaacctgcttatagaacgcggggccaccatcggatttcaccgcaatggctgtgattagaaagagcgggctgagaacgatcagcgcaatcagggagatcacaatatccattgcccgtttcacaaacagatactccgggcttgccatatagcgccccacccgcagaaccggcagatggaacatgtgcatcggctgtgaaccgctcatgatcacatcgcccacacgagggatcacaaacacattgatgccctgtcccacacagtatttcaggatgatattgcgctcatggctgtgaacaccgctgatgaacacactctgcattccatccagcaggctcaggtcgctcagacattcttccacattcaatgtcatcttgacatcgtatttttttgaaaggccgtattcattgatgagcttttccagaccatgccggacatcgtagaccactgcggtgggctgaggcggaaaagtccggaaataccaggtatgggcgcatcttgcccacagggttgccatcatgacctgtccggcaatcgccgcagtacccggcagaatattgcagagccgtcgagacatcaggcagatcacgatatacaggatgccgtctgtcgccattgccgccagcacttgcccataaatcaactccgaaatacgctgcaaagacatccagaacgcatcgtagacttttcccagcaggaagaacaacaccgcaaacagaccgatcatggcccagttgcccttccaaccaaactttgcatagacctgatacgaataatacagctcccaacaaagtgcaaacggaatcgtgatcataatcagatcaatcactttcacgaactttagcattacatcgtgctgaaattttgacatagtaccccaataactccttcaattgttttctttggttctcatcagccttcctgatgctgccgtgggtcaagctttttccactgcatttcaacagcatccaacaaagcctcatactcctcctatcgcaatcaaggagtatcctccatttgaatcgttgagggcatagtctgattttttctgcgacatcgtgatttatttcaacctgtaactcctgtccgaccctttataaagcctgcgtgtaatgcgctccagctcctgtctcatacggttcagatcagagtgaacatatcgctgcagcgtaatcgttgcattggaatggcctaacagttcgctcaaggttttgatatcacatccagcctgcaggcaggtcgtagcgaacgtatgacgcagaacatgtgggtgaatttttcggatcctggcctgattcaggtaacattggatgctcttgcggtaacagcgtggttctacaggccgttcctcgttcccggagagaaaccatgtggtatcgctgtattttctgtgcaacttgcgtagagttctcagcaacggcttcggaagcggaagttcacggttagaatgctgtgttttgggggtctggatcacaacttttgtatgaccattcccacaacagattcgacagacagtgcgccggattattactgtgccttcatcaaaatcaaaatccccccactgcaggccgcagacctccccgattcgcaatccaagttccatttgcagaagcatcccgattttacgggtggttggttctgacaaaagaaattcccggagagaatcctgttctgtccgggtcaagggttgtggttctggtttctgtgtgtgtggcagtttgacgcatatctcgatgggcggcatgaggtgcagatgtgcagcatacttgcagattcgccgcagcatcccaagacattcctgtgccgaggatgcgccaagtggcttgtggctccggtctgtgggcgatagaatttgaagaaaaagacgttccagcaaagaatccgtcatacttgagaccggcagactgcctaaaacaggaagaaaatatttgtgcagagtgtactgataatgaacatatgtggattctttgacactctgcctgagagccgtaagccaaagcgctgccagttctgaaaaatgcatcgacttcccggagagctgatagaatccggacagagctttctgcttgatcagttcttcccggacttcgctgtacgcatatccatacaggtacccccatacgggttttccttcggcggtgcgccctttgatataacgcccctcccagcggccgtcctttcgcttatggatgttttctcctcgttttgccatctgaatgcctccctttacttgacccttgtttgactccttgtgagcaaagaaacgcttccgcaatttccataaattgcatttcttgcctaaaatcggataagattgcattagaatgttgtttttttctccgtcaatttggaatgatacaaggtatttctattgaagtgctggtaaattcatgataaaataaggcgagaattggtacaaggcgaaaaataagaggtatcttccatgattcaaatggaagatactccttgattgcggcaggagtgtgcgcatgtggcattgcggctgtcttgagcataatgagaggacctccccagcggcgatagagccgatagaagcagtatggcaagaccactgtcatttatccggccagcaccggtaagagtcaatattgcgttcaaactcacagagaaccactcggatgcggtcatttttgactgtctcccagtgagcacatcttcaaaatacagacaggaactcaattggtaaaaattgttgcacaggaatcttccttattatataagcggaataaaaacgtgtgaggaaaaatggtgaatttagaagaaacgaagtatcatgtggattttggtgaatattatgttcggatgacggataagcaaaagcattatcttgtggtgcgctctgtcatcgaccggattcttgcggggattgctctggtaatactttcaccgctgtttttgatcgtgagcattgcacagaaaatcagtgcacctgatgagcctgttttctttttgcagaagcgtgttggaaaaaatgcacattgcttcaacatcattaaattccggacaatgaaaagctctgcaccaaaaaatgtggcaacaggcgacttggccgacccacaaatatatatttcaagacttgggcgctttctaagagacaccagtattgatgaacttccacaatttgtgaatgtggtcaagggggaaatgagcttgattggcccccgcccgttggtatataccgagcgtgagattcgttttttgcgtcgatggtacggtgtatatcaagtgacaccgggcatcaccggctgggcacaggtcaacggtcgggatacggtggatatctacgataaggtctattatgaccgtgagtacgtccagaatgtcagcctgaagtttgatttgaaggtcatctggaagagcgttctggtggtgctgggccggaagggtgtcgtggatggaaaggttgatccggagttccggcaggaaagtattgtgctgctgcgggaaagtcagctggtgcaaaataggcaagttgaatgcacagacgagaataaattgccgatgatgtgaggaaatatgaaaaaggtactttttgtaacgcacaatggacgttttttagtccagtttgaattgaatgatatccagattctgcagaaacttgggtacgaggtccattgtgcaacgaattttgacggcgaaactatgcgtgcagacgctgaaaacaccttgaaggaacacggtgtgatctgccactcaattccgattgaacgttcacctttgcgattgagagaaaacctgaacgcatatcgggcgctgaaatcactgctaaaaaaagagcattttgcgggtgtgcattgtcatacccctatgggtggcgttgttggccgtctggctgccaatgccgcacacacggcaccggtactctatacagcccatggtttccacttctacaaaggctgtccattgaaaaaccggctgatctaccagaccgccgagacttttttggcccgctataccgatgcccagatcaccatcaatcaggaggattacgctgccgcacagaaattccccctgcgtggcaaggcgtactatgtacccggaatcggcgtggatgtgaagaagatctcttccatgcaggtggaccgagctacaaagcgaaaagaactgggcatcccggaggatgcgtttgcgttcctcactgtgggagaattgattccacggaaaggtcatgagctcttgatcagagcttttgcaaaatcaaacatttcgggggcacaacttttaatttgtggtagtggcagagaaaaggagcacttaactgccttgattaaagaacttgggatatcggacagagcgcatttgcttggcttccggaatgacatctatgaactgctgaaatgtgcggatgcttttgtatttccatccaaacaggaaggactgccagtggctttgatggaagcaatggctgctggcctaccctgcattgcaagccgcatccgtggaaatgtagacctgctgccagacagccggtatctgtttgagtcatcggatgaaagtacattgtgccagttgatgcagaatgctgtaaatggagtacaggttgaccaggaatgcgcccagaataaaaaagcgctggagcagttcgatgtgaagaatgtcagcgaatgcatgaggaaagtctatacgactgtgttagaaaagagtgcggtatgaagaaaaaagctctaagcattatcatcccagtatacaatgtcgaggcttatttggagcaatgcgtaaaaagtattctagatcaatcaacacctgaggttgaagtaattcttgttgatgacggatcgacagatgactctggaaaactatgcgataaatttgcggcgcaatccaaagagcttattgttgttcatcaggagaacggcggactttctgctgcaagaaatacagggctgcggtttgcaacaggtcgatatataacatttgtcgattcagatgactttattggaaataacagcattcagaagatattgtcatggatcgaaggatccagtgcggatatttgttttatgaatgcatggaagctcttcccaaatgggagaaaagaacttttggatgtgccaataccacatgaaatgctatgcaaaggaaagctgaatgcagtaaagtatctttctgaaatgaacaaatatcctggaagcgcatgtggaaaacttttcagaagagccttcctcacacagaataaactagactttccaaaagatagaagaatcagcgaagatctcggatttatgcgagactgcattctaaaagcagagcaatttgattcattgcccatcgacttttattattatcgtcagggacgaagcaattctattacaaataagatcacgaaaaagtcttttgatggcgtgggaaaatttgtgacagagtctgcagaaaagttgactttgcataaaaaagcaattgggacattagaaagctacgccatgagttttgctgcatatgagtattcgattatggtttggcagtatagttgtttgacaccgttggaaaagaaagcttcatatccatttctcaaagaatataaatgggtattagaatatggaaaatcacagaaaacactttttgtacgcaaaacatcagccatactggggcttcgtattacgtcgtccgcaatgaaaatatacatgcaactacgaaaataaatctatccgaaggagcaacgtaaaatttgtgacgatatacatatgcatagaagctgttttgcttgtacttctatttaagaaaaagccgcaccatatcggatattctctgatttcaattgggctgttgcttatatcagcttttcgggccgaatctgtgggaacggatgttgtgaattatattatcgagtacaaccttcatggaatcgaaacatggaaagagtctttcacaaattcagagtacacctttgcaatttactgcaagtttttgaatgttcttggcctaaaggagcgcggctttcttattgcaactgccatcctgtttgcaatgcttcttatgattgcactgcacgtaaatcattgtgataagattctgactttttcattgttttattttgccggactatatcttcagtcattctgtattatacggcaaagtctagcgattgttactgctctgatttcatatagcagccttgaaaagaattattctattcaaatgccatacaataagggacgctttcaaagatttcctattggctttgtgattggaatgattattgcgataggtttccatccaaccgtaattgttctctttgcgcttcccgtcatgatgctattttatgggcagaaacgttgcaggaaaccctctgtttttttacgggatggtattttgtgtatgtcagcggctttaataatactgcccgtcctttacccatttattctccaacactccaaagaaaagtaccaggttctctacggcggcagttatgtaaccggcccattcgggaactggaaaagcggcattctcttggttgcgctataccttatcttctatatagcctactacaataactggaaaaaactcaccgaaaaagaaaacatcatcgtcggcagtgttattatgctggcatttgcttgttcctcattgagtattatcaatagcactttgggcagaaccaatctctttttcgaagggctaatggtcctaatgcttggcaaattattgagtcatagatatacccgaataaaatccatcaacttctacgtcatcctcgtattttccgccttttttatactgtatctgatgcgagattcaattgtcgtcgttccgtataaaatatggcaataaacaatattgaaaggaaaacaaaatgattcctaaagtcatccattactgctggttcggtggaaatcctctgccggagctggcgcaaaaatgtatcgcctcgtggaaaaaatattgccctgactacgagatcaaagagtggaacgagagtaactttgatttgaattgttgcgattatgtccgggaggcatacgaggcaaagaaatgggcatttgtcagtgatgttgcacgactgtatgctatggttcatgaaggcggtatctacatggatacagatgttgaagtgattgctcctttggacagtctgctgcaataccatgcagtttcgggttttgaaactgagcattctattccaactggactgatggcatgcgaaaaaggcaatccgatgttcacagagtttctgaatgaatataaaacagcccactttctgttgcctgatagttcattggaccaaaccacaaatgtagtcagaattacaaatatctgtttaaaatatggctttattccaaacaatcagaaacagacgattcgcacttttacattgctcccacaagattatctatgtcctaaaagctttgaaacaggtaaaacagaactcactaaaaacacccttacgattcatcatttcaatggttcgtggcgatccgagcaagaagtttaccagaccgaactttccagaaaattaattgattattttccttttataccgcatatactccaagttcatatagctgcttttgtcgcagaaacaaaatttaatggtctaatccgtgctatctgtcgaacagcaacgtgggttaaaaagaaaaaataaacgtattaatcggaaggagttccatgctgtgaaaaaaataatgctagtcttcggtactcgccccgaagcaatcaagatgtgcccattggtcaatgagctgaagaagcgcaaaaacattgaaaagattgtatgcgtgaccggccaacaccggcagatgttggatcaggtgttggaagcgttttctgttgtaccggattacgatctttccatcatgaaggacaagcagacgctgtttgatgtaacagtcaatattctggaacgaatcaaaaccgttctggaagaagcaaagccggatgtcgtactggtgcatggtgatacatctaccacctttgtgacagcgctggcctgcttctacttgcagattccggtcggacacgtggaagccggactgcgcacctataacatttacagcccctacccggaagagttcaaccgccaggcagtgtccatcatcagccagtataattttgctccgacagagttgtcaaagcagaatcttctgaaggagggtaaagacccggacagcatctatgtcacaggcaacactgcaattgacgcgctgaaaacaacggtgcgggcagattatacacaccccgaactggattgggcgaaagacagccgtctgatcatgattacagcacaccgccgtgaaaaccttggtgaaccgatgcggcacatgttcaaagcaatccgccgggtcatggacgagcatccggacgtgaaggcaatttatcccattcacatgaacccagttgtgcgtgaaattgcgcaggagtatttgggtgacgatgatcgtatccatatcatcgagccactggacgtgctggacttccacaacttcctgagccgcagctatctgatcctgactgattccggtggcattcaggaagaggctccttctctgggtaagccggttctcgtaatgcgtgacaccaccgagcgcccggaaggcattgccgcaggtacactgaagttggttggtacggaagaggaaactatttacaaggaattcagtcgtctgctgtcggacaaggcagagtatgatgctatgagcaaggcaagcaatccctatggcgacggccatgcctgtgagcggattgcggatattttggaggcataaaaccacatacgaggaaaccatgaaaacgctttctataattataccaatttataatacgcctgaagaatatttttcaaagtgccttgcttccttacagtgtgcacatgcacatgaagttgaaatcattgctgttgatgatggttcaaagccggagttcagcgctaaaatccaaaagttgattgacagttccccgttggatatccaatattataaaaaggaaaacggcggacaaaactcagcccgggaatatggccttgaacgttcagatggacagcatatcttctttatggatgcggatgattatgtcgatacgattgtattggataaaatcattgctctattgaaaaaatatcatccgaaagtgttggcatttaattatgatgtccgttcaccaaatggagttcttctggaaaagcatgatcgttggctcaaagaatacagtgaagcgagtgcgcataccggtttgttgtacagcgattcgttatgtatgcagatttatgagcgcagggcgctttgtgagtgcgggattcacttagtacaaggagtaaaaatcggagaagactttgcatctgcgacagcaattctggctgcaattggggaagaatatacccttggtgagtgcttatatcattatgtaaggcggcccggaagtacattgcagagtccgcctaaggattcagcgcttgacatcgtgagagcatttgatacagcactacagcaactgactgaacccatacaaacagaataccacgacgagctagagtggctggcaattttgcatatattggtttataactctatccgtattctggaaagctttgatggaaataaagaggcgctccgaaaaacacgtgaatgggttgaagaaaaatacccgaattggcgaagaaatcactatttgagaacagaaactatcgtaaaaagcatctcgttccaattaataaagaacgatcatatttctctgtggacgatacttcgcaaagtgaagagaagcatcagaatattcatcaaacaataataactaaaccatgaatgaacgaaaaaaaggtgcaatattatcctatatacaggtgttcctgagcgtagttgtcagtatgatctacgtcccagttctcctgcactttctcggacaaagtgaatacggattgtatcagatcgtcggctcattcttttcgtatgtcactgttttcgagtcctgtgtgtcggccggtattctaaggaactactgcaacgccttggggcgcagcgaccatgaagaagccgctgtgaccctgtcgatggcaagaagcatctatcggtttctggcaatcattctggatctggtcggagtttccgtggtgtttgccttccggagcttctacgcaggttcattcagtacctcagagctgaacgaaagcattgctattctgatccttctgttcgtaaatatgactttcaccttgcagggttcggtttatctgactgtgcttaccgggcatgagaagtacacctttttgcgtatattatccatcctgatgcaggtcatccaaccgcttctggtcattttgtgcgtcagccggatcccatatgcaatcacagtctcggtggtgatcgtccttctgaacctcctgaccattggaattcggtatggctatgtgacccaaaaactaaaaatacggatcacaaaacagcccaaagattcccggatcgtgaaaaatatccttgggctttctgctgccatcctgcttggaagcattgcggatcagatcttctggaaaacagatcaggtcattctgggacgaatgttcaacaccgcagtcgttgccgtttattctgtcggcgctcaaatttacatgatgtacatgcagttcggcacacaggtctccggtgttttttatccaaaactcagcgccttgtatcaagaagaaaacggtctgcagaaagtatcggatttgttcatccggataggacggatcaccttctacatcatccttctggttttatccggcttcatcgttttcgggcgtgaatttctgctgctgtgggtcggagaaggctacgaagaagcctattgggttgcaatcatcgtcatgcttccattttccatcgatctggcgcagaatctcggactttgcattctgcagatcaaggggcagtacggtttccgtgcaaagatctattttctgagcgctgtcctgaacatcctgacgaccattcttttcacaaaatggatcgggatcatcggtgctgcactttctaccggcatttcgatgttcctgaccagcggcctgatcatgaactggtactttcaaaaacgagccggtctcgacatccggaaattctggaaggagactctgcccattatcatcgccacacttttgctgaccactggggcgctcctgctcaagcattttctggtatccgagcgcacaggttccttcctgacgttcgggttggaagttattctttacaccacactctacggcatcgtcatgcttaaaatcgtggcagaccgttccgaaaaggaacaatttcttcaaattgtcacaagcttgaccctcactctaaaacgaaaataagtgcccacctaacgaaaccacatgctttttaccattgggggttgtaatgccgggtggcattcgattcgaacatctgccggatatagcgattttgacccacccggagcgtctcaagcagatgcagccttggagaaatctcgtctgggaaaactttgcgtgacaaacaaaacgaggcatccgatttcaacatcgagtgcctttttctttgttgcaacgtgttttctccgaacagccaccatattttgccccggactggggagaacagacaacccttccgttcagccagaataacccccggctccagatttttaactacccccaccccccacttctgactgcctctgacttctgccaaacaaaaagccagcatatcatacgcaaatcgtacaatatactggctattccggttattctcttatccggctttctgcgtgagccacttttccactgtctccatgctgaagccaatcgctcttgcaatctgctctatcgtcagaccctgctcatagaggttcttcgccgtcatctgagcctgttcttcccgaccctctgcatgacattctgcgcggccctctgcatagctttcatctctcaggtcttccatcactttacacatttcgctcactcccttcggattttccttcagataccggggcttttcggcaaggatctcaaaattcatatcatcggcactggtgcagttgaagtcgtgcatcagcttgccaatgtcagagtcatcccgatattcaccgtttacatacaggactaaaccggaatgtcctactccatccgcagatgccgccacaccgcaggacgacattacatgatattcaaaataagatgttccgatacttttctgcttctgtgcggataatctgcaaatcatcttcatatcccatgactttgcaaatgtaaaaagcttcccgatagcgttcgacactctcctccttttttccaagaaagaagtcgcattcagcttcgatttccaaacacgagtgaagcacctgataatgtccatattttatacatgcttcttttccgtatcttgccacctttgcgccttcctcatacttttgcgacaaatccaacgatctggcaaaattatacaaaaccaagggaagcatcctgtttgaagtaaccgtttccggaagatgctttcttatatattgaagcagtcgatagaaaatatcggctgctttttcattgtcaccgctcaaagaatacgcatttccaatttgattgaccagtttcatttcatccaatgtaaagagaaagtcttcaattttgtccagttgaaaatccggtatggtcatccgaatggcttgcaacaacatttgaatccgttcgtcatttgaatatcttttatccaatcctcccaaaaggactttcgatcgaagaataaactgttgtgtgatttgatcatccggctttgcaattttctcaagccgacttattttgtcaaagccctcctcaacgcactttagcgcattacaggaaacaatttccttcttgagtgcttctatttccagttcttccggtgttaccaacgcataatatcggtcatccggcagaccaaggcgctgcagaatcgcattgattcgatttcggctgggggtctgttttccgttttcaaatctggacaatgtaacggattcacaaatgcctgcacagacctgctcctgtgtcaacccgagatccaaacgccgctggcggatatactcccccaatttgtaattctgcatttagcagctccctccaaactttagtattgccataattgtaatatactagattttgtacatgtgtgcaagcgtctcttatgaaaacctgtcgtcccatgtaattttttattacaccagacgatatggtcaattgaaatcttttgtgataaaatacagaaacagcagatgaaatgcattctaagctctttgacatacgcatggaggaaacaatgatacactatctgaaaaagcaatggaggctcagtaccctcacctgcttgtttgccatcatcgcctatggtgctcaggctctgattcagcttgccttgatgaagatttttgatgccgtggtattgctggatctgcggagtactatcttttggacggcagttgatctgacctgctggggaggctattttctttttactgctttacaggagcattgtcaggccaaaacaattcgcgctttgaacaatacggtgcgagatgggctgtatcactccttcctgcgcaagagccataccgattttcatcagtccgacaccggagaatatctcgcccggctgaccaatgatatgaagcaattagaacagcttacgtggattcccttcttcggctgtgtaggcagaattgcgcagatcgtgttcagcattttgggacttgcctttttgcattggtcgctggttgttttttccgtgatcacagcagttgttctttggctttccccaaaactgttccagaagaagctggaactactggggcaaagctgcggtgtgcagcagactgccgccatcaaccatttgaaggaccttctgacaggctttgacgtactccagttttttggcagaggaaatctctttctccagcagggaaataggatcagcgatgacattgaaaagcccagttgccagctgagctatggtaaatctcgcatggaggcgttgattggctttatcaacgtcgcacttcagctcggctcgcttgtgctgattgctgtgctgaccagcatgggacttgtcaccacaggcacacttgccggtggtgtcaatctgatcggaggcgtggcaaacggctttaacagtttggccggtttgcgtctctccctctcagccagcaagccttactttggcaagctgccaacggtcgatactgattccaaatcggaagaggttgctcctatgtcaccgctgaaagcctccattacggtagatagagtttctttcggctatgatgagaaaaagcccatcctgaaagatgcctccttccgctttgaaaagggcaaaaagtatgccctgacaggcccctccggctgcggaaaatccactctgctcaagctgcttttgggctggctgccggactataccggtacgatttcgtttgacgatgtggacattcacaccgttacacccgctcagctccagcaacagatgagttacattgagcagaatgtgttcctgttcaatactacgattcgggagaacatcacactgggtgaagatttctcggaagagcagttgcatgcggccattcagggcagtgcccttgccgcagatttggccgccatgcccgatggccttgacaccgttgtaggtgaggatggcagtaatctttccggcggtcagaagcagcgtgtcgccattgcccgtgccctgattcacaatcgctccatcctgctggtggacgagggcaccagtgcgctggatcagaaaaacgccgaccttgtggaaaagagcctgcttaccaatcccgacctgacactgatcctcatcagccaccacctgtcggcagcgcgccgtgcgcagttcgaccgtgtgtatgagctggcacctgtaacacaatgattgccctgtaatttcccctcaaatcgcaaatatgccctgcataccgatcaatgccggtgtgtggggccttttgcagtgaaaccgagacactccacaaggctgctcatatcctgaccaccaaggacaagcctgccgattgcacggacgaccccttccttgtggagaagatgtgtgccgagttggagggccgatgcgtagtagttcagcgtggtggaggtctgtgcgtgtccaagccgcccggagaccgttgtgatcggtacatgtgccgcaatcaggatgctggcattcgaatggcgaaggctgtgaaagttcacgtccgggagatcgtgtgtttccagaaacttcgggaaccaggacgagataatatccgggtccatcggctctccattccatttcgtgaatagcatatcattatccaccactttgccattttccagtgtgaccttacgcacccacgctgaaccgatccggaatctctccgctttctggtatcgccggtactcctgcagcagttccacgcaatccgctccaatgcgcaggcacctcttgcctcgtctggttttcggtgtgttgaacacaaggcctatcccggggatggactggaccgtccgcttgatggaaagcgttcccttctcaaagtcaatgtcagaccagcgcagggcgcagatctcaccccgccgggcaccaagcagcaaggccagctgagtgatcacgctgtactgcggcggtgcatccgagagggcatccagcagctttggaatctcttcctccgtcagtacccgaacgtcgatttcctcggctttgggatgttctgcacgggagcacgggttctcgttgatcaatccccactggacacctttcttaaagatgctggagagcatggcctgatagcggatgacggtgttgttgttcagcttcccatccttttgggtatgctccacaaacgcctttgagaaggtcagccccaccacagcagatactttttccgccgtctttcggctgacgttcttacctgcatagaccatccgcatggtgtcctgaccgatctcggcctgtttcgccagttcaccccgggttccatgtgggagcagcttcagaagggatttcgtggcggtgtaggtgctgtcccggcgaacacccttctcttccagattgttgtagaacgccatcacatgcgccggtttgatcttggacaccttgagatgcccgagtccggcactgatccggccacgcatccttctataatcgtagagcgtcttggccttcagctgcttgttggcgtattcctcaaaccagcggtcgatcaggtcatccagcagcatgtctgagtccagcacgaggccgttcgtgacctgctgcgaatcctctctgaccggctctccctgtgcgaagaactgggccagcgtgtccatgttgaccaaccactttcggcttgagatggccgtatagcagatcttgcccgttcggcagagcttgcggacatattcgggtgtcacgttgaaccgtgcggcggcgtttttcacgctggccatagtgggataagggttcagaacagtttagagtcccctcagcccgccagatgcccccacgtcattcatttttaattaaatcctccggcaggtgctccggtatgcgcacaaagcccctttgaagctgtcgcatttctgtcgcacttttcaagccccgccgggcggatataacaaaaagaaacccacgatccaagccgcatttgaaacggtgaatcgtgggttttcctttggtgcgctcgagggaactcgaatccctggccctctgattaaaagaatcaaaggtgcatcattcgtcaaatttcaaaagttcgaagaagcgttatttttatcgtatcatcgcaaaacactcctttgcacacaccgcattatttgcatacagtgtaatgctttgcaaccgttatccagctattcaggtgtgcaaaaagtgtgcaaaaatgtgcagacgggcaaaacaaagcccaatggacaaatcaaccaccggttttatggcagggttcaggacatccgaacagacaccgtttgatataaaaatgaggttcaccatgaacaaactgctttcctgccgccattgagaaaaagcaatccccacagccacaaaaaggactgtagggattgcttttatggtgaaggagaaagaggagaaagagaataacgtgttaacccttgtccgcgccggaggtgatgccctcgacgtagaacttctgcatgatgacaaacaggatggagatggggatagacaccagcacaccgcctgcacagaaaagcgcaaagtaattgttgatcagggtcttttgcagcatattatacagaccgatagccactgtccagtcggcagagacgcccgaattcaggatcatttttgccatcacgaaatcggtccatggaaccatgaaagagctgatgatggtatagaccaggatcggcttggacatgggcagaacgacctgaaagaacacacgggcatcggatgcgccgtccagcttggcggcttcccgcagggagatggggatggtatcaaagaagcccttgcagatcagatagcccagaccggacgaaccggcatagaccatgataagaccggcataggagttggtcagattcagatatttcaggacgaaatagacggcgatcattgccagcacgccggggaacaggttgacgctgacagaaaggttctggatcagcttgcgccccttgaagcggcagcagctcagcgcgtaggctaccatcagcacaaagcaggtggagataacgcagttgaaacaggccaccacaagggtgttggtaaaccagcgcgggaactgcgccacagagtccgggtggaacagaatgttgacatagttgcgcagtgtgtaactggccgggaagaactgccgcacattgatgccccggtctgtggagaaggaagtgaccagaagccacagaatgggtaccagccagatagctgccagcagggccagcagcagatgccgcaggatgctgcggactgtgcggaggatacgcccgcggcgcagctgcgctgcggtctctgcccggcgtgccggagaaacagttgtctgtgtcaagagaacgtcgcctcctttttattgaggaaccggaagcataccagcgtgaacacggcacagatgatgaacaccataatgccgatgacggcggccatcttgtagttgtactgctcctgcgtcaggcggaacagccatgtgaccagcaggtccacctcttttgcgctggaggaagccagtgcctgatccttggtgatataaacgtcctgcgtgagcagatagatgacgttgaagttgttgacgttgcgcacaaaatccgtaaccagtgccgggccctgcacactgagcaggtagggcagcttgatgtggatgaagctctgccacggcgaagcgccgtcgatggtggaggcttccagcatatcggtgggaatattcatcagcacaccggtggcaatgagcatctggtagggcacgcccacccagatgttgatgaggatgatcatgaactttgcccagtgctggtcggtcaggaagggaatgtggttcatgttctgccccagcagaccgatggcctttaaaaaatcggtcacgcctgcattggccatcatggtgttgaagatgccggcgtccgagaagaagttgcgcaccagcagcagggtgacgaactgcggcaccgcaatggtgatgatgaacaatgtgcgccagagcttttggcacttggtctttttattgttgatgagcatggccagaaatacgccgccgaagaagttggtgaaggtggcaaagaaggcccataccagcgtccagctgagcacccggccaaaggcgtagctgaaggtcaggctcagcgactgcccgccaaacagagaagcgaagttcgccagccccacccatgtgaacagggcggcgggaggcatatgctgctgatcgtagttggtaaaggcaacagcgatcaaaatgaacagcgggatgatggtgaacaccaccacccccagcaccggaagggtgagcagggtaacgtagaacttttcgttcaggtacaaggtgatatcctgccggaaattgttgggctttttgccagcggccttctgcgcctgtaacgcgtaattgctctgcaccaccagcatggcagcagcgatcagcgttacaatgaccaccagtgcgatcacgctgagcagcaggatggcaaacgagttgtcgtagttgttgacctcgttttttaaggtaagggggttgaactgcatctccatctgcaccgtgcccagcgtgccgaactttttcagcgcaggaatgccggaagtacccagaaaatacagtcccagcccctgcaccagcgttaccagcagtgccttgataagctggccgtggccaatgtagcccagaccccagacaaagagggacagctttgtaaaaatatctccgtgaacaaatgcgtgaccgaacttctgaaggaaattcggctcccggccatctgcccgcaagggcggtgtaaggaccatttctgccacagaagtcaactcctttcttggtatgcagagggggttatagcaaacaggatgttaggttgacgccgatttcttgtattgcgataaaaagcgggcacaccgcattctgctgcgtgcccgccgggaaaaaccggaacttactgtgccacaggtgcggtgatgccgaccacagcgtcatccatcagctgctgggtggtcttgccctgcgtgtcgccggaggcgaggatctcgcccagacttgcggcggagctccagtagtttgcgcctacccgctgcagggtagcgtaggagctctgctcagccagtgcggcaatggcaggtgcggactgcacagcctcggtggagtttgcgttgatgttaga

SEQ ID NO: 400 - DNA, 17693 bp, unidentified
  source 1..17693: mol_type = unassigned DNA
  misc_difference 3271: note = a, c, g, or t
  misc_difference 3272: note = a, c, g, or t
  misc_difference 3273: note = a, c, g, or t
  misc_difference 3274: note = a, c, g, or t
  misc_difference 3275: note = a, c, g, or t
  misc_difference 3276: note = a, c, g, or t
  misc_difference 3277: note = a, c, g, or t
  misc_difference 3278: note = a, c, g, or t
  misc_difference 3279: note = a, c, g, or t
  misc_difference 3280: note = a, c, g, or t
  misc_difference 3281: note = a, c, g, or t
  misc_difference 3282: note = a, c, g, or t
  misc_difference 3283: note = a, c, g, or t
  misc_difference 3284: note = a, c, g, or t
  misc_difference 3285: note = a, c, g, or t
  misc_difference 3286: note = a, c, g, or t
  misc_difference 3287: note = a, c, g, or t
  misc_difference 3288: note = a, c, g, or t
  misc_difference 3289: note = a, c, g, or t
  misc_difference 3290: note = a, c, g, or t
  misc_difference 3291: note = a, c, g, or t
  misc_difference 3292: note = a, c, g, or t
  misc_difference 3293: note = a, c, g, or t
  misc_difference 3294: note = a, c, g, or t
  misc_difference 3295: note = a, c, g, or t
  misc_difference 3296: note = a, c, g, or t
  misc_difference 3297: note = a, c, g, or t
  misc_difference 3298: note = a, c, g, or t
  misc_difference 3299: note = a, c, g, or t
  misc_difference 3300: note = a, c, g, or t
  misc_difference 3301: note = a, c, g, or t
  misc_difference 3302: note = a, c, g, or t
  misc_difference 3303: note = a, c, g, or t
  misc_difference 3304: note = a, c, g, or t
  misc_difference 3305: note = a, c, g, or t
  misc_difference 3306: note = a, c, g, or t
  misc_difference 3307: note = a, c, g, or t
  misc_difference 3308: note = a, c, g, or t
  misc_difference 3309: note = a, c, g, or t
  misc_difference 3310: note = a, c, g, or t
  misc_difference 3311: note = a, c, g, or t
  misc_difference 3312: note = a, c, g, or t
  misc_difference 3313: note = a, c, g, or t
  misc_difference 3314: note = a, c, g, or t
  misc_difference 3315: note = a, c, g, or t
  misc_difference 3316: note = a, c, g, or t
  misc_difference 3317: note = a, c, g, or t
  misc_difference 3318: note = a, c, g, or t
  misc_difference 3319: note = a, c, g, or t
  misc_difference 3320: note = a, c, g, or t
  misc_difference 3321: note = a, c, g, or t
  misc_difference 3322: note = a, c, g, or t
  misc_difference 3323: note = a, c, g, or t
  misc_difference 3324: note = a, c, g, or t
  misc_difference 3325: note = a, c, g, or t
  misc_difference 3326: note = a, c, g, or t
  misc_difference 3327: note = a, c, g, or t
  misc_difference 3328: note = a, c, g, or t
  misc_difference 3329: note = a, c, g, or t
  misc_difference 3330: note = a, c, g, or t
  misc_difference 3331: note = a, c, g, or t
  misc_difference 3332: note = a, c, g, or t
  misc_difference 3333: note = a, c, g, or t
  misc_difference 3334: note = a, c, g, or t
  misc_difference 3335: note = a, c, g, or t
  misc_difference 3336: note = a, c, g, or t
  misc_difference 3337: note = a, c, g, or t
  misc_difference 3338: note = a, c, g, or t
  misc_difference 3339: note = a, c, g, or t
  misc_difference 3340: note = a, c, g, or t
  misc_difference 3341: note = a, c, g, or t
  misc_difference 3342: note = a, c, g, or t
  misc_difference 3343: note = a, c, g, or t
  misc_difference 3344: note = a, c, g, or t
  misc_difference 3345: note = a, c, g, or t
  misc_difference 3346: note = a, c, g, or t
  misc_difference 3347: note = a, c, g, or t
  misc_difference 3348: note = a, c, g, or t
  misc_difference 3349: note = a, c, g, or t
  misc_difference 3350: note = a, c, g, or t
  misc_difference 3351: note = a, c, g, or t
  misc_difference 3352: note = a, c, g, or t
  misc_difference 3353: note = a, c, g, or t
  misc_difference 3354: note = a, c, g, or t
  misc_difference 3355: note = a, c, g, or t
  misc_difference 3356: note = a, c, g, or t
  misc_difference 3357: note = a, c, g, or t
  misc_difference 3358: note = a, c, g, or t
  misc_difference 3359: note = a, c, g, or t
  misc_difference 3360: note = a, c, g, or t
  misc_difference 3361: note = a, c, g, or t
  misc_difference 3362: note = a, c, g, or t
  misc_difference 3363: note = a, c, g, or t
  misc_difference 3364: note = a, c, g, or t
  misc_difference 3365: note = a, c, g, or t
  misc_difference 3366: note = a, c, g, or t
  misc_difference 3367: note = a, c, g, or t
  misc_difference 3368: note = a, c, g, or t
  misc_difference 3369: note = a, c, g, or t
  misc_difference 3370: note = a, c, g, or t
atgtacacaaataatgcatatctcaaccactcaacgatggatagaaaagataaatccaagccgcttattgtaactatgtgtggaacatataagttatacacgcatcctaaactacctacctggagacctcgtggcagactcgattttcagttgatttatattgctgccggaaaagcgcatttccactttggccgcaatagtgaagatgaaactattgttcatgccggacatatgattttatatcgtccaaaggagcctcaaaaatatgaatattatgcagaagatcaaactgaagtctactgggttcattttacaggcagtgatgtaacaaatatattacgctcttatggattgaccgatgacaaaagggtattttactgtggttctggtccctcctatcaaaatctttttcgtacaatgataaatgaattgcagatgtgtaaggatagttatcaggaaatgcttgaaatgtatttaagacagatatttataaaactgcaacgacactttaataacagcataaggatagataattcccgtgctgctgaaactattgacatggctattgcctattttaatgaacattatagcgaatcaatcagtattgaagaatacgccaaaaaaattcatgtaagcacaagctggtttatacgcaacttcaaactttatgtcggctctacacccatgcatttcattttgcaaaaacgcatttgtaatgcagaagccctgctcttgaatacggaatataacataaatgaaattgcacaaattgttggttatgataatgctttatatttcagccgcatattcaaaaagataaaaggcatatctccctcagaatatcgtaaaaatatataaaaaactgcaatgggaagagaatttacaccctctcacccattgcaatttttgtccaattatttttttattttggcaagtaatatactctttcatgttttataatgacagcgtaaacaaaaaggagatgaacatctatgagaaacaaattccacaactttattgaaaacttacttagcttttatgcagactttttcacgcacagattttaccctatgtaatgtacagttgccccacaaacatatcttacagaacattatggtaacgcatgtatgaaaaagcacaaatgaaagcagcttttctgaccggttaaaattagggtggaaattccttattttaacttgtactaaatcttgacattggattattttttaatacttaaactcttcatacaatactttatccaaattatgttccgataaaaaggaaaatattatattgcaaaacaacttcaccttattctcctccaccacatagcttaaagaattaaaagcgcccttttctccctcaacctcatactttatctttctttcctgaatttcatcttcaaatccgtacatccccattggaataacaacattataccctttataattaacataaactctacatttattttcttcatattgaactttcaatgaacataagtcgttttcccaaatatcaaatttttctttcttttggattctccacatttcattttctccatttggtatacaccactgtatcatcagataactttattttccatcaatgctttttctattcgctgcacctttttcgcatcatccaaagttttccacgcatgatgtgtcacattgggcatctccacacaaatagttttttccggctcagccattaagtcttcaaaatcatccgcggcgcaatagatgcattttttatggttcattgcaaagtcaatctcactttcctgtatcctgtcacaagtcatgccaaatatatgattaattatattttgtaatttttcttccgaaaattctttttgatgcaaatttaaaatggttttcactttgtcaataaaatcattataaacatcatcttctaacaaattaatatacgcataactcataccgttatgaaatatcactaatctctcaccatataaaaaatctgataaataataaaattcattaattttcccacaattcgtgcatctagcagtttctcttcttacttttattttcatattcatcctataaaatatctttttgctttatcaccaatttgctcgatatttttcatttaaaacagaatccatattattatcaaccaaaaagaaatatatttcatctaaaaacttttctttatcctcttttttaataacaaaatgtttatcaaattggtcgttgccttccatacgaacatcttctattgatgccaactttaaatcttctccaaactcccataccaacataggtattgtcaaattaaatcccttatagttgatatatatttcatcattctccatcaattcaaaaacttttatttttaaatcaatgtctctgtttacatatattatataattctcttctgttaatttatcccacaacatataaaacgccttttatatcctctaatcccgattacatactattgcttttatagtgaaccaaatcatatggataatacggtacatctttcaaattgctgtcatctaaatttaatatttttgcaatagctcctgcttcaaaactccagtaaccgtaatacaatttttcttttgctttatgaatatcgtaccatcccatatttttatgtcccacataccaatatttttccaagtattcttttaatttttcaactgctttttctttatttgcaacaatatccgtcaacttatcataagggaagccataagaatagtctcctttcagttgtcctatgtttccattcattttgtaattaacaaaaaattccaacaaagcatctttccgattatattgaattcttttatattatctccaatgatgcgcttttaagaatttatccggaattcttaacttcagttctctttctaattctttaaaaaagacagcaaaatcagcttcttcccaccattgttgtgagttacttaatgccactgttctttctccatataaaatgcagcatccaaatcttcctctttcatagttcaaccttattggaaaataatcatatgctgtaaattccacgctgaatgctcggttattcacatcatcatatacgtccgaaatgcaaaaatctttaaccttatcccccattttttcttttgccattttagtaaaattaattgccattgtttgtgtctcattaaattccataccaataccctccgtattattatctaccagctacttcttttgtgcttattatttatgctctcttatcattgaattaatgccattaaaaaaagcannnnnnnnnnnnnnnnnnnnnnnnnnnnnnnnnnnnnnnnnnnnnnnnnnnnnnnnnnnnnnnnnnnnnnnnnnnnnnnnnnnnnnnnnnnnnnnnnnnntgtcatctaaatttaatatttttgcaatagctcctgcttcaaaactccagtaaccataatatatattctggtcacttttatgagcctcataacactcgtattctttattataccagtcttctttcaaatatttctccaataactctgatttatctctttctttaactaactctttcattatttgaaatctgtctggaaataaaagtggtaaattaggttgtttttcccccatcagaaaaagcaacaaccagtcctttaccgctttttctttcagttttctttttgttaatgtaatcagtttttgctctatttcaaataggactgcaagtgatatcatctttaaattctcattatatgcaaccggtgaaaagaaggacattatccactcttcatatatttccataaaatcacttcttaaacaagctatgttatctcccttagaataccttgctattataattccaagtttaatacgaaaaattccctgttttactggtactaatctttctggtctaacttctccgtcatttactttttttgttaattttaaaattctagctgtatcttctgctatgaattcatcaaaatatttttcacttttaatactatctctcattctcttggtctcctttaatctattgctgtcacatctaacacaccatttttatcaatatggattagttgttttccatatccctcaactaaaatatcatcatacatttccttccctactgcttttaaaagtctattacttccatatatccaatcatcgctcatttgtggtccatctaatgtatttcctaatcttgagcttccatactttgcttctccaattacataaggcggatgaccatttggattgtaatatacaccatcaattccctgatgatttggtgcatttaaatcagtcactctatcaagacttatcctctcatatccttgactttcaaaatatgcatccattttcatttctccataattacctttttgaatattattgcttaattgaatttctccattctctaccccttttattatatcatctacagagaaattactactttcaaccattccctgcttcatcaaatcagtaaacgatttctgtttaaatttcacatccagtttatccatcccatgtgaagtaagtccgctggccagcattcctgccatcattcccacagtctggttccccgataaatctgttgtcaacttcgagacaccctcgcccgccaatgttgaaagtccttctttggcaattatcgttgaaccgcttcgaaaagtaagttttcctactgtcgaagctttcccaattggaataaaggctgatgctgcgaaagaaaatacaccctccgtaaaataatacgcctcttcatttccctgaaagactacttcttttagctgattcacagccgtactgtcaagatcactaatacttccataataaacatcctgtgccccttcggctgtatctgtaattccaaaaacggttgttccgcttccaatcattgtacctgcggctaccactgccggagttgctgctccaagcgatgctgcaatacatgctacaccaactacaaccagtacaattccgccgattgcttttataacaccttgcacttcccgttcttctgccgcatcttttagctgctgttctacatcccatattgcatcataagtttcctgattaactgtatgctgctgataaaaatattcactcagatatgccagtgtatacacatcgatgtcagcataaaaactattgcttgtataagtagtgattgctgttttactggttcctatttttccaaggcagttttttatactgtcaaccatgagatctactgtattttcaataattgttaccatagtactttcctgtgtctgaattgtctcaataaaattcaaaagttcctgatccagttgttcatgcagttctattataccatttgttcccggtgtattcacgtctgaaatatccgagatattggataccgcctgctgtacactctgagcataagattccgcatccgctgaattcgtagccagttttgtgcgaaactcccggattgcttcctcatccagtctaaagttcgtcgaaccatctatctcattataacatgccttatgataagcaatatcatctagcatattttgcgttgccacctttaaacaggatatcatagtaatatgtacatcatataaataattttttgctgctgttgccgtctctcctataaactggtcactctgaataaactgatttatacttctttcacacgtttccaacttacttatcaagccttccagctttgacttatactcccataacagattatttatatctgtatatttgattacaaacccttccattcttctcccccatccttctatggatattccagtaaatctaacaatgtattactttcctttaactgattactctgctctctgtcccgttctatccaggaatttgatatttcagatatattacatatatctgaaatcaatatctgttcataagcacttactatatttgcaagactctcataactgcttaaaaacttctctaatgcttctgattttccactaatatctgttgttgttgcctccagtgaaagaccacatgcatccatatatatttttccgatatctgattccgtggctatctcatctaaaatagttatcatctgttccactcctgttttaaacattcctgctaattaaaaaagtttcgaatttttgtacataaatcatcccatgcatttaccagtttcgaaagtgctccatatttctcattctgtttttcctttaaagcattaatctcccagttgatttcatcttctacactgtcaataccggaaatatatccatcatagtctgttttcaatccgccactctcacagatttcataaaaatactgtgccttatttcccgtccataatgattcatagaaagtcggcatattactatgaatattttttatatcctccaacgcttcctttgcatcatccagggtattataagcagaccgaagtctctcaagctcagcttctatatcattaatttcgcttttgtatgattcctgttttttctcatttgcacttttctgtgattttaaattttgatatttggaattgtcatattttttagccatattaattcctcatgctctgcttcagtcttcgaacatctgcccgctctacatcaagactctccattgctttttgaatattatcaaccattattctctcatcatcatccgtataccccttaaatactaccttgttaatatcagatgcctgaaaatacattaaccggtcccccatcattccttccggataagtacatgctccataatcaaaaagtttgtaatctccatttatctttagctgtagtcctcttgctacgattacatacttttttacacctccatgcacaataacaacacttcctaacggcagatagtccactctctcttccattttgccacctcatatgcatacttattctatttttattgcctcatatcatttgggattatcaccggagaattccggaatctatgaattgtactatctaatcatttcatctcatttttcatagctcactactcccgctgattcttcagcaactacctatcagattaaccattttacatttctttgtcaattgtcatttttattcaaattatgtttccgtttttgtatatattatataaacgctgactgtgcctgcagtgcctgttactggcagcttcttacagatgcccggcaacaaaaatttcagccccatgtgttccaatcgaaacacatgaggctgttttgggttgctcttaaatattcttcacggttgcaatatctaccagagtaagctctgactgagcattctccaagctggttgccagtgcgttggctgtatccattgctgtgatacagtatacgccggtctcaattgcattacgacgaatcaggaatccgtcacggttcttatcaccatttccctgggtaggagtgtcgatgacaaggtcaatcttatgtcctaagattaagtccataacgtttggtgactcctgggtaatcttattgacacgcagtgcatctacgccatgctcctgtaaatattttgcagtacttctagttgcataaatcttgtaacctaaggctgcaaaacgttttgctacgccgactgcttccggcttgtctgcatcttttacagtcataatcatctgcttatatttcggaagctgaactcctgctcctaagaaagctttgtataaagcttcatcaaaggtcttggcaattcccaaacattctccggtggacttcatttccggtccaaggctgatttctgctccacgcagtttctcgaaggagaataccggcatcttgattgcgatataatctgcggttggtgcaagtcccggtgtgtaacccattcccttgatggtatttccaatgataaccttggtcgccaggtctacgattggaataccggtaactttactgatatatggtaccgttcttgaagaacgtggatttacttcgatgacatatacctgctcgtccattacgataaactggatattaatcagtcctactacatgtaatgcctgagctaaacgcttggtatattctaccagcatttctcttacttcatcactgatggtcggtgccggatatacggaaatactgtctccggaatgtactccggtacgctcgatatgctccatgataccaggaattaaaatatctgtaccatcgcatacggcatctacttcgatttccttacccatcaggtatttatcaaccagaatcgggtgatcctgtgcaatacggttgatgattccgataaattcttcaatctcttcatcattgtatgcaatcttcataccctgtccacctaatacataggaaggacgaaccagtaccgggtaacccagacggtgtgcaacttctttggcttcctctgcagtaaatacagttccacctgctgctcttgggattccggtcttctctaagatttcatcgaagagctctctgtcctcggcagcatctacatcttctgccttggttccaagaatcttgacacccatcttcattaagctctctgtcagcttgattgcggtctgtccaccgaactgaactacagctccgtccggtttttctaattttacaattgcctcaacatcttccggtgtcagcggctcgaaatacagtttatctgcaatatcaaagtctgttgatacggtctccgggttgttatttacgataacggtctcccagccttccttggcaaatgcccaggtgctgtgtacagaacagtagtcgaactcgataccctgtccgatacggattggaccggaacctaataccagaactttcttctttggtgttgtctctgctgcttcattctcgctgccaaatacagaatagtaatatggagtggatgcttcaaactctgcggcacaggtatcaaccatcttaaaggctgctacgataccattttcgtaacgcatgtcatgaatttctttttcactctttccggtaaggtctgcaatgactttatccgggaattccatacgttttgcttcttttaaaagctctacggtaagtggctttgtctttaaatcctgctccatctcaactaagatagccagtttgtcaatgaaccatttatcaatctttgtaatctcatgaatttcatcataagatacgccacggcgcagcgcttctgcaataacccagattctgcggtcatctactacatgtaactgatcctgtaattcctcatcagaaaacttgctgaagtcataggataaaagactgtctacatgctgctctaaggaacggattgctttcatcagggcaccttcaaagttattgcagatactcataacttctccggttgctttcatctgtgttgttaacgtacgttttgcagtgatgaatttatcaaatggaagtcttgggatttttactacgcagtagtctaacatcggctcaaaacttgcatatgtcttgccggtaattgcattcttgatttcatctaaggtataacccagcgcaatctttgcagcaacttttgcaatcggatatccggttgctttggatgctaatgcagaagaacgggatacacgaggattaacctcgataacacaatattcgaaggtttccggatgcagtgcgtactgtacgttacatccaccggtaatatttaattcggaaatgatattaagtgcagaagtacgtaacatctggtactctttatcacctaatgtctgggaaggtgctactacgatagagtctccggtatgtacaccaaccgggtcaatgttttccatattacatacagtaatacagtttccattggcatcacgcattacttcgtactcgatttccttccagcctgcgatacaacgttctaccagtacttctccgacacggctcagacgaagtccgttggataagatgtcgataagctctgtctcattatgtgcgattccgccgccgcttcctcctaaggtataagcaggacgaagtacaaccggatatccgatggtattggtaaatttgataccatcttctacattgtgtactacctgggatggtgcacatggctcaccgattttttccatggtatctttaaatgcctgacgatcctcagccttaaaaattgtctcagcagttgtaccaatcagattgacaccatgtttctctaagaatccggattctgctaactccataccaaggttaagacctgcctgtccacctaaggtaggaaggacgctgtccggtttttcttttatgataatctgctctaatacttttgcagttaatggctcgatataaacttcatctgcaatatccttatccgtcataatggtagcaggattggagtttaccagaacaacttcgattccttcttcttttaaagaacgacatgcctgtgttcctgcatagtcaaactctgcagcctgtccaatgacaatcggacctgaaccaattactaatacttttttaatatctttattcttaggcattatttcgttcctcccatcatctcaataaaacggtcaaaaaggtaagcagaatcctgtggtcccggacatgcttccggatggaactgtacggtaaaaatgttctttccgacatactctaatccttcgttggttccatcgtttacatttacaaatgccggttttgcaattttctcatccagtgtattggtatctactgcataaccatggttctggctggaaatgtatacacggttggtctttaaatccttaaccggatgatttcctccacgatgaccatatttcaaatgatatgtgtccgcaccggttgcaagtgccatcagctgatgtcccaagcagattgcaaaaatcggtgtgtcggattcatataatttgcgaatctctgcaataatctccttgcactccttcgggtctccaggtccattacttaacatgattccgtccggattcgtgcttaaaatttcttccgctgtggtgtgtgccggataaacggtaacttcacagcctcttttatttaatgactgggcgatgtttctcttagcaccaaggtctaacagtgctacttttttgccctttccaggcaatacgcttttctcttcacaggttactttatctaccacatttcctgtggtgtaagcctttaattttggaataatctcatccagattgtaattctcatctgttgtaatcattccattcattgttcccttttcacgtaagagcttggttaatgctctggtatcaattcctgcaattcccggtatatcgtattttttcagaaaatcctgaatggttccttcacagcggaaattgcttggcattctggataattctcttacgatatatccatctacccatggacgtcctgactccatatccggtgtaattccataatttccaatcaaaggatatgtcattactaccgcctgtcctgcataagatggatctgtcagtacctctaaataccctgtcatcgacgtattaaatacgatttcactgatgacttcccgtgttgaaccgatgctggttccggtaaatacattgccatcttccaatataagaaaagctttcatttgttcaccctgtcctttctattcttccgatacctgcgcaaaaaaaaagagtcagtcatctctttttccttccttttgcataaaaaatgcaccaagcctgcacagtctacctaaattgtaaaaattctaccatatcgggaaggttttttcaacctttttcgcaaaacaaatagtcactaagtttgatgcatatttatccattttttatgcattttttctttttcttttatttgagtttacataaatatattttctgagaatactatttcaataactttttcaggagtggcagacgtttcccataaggtggatagcggaatggaatgtccagccagttgcccttttccatgatactcttttcccggctgaaggtctcatagctatgctttccgtggtacactcccatgccgctgtttcctactccgccaaagggaagcttttcattggacaaatgaataatggtatcattgatacagccgccaccaaagctcaccttggaaatcaccgttttctttaccctgctgtttcttgtaaaaagatacagtgccagcggcttctctttcttctgcaatatccggattacttctgccaaatctgaatatgcaaataccggaagaaccggtccaaaaatttcttcctgcattaccttacttcttcctgtaagtccggcaagaagcgtcggctctattttcagcgtatccgcatccattctgccaccggttatgatttcaccatcctgctctaaaagcattttcttaagacgattgaaatgtttttcattgataatctttggatattccggattcaaaagcggctcatcacgatacattttccggatgtagtgcttcattttgcgaagcaatggttcttttacttcctcctgtaccagcacataatccggcgccacgcagatctgtccggcatttagaaatttgccccagacaattcttcttgccgcccgcttaatgtccgcagttttatccacaatgcagggactcttgccgcccagttccagtgtaaccggtgtcagatgttttgctgccgcttccatgactacgcttcccaccgcaggacttccggtgaaaaagatgtaatcaaaacgttcttttaaaacagcttcatttactgctcttcctccaagaagcactgccacatatttctcatcaaagatttcccgtaacagcttagccagcactttcgccgaatgcacagcatattccgaaggctttacaacagcacagttacctgctgctatggcaccaatcagtggaatcaatgtcaactgtaccggataattccacggtgacataataagcacgctgccataaggctctctgtaaattgtgctgacagacggaaaatgcacgattggcgtgcctacccgcttcggtttgtcccactgtttcaaatgagctatcgtatcagctaattcccttcgcacaattccaacctctgtctcatagccttcaaagggtgctttcgccaaatccttctgcaacgccagtaacagttccttttcatgcctgattactgcttcttccagccgctttagcatggcaatgcgaaagacgagcttctttgtctctcctgtataaaaatatttatgctgtgcttctaagatttcctttatttctgacatttgtttctccctgccggttgatcctgtttcttctataaataatatcttctatattatataacattccggggctgtcgtatacactttctgacaacccagaaaggaagccgcatctctgcagcttcctttctggtttgttaatgaatatcttttttctataggagtacgattatttcacattaaatgctttcattccaggatataccgcgctgtcacctaattcctcttcaatgcggagtaactgattgcggtatattctgtaccagcctttggaagcttatagtatccttttccattttcactcttccacccggaagaatatttcttccggtgaatatggatattgccgtctccatattccaaaggagtcactatgattcacgtttagttagttgctactaacttcgtttattgtatactaatcaaataaaaagtgcaaggggcttggcgattcgtttttctcattaaatttttactgtggcgggttacatcttgagcatggtgtcaaacccatgttcttcgcctctgacaaagtcacctcatggtcactctttttcaaatacgagcagcctgccgaatgatattttgaaccggtgtctgtaatatgtaccataacggaactgctgtcactatttgaactgccggatgcatctgcagctatacctgcatcactgctgcctgatgacgtagtgctgtctgctgtggaattatttgctgtactatcactacttccggtcggttctcctgctttccagctttctgacggggagcagttccaggtgatatcatttccatccgatgttgctacaatcgtaccctgctcatcggtacggaacacagatttgcctgctgcccgcaaacggttcagcacctctgcatgaggatgtccgtatttattgccttcaccggcactgattaccacataagtcggtgataccttatccaaaaaagcctgacttgtggctgtcttgcttccatgatgcgctgccgcatagacatctgccgaaatatcaattccattatttaaaatgtcctcttccgctttttcttctgcatctccggtgaagaggaagcggttgttgccattctgcaccagcacacccaccgaccagtcgttcatatcatttccatagtctgcatttggcgccacaatggtaaaggttgctcctccaagggtataggtctctcctaccaccggataagtggtctgatagcccttggacttcattgcctgcaccacatcatcataggttctggtgtcatttgccacatccggcatgataattgtatcgcagtcaaatttataaattactacatccagtccgccaatatggtctgcatccgggtgcgttcctatgacataatccagtttctctacgccctggctcataagataggactgtaccgttgttcctttgtcattattgccggcatctatcagcatgtaatgaccatcacaagctatcaaggcagcatcgccctgccctacatctatgaaatgcacctgcatctgtccggcggaactgccatctgtcttataggtattactgatgactcccccggtaacaaaatcctccgtatcaccaccaggctctgtattgctttctgtctctgtttcagtctgtgtttccgtggcaacggaactttccctgtcaggcttttctttcttattatccgaatgattgccgattgctccggctatcatcagtacgaaaataataactgcaatccataatttcttgtttccggatttcgatttcattttcctaactcctccgtttttcttaaaatttcttttctattataatacatttggcaagaaaaaacagacgtaagggggacgtctgtttggatcctaaatttttaaattctgcgagtagtaaacaagtatactcgggcaacttatactccgcaaagtatatatttatatgtatttccgattttttttaataattcccttattggtaagtgactgtaatatagaacaaatatcatcttcttttatggtacacatatcacaagcgtctctatatttgcatgtctaacattatttgtcggagaacttttgcattttcactttctgccaacagcattgccatattaagaaaagccttaaaatcaaatattgctatttgaggtgttctattgctaatgttcccgacatttatgtcgggaacatcctgagctattacacaatccatgaattctttaagttttttccctttaaaatctcatatccatttgcagtaatttcatcagaattgtcgctaacatatctctcaattgttctcacatctacgttaaaatatgtagccaccattgattttgtaaatcttaatcgtccatcaaatataataccctgaatacctgtctgattttgaatttcattaacagctaaatcattattcaaaatattttgtctatcaatttgagaagttgttaaatcttttgacattctcacacttcctttgctttatatttacaaattacaagaaaatcttttgggcattccggctgtccgcctttctcagattttggcttattatagttctctctttctataatgccatgcttctgctttatctgtgcaatatacttctttatctcctcataagtagcctgtctacgctacgctccgcttcggtccgtgctgagcaaatgttccctgaacctttagcgcctctcagctaccgttaaatccatctcgtccatgtcaagtctcacattcacatgctacttcacctcatggagtttcgacaacatgcacaccgtctcaatatttccggaccatgggaacatgtccacacagcacatccgctccacctgatatcctctggcggttaaaacctctaagtctcttgcaagactggttggcttacaggaaatataaatcatgcggtctacgccatagcggataatcttctccaatgcctttggatggatgccatcgcgcggagggtccaatacgataaaatccggtttttcagtaatatcgtccaatacttttaagacatcgccggctaaaaattcgcagttttcaagaccatttaatgccgcattttcctttgcggcttccactgcctcttctactatttccacacccactaccttttttgcggcaggtgccagcatctgtgcaatggttccggttccgctgtataaatcaaataccaccttgtctgccttctcggtcagcgtatctccgatatagtcccttgcagtctggtaaagcacctctgctccaagagagttggtctggaagaaagaaaatggtgtgattctaaaacgaagtcctaagagttcttcgtagaaataatcttttccatataaaatctctgttccttcatcctttactacatctgctacactgtcatttttcgtatgaagaattcctgcaatgctgccgtctaaatcaagtttacatagtgcatctttcattccagccaacaattctttttctgaagatattgcctctgtcagaccatccagtatatgctctgcgcctgccgttacaaggtcaatcaggatctctttggtctttaccgctttacgcaccagtaaatgacgcagatatccggtatgccgcattctgtgataataggaaatctttttttctgcaaaatactgctgcacacagcttaatatcttccggtaatcttcatctacaattttacagtccgttaccgaaacaatatcataaaagctgccacgcttatgcatgccaagagcaagggggccatccttatattcatccccaaaagtaaattccatcttattacggaatccgaattcattcggacttgcttttacgccctcaaagctgtaagtttccgggtctactaccgcatccatcagtttcttcacctgctgtccttttaatgcaagctgatcttcataggataaattctgataagtacagcctccacagattccaaaatgcgggcatggtgcttccggcagctcatttggtgctttcttcaaaacttccagtaagcggccttcgccttttccctttcttaccttatttacagaaaaggaaatctcctgtcccggtaatacgttttttacgattacctgctttccttcttctacttttacgactcccttattcgggaaatccacatatgcaacagttccctgtaatacctgaccttttttcatacttacctcacacgaacaattcttttccagaaacacatgtcatccgcagcgtttccggcacactcagtaaaagggctgcatgatatcacacagccctttacatcttcacctgttaaattatgcaaatgataatgattatttctcttcctcgtcatcctcgtcaaagaaatcatcttcaaaatcatcatcgaaatcgtcttcaaaatcctccagataatctggtgcaaagaaacgatataatccataagcagctgcagcaactactacaacaataccaatgattgcaaaaattaaaccagcttttgattttttcttttcttccattatttcctctttctcctttttatgcaataattctgttactttgttcacatttgcggttaataaattctttaattcttccattttttccat

SEQ ID NO: 401 - DNA, 17716 bp, unidentified
  source 1..17716: mol_type = unassigned DNA
tcacaccgcaccaaaaacagtcgcgctatacggcgcaaggggggcattgccggtaaaaacgcggctttggccccgccacaggctggaggaggtgccgtcgctcagcagcttccaccgcccggcgggcaggggaacggtgcgggtggtgtcggtggggttataaaagacgcacagggcgctccacgccgcgccgtctccccagacggcgggcagtgtccagcccaccagcggctgctccagcgcaaagaactgcaaagcctccggggcgtgacggtcggtgctgcccagccggggaaaggctgcccgcagcgccagaagcccccggtagtagtccacaagggcgtggtactgctcggcgcggttccagtccagacggttcaggccgggggaggagcggtagctgttgcctacgccctttttggtgcgggcgaactcctcgcctgcctgcatgaagggcagaccgaagctggtcaggtagatgcccgccgccagccggttctgcgccagcgccacagtgtcccgggcggtgaactccggcttttcgtaccggacgcagagcagcttgtcccacagggtaaagttgtcgtgggcggaaacatagctcacgatctggctgggcgcgtggggcggcagacggtcgctgcggcaccatgccgccaccgccgcgccgatatcccagaagctgccgggcttgccctccacatagcccggttcccgggcatcgaagcagccgcccttgatggcgtcccgggtgtcatcgcagaagatgcccacccgctcgttgagcatggcaaggttcgctttgttggcttcgtaccggtgcagctggctggcaccgccctgccacggctcaccgtacagcaggatgtcccgcccgccgggcagggcatccagtgcggcgcgcaccgcgttgatgctctcggcatcgtacaggcccatcaggtcgaaccggaagccgtcgatgtggtactccttcgcccagtagaggatggagtcgatgaggtaccgccgcgccatggggcgctcgctggcaaactcgttgccgcagccgctgccgttggaaaagctgccgtccgcattctgccggaaaaagtaatagggcacggtattgttcaggggattttcggtgcggtaggtgtggttatacaccacgtccatcaccaccccgatgcccgctgcgtggagggcggcgatcatctcccggcactcccggatgcgcacctcgccccgggtggggtcggtggagtagctgccctccggcacgttgaaattggtggggtcgtagccccagttatattgccgcagcaggggctttgcctcgtccacgctgccaaaatcgaaaatgggcatcagctggacgtattttacccccagccgcttgaggtagttcaggcaggtggggtggatgccatcgccgtgcagggtagtgccctgctgggtaaaggccatatatttgccccgccacgccgggcgtaccccgctggcagcatcctgcgagaagtctcgcacgctcacctcccacacggcgcgctgtgccggggggatagcggggcgcacatcccgctcccacccggagggcgcggtgcgggcaagatctacgatcatgctgcggacgccgtttacccccaccgcccgggcgtaggggtcgccggtctcgcgggtgatgccgtttacggtaacggcaaaggtgtagtagcggccgtgctgctccccgggcagccagatgctccacaccccatgcgccccgcgcacaaggggctctgtgcccagcacggcgccgccgtctcccttgtggtataaggtcacggtaactgcttcggcggtgggtgcccacagccgcagacaggtgccgccgggggcgtagtccggcccaagagggccagtatagtagttttcgcggtggaagggtacgttttcaaacagtgttttccactgggcgggcgtttttgcggccatggtcagcttcattccttcttgtaagattcattatattcagtgtatcggacaacgcgctttttttcaagagggaatcccttgcaaaatgccgcgcagttcactatactggaagaaaaacaccgatggagggcagcaccatggcatataccgatgattgggaaagcttgatgaacggcgtgttcggcgcaggcggcaaactgaagttcggcggcgcacagccgcagccggaaaagccgcagcccgaaaaaccggcgggcagcagtctgccggatctgaatgcggcgctgctggaacagcaaaagcagctggacgaaatgctcaagcagcagaacgcccggctgaaagcgcaggatgccggggtgcagacggcgctggaggacagccgccagatgctgcgggacatggaagcggacggcctgctggcaaagggcacggcagacacaaagccggagcagctgggcagctttgagggccttgccgccgaggtaaaaaagaccgtcctcgggcaggatgcctttgtggacagcgtggtgcgggccatgcgccgcccctttgtgctgggcaccgagggcgcagccgcccgcaacgtgatcctgctgtggggcgcaccgggcacggggcggcactttgcgctggccgagaccgcccgcatcatggcggcgcgggggcttttgcagagcgaccggatggcggtgatggatcttgcgctttaccccgaccccggcgcggaaaagttgtttttgcaggacttgtacgctgcgctgcacgccccgggcgagatcgtggtgttcgagcactacgagagctgccaccccggctttctgcgcatcctctccgacctcgcggtcaagggcagtgcgcctttgtccagccggtatctggtcaacaaggagggcattctggtggaagccggcacggcgcttgcccccggtgcagtgagccgcatcgacccctgcggcaagtacctgatcttcttctcccgcaagggacgggaggcgctggcagataaattcggcgcgtcctttgtggcggcggtaggggatgtgtgccagaccgcccccttcaccccggaagcactcgccgcgctggcggcgcagcagctgaacacgctggcgcagcgggtgcacagccgtctggggctgaccctcaccgccggggcggaggtgagggactatgtggcggcgcagtgctccaaggaaaagggcgcagaggggctggcagactgctgtgagcgcattttccgcgccctgagcgagtattgtttgcagaccgatgcaaagctgtccggcacggtggcgctgaccgccgcgcccgaggggctgcaatttgcgctgaacggtgccgccccggcagacctgttcagcctgctgccggcggcctacaccggcgcggtggagcagatccgcgccgaactggatgcgctggtagggcttgccccggtcaaggagtatgtgttcggtctggcagacaatttacaggtgcagcagcgccgcgcggcggcgggcttcaagaccgcaagcctgtccatgcacatgatctttaccggcaaccccggcaccggcaagaccaccattgcccggctggtggcaaagtacctcaaggccatcggcgcgcttaagggcgggcagctggtggaggtgacccgcgccgaccttgtggggcgctacaccgggcacaccgccccgctgaccaacagcgtcatcgagagcgcactggggggcgtgctgttcattgacgaagcatacagtctgtaccgcggcgagcaggacagttttgggctggaagccatcgacacccttgtaaagggcatggaggatcaccgggacgagctggtggtcatccttgcgggctacaccaaggagatggaggtgttcctcaccgccaacagcggccttgccagccgcttccccaacaagatcgagttcccggactatacggcggacgagctgctggacatcaccgccgtgctggcaaagggcaagggctaccgccttgccgagagctgcaccttcccgctgctggggtactacaagcgccgtcaggcgctggacagccgcaccgccggcaatggccgcctggcccgcaacacgctggaaaaggccatcttcaaccagagccgccgccttgtggctgagcctgccgcagagcttgacctcatccagcccagcgatctggaatttgaagaataaagaaaacatcatgccggacagcctgcgggctgtccggcatgatgtttttacggtcagaacctttcgttctgcaacccgtccaatacttcgtacagatcgcggcactcggcggtgtacagacggcgcatctcgtcatcggcgggggccatgtccggcaccatcacggtgataaaacgcccgttgaaaccggcgcgcacgccgttgtagctgtcctccagcacaagggtgcggccgggctgggtacccagcgcttccgctgcccgcttgaagatctccgggttgggcttagaggccgagaactgctcgccggagacgatcaccttaaaatagtgggtcagaccccagccgtccaaatggtgccgaatggacgtcatccggctggaggaagccaccgccatggggatgtgctgcgcgtccagccatgtcagaatttcgtccagcccgggctttttgggcggcggtgcctgaaacgccttttctgcctgtgcgtgcagcgcctcaatgatggcgtccgtgtcgcagttttccccgtagaagcggcgcagcaccgcccgcatggtgtcccctgccgtgccgcgggcggcaacgtccaacccctccttataagaaagcccgagggtagccagtgccggctcccacagggtcgcccagacccgctcggtgtcaaacatcaggccgtccatatcaaaaataacgccgtcgatcatggcagtatctccttccgtagaaaagcggggctgtgccccgcaaagtgctctgtgcccctattgtatcatagatttggcagtttgcacaccactatgctcataatttggtgcaacttaccgggtggaaagatgaaacattttgtgattccttgcaaaaccggctgggaatattataatagaaaccaacatttgtgtcataaagcgccggaaatcgtgcgcacgcgcataaaaggaaagagggaaactcactatgttggatatcaagatcacccgcacggctgcgcccaaggcaaagcccaccgatgagacgaagctcggcttcggcaaaaagttctccgaccatatgttcgtcatggattacaccgagggcgagggctggcacgatgcccgcatcgtcccctacggcccctttgaactggaccccgctaccgtggtgttccactacgcacaggagatctttgagggcatgaaagcctaccgcaccgctgacgacaccgtgcagctgttccgcccggactgcaacgccaagcgttttcaggattctgccgaccgtctgtgcatccccaagatcccggtagaggactacattcaggctgtcaaggctctggtggatgtggaccgcgactgggtgccccacaccgatggcgcttccctgtacatccgccccttcatctttgccaatgatgtgggtctgggcgtgcacgcttccaagcactatatcttctgcatcatctgcgctccctccggcgcttactacgccgagggcatcaaccccgtgcgcatctacgtggaggacgagtatatccgcgccgccccgggtctgaccggctttaccaagtgcggcggcaactacgccgcttccatcaaggccggcgagctggccgaggagcagggctacgcacaggtgctgtggctggacggcgtggagaagaagtacgttgaagaagtgggcagcatgaacatcatgttcaagatcgacggcaaggtgtacaccgccgccactgtgggcaccgtgctgcccggcgttacccgccgcagctgcatcgagctgctgaaggactggggctacgaggtcgttgagggcaagatcgccattgccgacatcatggctgctgcccgtgaaggcaagctggaagaggtgttcggcaccggtactgccgctgtcgtctcccccgtcaaggagctggtctggaagggcgagcacgcctttatcggtgacggcaagatcggccctgtcacccagaagctgtacgacaccatgaccggtatgcagtggggcaagctgcccgataccaagggctggatcgtgcctgtggaaaagaaatattgagccgcctgtcaccctacggctttttaagggactgttgcacaccgtctggggcaacagtcccttttgcatcaccgcagatgccgttcaccgtcacggctcctcccgtgaaaaggcaattctggaaaatccgcagattttccagaattgcgaaattataaataatatttccgctgatgatgcgcagagcgaagcggagcgcattctaaatcgtcctgccgcgcctttgcgcataaagattgcaattcccgccgcatggtgctacactacctataaagggcgtgggcttgccgcctgtgccctttgcaggaagatttgagaggaaagaagcaccatgatcaaaaaatggagcatgagttacccggcggtcaacggcaccgagcagcgccgggtgtatgtctacctgcccaccatgtacgaagcacagccggagcgccggttccccgtgctgtatatgttcgatgggcagaacgtgtttttcaacgaggatgccacctacggcaaaagctggggcgtggcagattatctggactataccgacaccccgctgatcgtggcggccatcgagtgcaatgccggggcaaacaacgagcgtctggtggagtattccccctaccgtttcgatgaccccacctacggtcactttgacggcaaggggcaggccaccatgagctggttcatccaccggttcaagcctttgatcgaccagaatttccgcaccctgccggacagggcaaatacctttatcggcggcagcagcatgggcggactgatgagcttgtatgccctgctgcagtataacgatacctacagccgcgccgcagcactgtcgccttccatctgggtggcaccggataagctttccggccttgtggggcgtgcaaagctttcccccggcacggtgctgtacatggactacggctcccgggagatgggcaaccacgatggcatccggcgggaattttccaacttgagcggcaagctgatgacccggggcatccacctgaccagccgcatcgtgcccggcggcacccacagcgaagccagctgggaaaaacagctgcccttcgtgttccacaccctgctgtatgaggtagaggagtaagagaagggtgtattgccagctgtaaagggggcacaaaagccttcaccccttggggggaaggtggcgcgtagcgccggatgaggggtaatttcccgctagctgctgcttgcccgcgccctcatcagtcacctgcggtgacagcttcccccgaccgggggaagcctttgtctgccgacaccatagcacgacaacatcaaaggaggaaacaccatggagatgcagtatttcaaggagtacagcccggaactgggacgggatatggagtgcaaactttacggccacgccggccgcccgatgctgtatattccctgtcaggacggccgttttttcgattttgaaaacttccacatgaccgacacccttgccccgtggatcgagtccgggcagatcatggtgctttccatcgacaccatggatcaggaaacatggtcggacgcacagggcaacccctactggcgcatccgccgctatgagcagtggctgcgctacatcacccgcgaagccgccccgatgcttcagcatctggcgcagcagcgcaacggctggagcgacctgcccggcatcatcgccttcgggtgcagtctgggcgctacccacgcggtaaacctgtatctgcgccgcccggatatcttctgcggctgtctggcgctcagcggcatctacactgctcactacggctttggcgactacatggacgagctggtgtacctgaactcccccgtagactacatgaagaacttcccggaggatcacccctatatgcagctgttccgcagccagaaggctgtcatctgctgcggtcagggcgactgggaacagccggacaccacatggctgctcaagcgcatctttgaggcaaagcatatccccatctgggtggacctgtggggtcacgatgtcaaccacgactggaactggtggtataagcaggtggcgtactatatgccctacattctgggccagcagtgacccatcccgtgaaaatggcacaacggcgcgtccatggacgcgccgttgtttcccaatattaaagtctgtcccgccccgcaggggcttttgcaatagaggtaacggaaagaggaatcaacaaatactatgcagaactttatttttatctcccccaacttccccacgaactactggcagttctgccgggagctgaagaacaacggcctgaacgtgctgggcatcggcgaccagccctacgaggagctgaagcccgaactgaaggcaagcctgaacgaatactacaaggtgaacagtctggaaaactacgacgaggtgtaccgcgccgtggcctttttcaccttcaagtatggccgcatcgactggctggagtccaacaatgaatactggctggaacgggatgccgccctgcgcaccgatttccacattaccagcggcttccagacctctgatatgccccgcatcaagtacaagagcaagatgaaggaatactatcagaaggccggtatcgccaccgcccgctaccacatggtggatgaccttgcaggctgcaaggcctttgtggaacaggtgggctacccggtggtggtcaagccggacaacggcgtgggcgcttcggatacgcaccgcctttccagcgacaaggagctggaagaatttctggcctacaaggagaaggagcacccggatgtggcctacatcatggaggagttcgtccgcgccgaggtgaacagctacgatgccatcatcgacgcccatggcaaccccatctttgaggcaggcaatgtgagcccggtgtccatcatggacatcgtgaacaacgatgacaactccatctactacatcatcaaggatctgccggaggacacccgcgccgcaggccgtgccgccgtcaagagctttggggtgaagagccgctttgtccacttcgagttcttccgcatgaccgaggatcaggccagcatgggcaaaaaaggccagatcgtggcgctggaagtcaatatgcgcccctgcggcggctttaccccggacatgatcgactttgcccgttccaccaacgtgtacaagatctgggcggacatgatcgccttcggcggcaccgatatgccggtgggtgagcactactactgtgcctttgccggccgccgggacggcaagagttttgtttacagccacgagcagctgatgcagaagtatcaggacaatatgcgcatggtagaccgcatccccgaggcactgtccggtgccatgggcaaccagatgtatgtggctaccttctccacccgtgacgagatggaaaagttctattccgacgtgctggccgtcaccgatgccaccaacgccaaggtgcagtccgagctgacgaaggtgctggctcttggtgaaccggagatggcagtagctgaaaagtaattgggagtgcgcggcgcaaatgccgtttgtcattacgacccctcctgtgaaaatacaatgccggagcgtccgcagacgctccggcattgttctattaaaaatagtttttccgctgatgatgcgcagagcacagcggagcgcattccaatcgtatgcgttatacctttgcagcgccacgctccagaataccgttgaagcgggagaagaaggtgatggtggtaatggtagccgccagaatatcgctgaccggctctgccagaaagacgccaaacaccgggtccggcagcaggtgcggcaggatgaagatgagcgggatcagcaaaatgatcttgcgcaggcaggccagcagcaggctgaccttggcctgacccagcgccataaagctctgctgacaggcgatctggaagcccatggcaaagatacctgccatgtagatgcgcatggaccatgtggtgtagtcgatcagcgccgcatccgaggtgaagatgcctgccacagcgcccggtgcaagcatcataagcagccagaacaggcaggtgtagcagctgcacagcagcagctggaagtggaacgcctccttgacgcggagctttttgcccgcgccgaaattgaagctcatcaccggctgaccgccctgacagatgccctgaatgggcagggtgcacagctgggaagcgctggtgataacggtcatggcacccacagccacgtcgccgccgtaccgcgccagactggagctgaagctgatggacagcaggctttcggtggacatcatcacaaaggtggagatgcccagcgccatcaccggcaggatgaccttcttttccgggcgcatacagtccttgcgcaggcgcaggatggtctttttgccggtgaggaagtgcaggatccacaccgcgcccaccgcctgactgagcacggtggcaatggcagcgccccgcacgcccagacccagaccaaagatcaggatggggtcgagaataatgttgatgaccgcaccgatgactgtggtaagcatactggtcttggcaaagccctgcgtggtgatgaaggggttcatgcccagcaccagcagcacgaacaccgagcccagaatgtagatgcggctgtacgccagcgcatagggcagggtggcgtcactggcgccaaagagccgcagcagggtgggcgctccggcgtagaacaccacggtcagcaccaccgaaaagagcagcagcatggtaaagctgttggagatgatcttttccgcctgctccttgtcgccctgtcccagcgcaatggcggtgcggggtgcgccgcccgcgcccaccagcatggcgaatgcgttcagcagcataaggatgggggtgaacagtcccacgccggtcagcgctgccgcgccgatgccggcgatatgtccgatgtaaatgcggtccacgatgttatacagcaggttgaccacctgtgcaacgaccgccgggatcatgagctgcagcatcagcttttttacgctgccagagcccatatcctgttttgcctgtgccatggatgtgattctcctttttatcgcaattttcaagaatagcgcctatcaaaacggcatatttgcgatatgcagtttgcggatgttgccaaggcattaaaaacgcaaactgctatacttcaaatttgaactatctcttctctattatactcaaaacccgcaaaaataccagtccctttttgcaaaattttccgtgctgcgcaaaaagctgaaaaccccgggactgctgcaccgcagccccggggtttggaatgcgaaaaagtgttgacgccaacaggcttttttgctatactatataaagtttatcatggagatgtatcgaagcggtcgtaacgagaacgactcgaaatccaagtggatgcttcgccgaatgtctccatatcacacgagggaacgtcaattttgatgtcctgacaggcttcaaagcctgtctgaacgatgcgttttctaacaatattctaacagcaactgttccaagtttcaaggccgatttgcgatatacaaatcgtaaatttgccatgaaaatatacttggagatgtatcgaagcggtcgtaacgagaacgactcgaaatcgttttgtccttaatcgggcacgtgggttcgaatcccaccatctccgccagaagtcgcagattcaaacgaatctgcgactttttcttttgcatcaagcagagaaagaccgcttctgcctcatcacagtatgctttatgcatgaacgataaatccataattatttggggagtttggattctcccaaaaggttcgcaatgaccccagcagacccctgtttgcttttgtaatcgagatgtgcgtagatgtcagcggtggtagaaaaggtactgtgccccagccactcctgaacctgcttcatggatacgccgttcatcaccatcaggctggcacagctgtggcgcagatcgtggaagcggatgcggggcaagctatacttccgaagcagccagtcgaagtgctccgtcacgaagttcggacggatcagcttgccttcctgatcggtgcaggcgaaatccagatactcggtgctgtaactcttcttgaacagcttacggtaaagctgttgtttttccttctgcttcagaagttcttcttccacagccgggatcagcggcagagtacggcagctggtcttgttcttcatcacatcgctgaccacaggaacgtacttgccgttcaccaactgttccgtcaccttgtgattgatggtgatggacttgcgctcaaagtcgatagacgaccacttcagcccaagcacctcgctgcggcgcaggccatagtaggccgtaatgaggatgcacaggtgcagggggtcatcctgcgatacttccagcagctgctggacttcatccttggagtagaagttgggccggaagctgttcttcttcgggcggtcaactttcagcatcgggttggtttccagatagtccttgcggacggcatccttgaatgccttgccgaagatggcgtggtagtgaatgactgtgttggtggtgtagccctccagcaagatcttctcctgaaactcatccagcacctgcggcgtgacctcacacagcttcaagcccagcggctcaaaatactgcgtgatgcgcccggtgatcatccgattgtagctgataaaggttgcaggctggatggatgccttgtggacttgcacccactcgttgagatagtccagaaacaacatctccgacttgctgacgggttggagatgctgcggcaagggcttggcggttttagcatctactttttcgtaggctccgccccgccctgtgggcagctccccggtctcatcatagtggagcaatacttcccggagcatggattctgccttgcgcttgttgccccggacggtcaaacctgtggagatccacttgatcttccgcttgccgttggcatcataaagattgatcacgaaatagaaacgtccatttttctcttggacagaccctgtagttttcatcataaacctcctttgggtcaacaggcgtgctgtccgttgctgcacccacagcataccacatccagcggcggatttccagccgggaaggtgctctgtccggtgagcaggaactcgatcacactcagcttcgggatacgataggtgcggccgattttaagcgcaaacaggcggcgggaacggatcagttccccgaccgtgtggcggttcaaaccaagcatctccgcagcctgctgaaggctgatggcatcggggtaaccgggaaacatctgggaataggcatcgttaaacttcataggcactccttctgcataagtagtttaaggtcaaaaagtgtgtcatcctttgcagcaaggctgcgttcaggtgacaatgtaaagagagctggcagtagttccaactctcgcatcgcggatagacttgcagcccatctgcgtcaatatgatataggtctcccatattcgccctcggcaccctaggagtggggaatcgtccggcagcggattcacaccgcaccattggcatttcagccaccccgtcttcgttatgaccgggctgcgagttacagaagtaccttttgtgaagtaccggacaattgaactattctgttttcaaggagccgatttttatagaaaatcctcggaatttagggcttccgaaaaatcatccccctaattggtaggcatcgagaaaggccaaaaatcaccctgaaaaagaaatttgttaaaaagtttttgaaaaaatatgtaggatgcccgttctactaaatttgaaaaagagcctctcacttactagctcacgggaaagcccaaaagacacccataatttcgaaagttaacaaaaaagtcacaaatagatatatggattctattgccttataagccaaaaatcagattcattcaacaatcgtgcgcaaatgctgcctaactgtgttgagatttttgaattatccaccgagctttcagtaagatgagagaagtgtattaagcactgcctcctcaaaacatttttaatgcgtttttcgtcccgctgccaatttttcactgtgtaagactaccactggtaatcctttttctgtataatagggtacgaggaaatagaactaggtggagacgctttgctacttatttgttaaagtcttccacaaaatattttcggcaaatttttcgctatcagtagcatcaagtgagtcagagtgtacagacacggttgctttcaaccatcgctgtacagggaggtaaaaatgctggagcagaaaagggaactggttcaacagcacatcaaaacccatacggagcgttcagaagaagatgtagcggcggttaatacgctcaacagttttttgtacgcggaaggaaaaatcaatacagacttttcatccaacgataagtggccgaaccatgacggtacgcttgaatttgtgccggaccccgatctggatcgccgcccgaagcaatgcttctatgtgcagataaaaggaacaaaaaactataccccaaaggacggcgctataaaatatctgcttccgaatctggcctttcccgcatttatctgcaacgaggcaacacgtgaccccggccttctttttgtggtattaaatccgaaggaacgaggaaaaagacgggtgttctggcgctatatgtccgttcagttccttaattccatcgatttttcaaagagcagctgtacgataacattttcccctgagagtgaaattctggacaccgatgaaagcgtcaatgcgttttgccgagctttggaccacattgcggatcatcatgcatatatcaacacgctgcggacggatgattataccgtcgagaatgtcatccgactgataaaagactgcgatgaacagattgaagagtatctcataaatttttccctccagaagcagacgcgggacaaactgtccatgcggcttcttacacgcatgaatgatttgagcgcggcggcattgctgctgaacagcctgaaacagacagcgggcgcaacaagcatccgtctggcgtgggaacaagcacttctggaccggaacacaaaatatctgagcgatttttatcagggaatgcaattggtgaatctgcatatcccagaagaaggccagtcagaacggctaatgctcaaatactatgattttctgtggagcattcgggagtttttgcaaagagattacgacctttccgttctgaaggaattggaaaaatttccgctgcgaatcaacacgctagatcaagaatattatgccatggccgccgctacggttcagcagagcgatgatgccaagagttcgtggagcaatgtgcggtactatgtgcaaaagcaggaaccgttttatgtggaaggaaagcgttactatgaggtgacgctgcaattgaccggtatctatgcaaccaaatacaatcgtgttacagtttataccagagagcgcatcacaacgtattattccgtacagattaagtacatcaatacttttctcaccctgtgggatgtgacatcgcccatcaaggtagtcacccaatggaaagtatccatcgatccgcgctgcctgaaccgactagcggcgattctgaaaatgccggcaaagctgagttcaaactatggtgaataccgcgaactaatggattttctgacgaaaactggtcttagcctgctggatctgattgacctgaaggagattaatttttctgaactgctggacaaggtttatgaaaaaactaatacccatatattccgggaaatcattaccagactacacgatgactatcggcgggaaaccgcgaagctgggcgggaatgtgattcgctatctcctgctgcatctgcgggaggaaacattggaggcagtctaccctgtttaccataacaatacctgggcagcctgtccggaacttctgctctccaaaaagtgcgcaccgtttgacaagagcccatttatatctaatttggtgggcagtaaaacaaacgcactaggccttaccagcgtactgacccgtgccgtcggaagggaacgctgccacaaagcgtggccttatctgtacctgaaacagcagattgtacgcaccggggagctgtatttcccggcgggaactgaggcctttccgcagagagtggcggaatataatgaaagtctagatgaatgggagcaaaatcagggatacgagattcgaaaaaacaaggacggactgtattatatcgacgcctatgaaaaatcaacgctcagtattcttaaaagacttttatccgtatcgcagtgcaagaacaatggtcaggaagcgttcaatgcacactttctgcgcgagaatgaagcctcttttaccgatccgctcaaggtaaaagcagtgaagaatgcctttgtgcagtcgcggctgttgctaatctatggtgcggcaggaaccggaaaaaccaccctgatgaattacctttcggatctgatgagcacaaagaataaactatttctggccaaaacgcatacagcgctgcaaaacctgaaacgaaggatcaacaatccgggcgcaggagcggtgttcagcagcattgaccgctttgcgcggcagagagagcagccggactatgacatcatttttgtggatgaatgcagcaccatcgataaccgtacaatggagctgtttcttcaaaaaataaagccagatacgtttctggtgctggcaggagatatttatcagatcgaagcaatcgagtttggaaactggtttttttatgcaaaggacatcatccagaccgatggtgcaatggttgaacttctggatacttggcgcacaaaagacgcaaccctcaaggatctctggagcgaggtgcggaaccggagaacattcattaccgaaaaacttgtgattaacggcccgttctcggaggaccttggcgagaatgttttcacacagctggcggaggacgaagtagtcctctgcttgaactatgatggaaaatttggtctgaataatatgaacaattatttccagagtgccaatcccaacaaccctgcctatatctggcaggaatggcgctataaggttggcgatccggtgctgttcaatgagacccgacggttcccctctctgtacaacaacctgaaaggccgcatcgctgcaatccagaaagaggctgaccggattctctttacaatggacgtagagcgctttctgaccgaaaacgactgccggaatgaagaaattgagtttgttcaaagcactccaacaggcacacggatacgtttttctgtttatgcctacgaggatagcaaaacggaggacaacgaagaactgcgcaaaaagacggtggtaccgtttcagcttgcctatgccatttctatccacaaggcgcaaggtttggaatatgatgctgtaaagataattattcctagcagcaatgcagaaaaaataacgcacgggattttttatacagcaatcacccgtgcaaagaagattttgaaattatattggagttcagaaacgatgcaagcggtcatagcaggcttttcagaacagcgcgcaacgccaagaagtcttgaatatatcaagcaggaactgggagtctag

SEQ ID NO: 402 - DNA, 6848 bp, unidentified
  source 1..6848: mol_type = unassigned DNA
ttatttaccctcgtatgctgcctgaatctcttttttgaactcttcctcgcccactctctgaagagtaagtctgaaacgctcaccaccgtttgcatgcttctcgaagaaactaattgctgcatctgtcactctgaaaagagtttccttgtcgcggataatcggaacaagctgctctcctttatagatgtggtttccaaaaagtcctccaaacgatacgatatatcccggagttcccttccatgcatctgtcggacagctctttacgcagcgcgcacagttgttacatttgtctctgtcgatgacaatcctgccatcctccatcgaaagtgcaccctcgcggcatgccttcacacatacaccacactggatacaatcgtcatggctgcactctactgtcatgccgcccttgattccgacatcgttttcctcagcctttaagcagttgttctgacagcctgtgacaccaaacttgaacttgtgaggaagctctcttccgaagtatctttcatcaagttccttagccagagtgtatgtatcgatacatccgctaggacagatttctgagccctgacacgctgtgacagtacgtactcttggtccgcagacacctgttcctacaccgccctttgccagttcctcttttaccacattgatatcctcaaccttgataaaaggaatctcaataccctgacgcgatgtcatatgaacatatccatgtccatatttctcagcaacctctgctactgttttgatattttctgctgtaagatttcctcctacaaccgcaattctaagcgagaaacagcccttttgcttctgtctcatgaaaccgcccttttttagggccgcgtaatcaactttctccgccatttttaatctccttactgtgtaaatatgttaatgttttgttttatatgtaaatgcatatgcacgctctcatttgcatacacattgataacttattatgatggcttaatcagctatatttgaaaaagcctgtgcaaaatcctccttgaggtcatctatatcctcgatacccacactgactcttataagatcctcaaatactcctgcatcctccttctgcttatctgtgctgtgaagactgattgtggagcccggatgaatgacaagtgtctttgtatctccgatattgctgagtgtgtatggaatcgtcaggctgtctataaatttaaatgccttttccttgctgccaaccctgattgtaaggattgctccatagccgtttgtgagctgtttttttgctatttcatgccatttgctgctacaaagccccggataattaacctttatgtcaggataattgttttctatccacgacgcaagctcgagtgcattagaacattctctttccattctaagaccgagtgtctcaagtcctataatatttaagtatgcattcaccggagctaaacaggcacccatatttctgaaaagactgtttctcagctttgcgacaaatgccataggtccatacttcacataatctgcaaaccccggatatctgttcttgtcccatttgaacttacctgaatctgtcagaataccactgattgcattgctgcttccattgatatatttggaagatgaattgaccacgatatcagctccatgctttaaaacctgtatcaggtaagctgtcgatgtggtattgtcaactacaagcggtatatcatgtgcgtgtgctatctctgcaagcttctcaatatctgtgacatccagacagggattaccgatagtctctgcaaaaatcagtctggtatgctcattgatgctgtcctctatctgctgccagttgttgttctcgacatatctggttatgatgccgaaggcctcaagatcatgaaataaatctattgtgccaccgtagagactggcgcttgagatgagctcatctccactgcttagtatatttaagaaggtattcatcaatgccgccatgcctgatgcgcatgccaccgatgctattcctccctcgagctttgttattctgttctcaaaagctgtaatcgtaggattggcaactcttgtgtaacagtagcccggagctttgttttcaaatattttttccagatctgccgcgctctcctgctcgaaggcgcttgtctgatataccggtggcagtgtagagccatttgtctcttttgtcacgccggcatgaagtaagcttgtattaaatctcattgttttcttcttctcgttaattcttacatagtctattgtgttactaggaattgatgagattattatacaaacgtgttggttgaaagtcaatgctatcagttatacaaattatttgtgcgtggttatatattttatttataatcattaatgtcccttaaatactctgcggctgtcgttgcggcatttgctccgtcagatactgctgttaccacctgacgcagtgtcttggtacggacatctcccgccacatacagtcccggctggacacttctatcatggtcaccattttttgttgcagcatatgtgatgccgtcctcacctgccactacatatcctctctcatcgagctgcaccagattctttataagctctgactgcggtactgagccatatgccacgaatactccgtctacagccagtgtcctgccacttttaagctttatgcctgtcggctttttttctccatatatttctgtcactgtttcgtttaggacaagttctacattttctttctgctttaagagctcaactgtgctctgtgcaccgcggaagctgtctcttctgtgaaccagatagaccttctcacatatatcggacagatataatgcatcatccaaagcggtatctccgccgcccagcactgcggctgtctttcctttatagaatgctccgtcacagattgcgcagtaagatactccctttccggtatactcatcctctcccggcactcctgcctttctcggatatgctcctgcggtatagatgagcgctcttgcctctgctatcgtgtcatcatcgaatttcactctgtatatcactgattcttctttctcaccattttgcactgcttctatctgcactgcttctttttcgataaattctacatcaagagacactgcatgctccctgaatttttctcccaggtcgtatccgtttatgtttggaagccccagatagttgttcacatttccgctctcggctatctggcctgtcccctcgtattctttttctgctactgccacattcagattggctctctttgcatatattgctgcagacagtcctgccggaccactgcctattattattatatcaaacatggaattggttcctttcatcgtccattgaattttttcggtaacttattatatacattatccttaaaaaatacaataataccgcctgcttttataaaacacctttataaaaacaagcggtatcaattttatctatcgtatatacatcctggcctcataaggtctgagcactgacatatcagaggtatccttataatttgaaatcagcacctccatgccctcacactcctttgcaagcggcattggtatctccttgtcaaagaaattgcacacaacaatcatggttttttcttcattctttctgctgtatgcaaaaatattctcatcatcctcaagtaaaagtgtgaatttaccatcaacaaataccggataatcctttctcagctgaacaagcttcttgtagcagctaaagattgaatcagggtcatccacctgtgatttggcatttattttgtcgtaattgtcatttacctttatccaaggtgttcctgtggtgaagccggcatttgccgagtcatcccactgcataggtgtccttgcattgtcacggccctttgcgtaaatggacttcatgatttcatcctttgagtatcctttttcaaggcgctcatggtacatgtttatgatttcacagtccttataatcctcgatatcatactgtacatttgtcatgcccagctcctcgccctgatagatgtatggtgtaccctgcatgccgtgcagcaatatagcaagcatctttgcagattccactctgtactccctgtcattgccccatcttgacacgatacgcggcaggtcatgattgtcccagaacagactgttccagccacagttgtagagctcattctgccagtgagccattatctttttgagctttttaaacggaagcggtgcaaggtcccatttctcgccgccctccttctggtcaagccctatgtgctcaaactggaacaccatagaaaactcgctgccatccggattgctgtaaagctttgcgcgctctgtgtctgcgccccatgcctcacccacggtaatcaggtcgcccttctggaatgtctccctgctcagctccttaaaatattcctgaagccttggtccgtttatggtgattctcttgtccggctcttttgctatctggtcgattacatcaagtctgaagccgccgactcccttgtccatccaccagagaatcatatcgtagattgctcttctgacctttggattctcccagtttaaatccggctgctccggtaaaaactgatggaaataatactgtccgatttccggcacatattcccatgcgcttccaccgaaacaagccttcatatcacttggcggcacgccttcatctccgtctctccagatatagtagtcatggtatggattgtccttgctctttttagcctccttgaaccacctgtgctcgtttgaagaatgatttaagacaagatccatcataatccttatattgtgcttctttgcctcgtttatgagctcctccatatcatcgagactgccaaacgtcggatcaatatccctgtaatccgaaatgtcataaccgttgtccgcctgcggtgatttgaataccggcgaaagccatattgcattgattccaagcgtctcaagataatccagtcttttgatgataccctgtaaatcaccaaagccgtctccgttagaatcctgaaagctctttggataaatctggtaaactaccgcctttttccaccatttttcgttattgtttttgctcattatgccctccttgtctcttcattatctcttttagttatctcttatagctgtctctttttgtaaaaattcagcctagtttctttaatgctgtatcaaattatgctattttacaagcaccaccaaaacctcacagctttcaagcttaagctcggatgctcccactgaaacagtgctcttttcagcatcatttgtgttggacaaaagcacctttttcacactgccatccagcctgatttgtgcctctttactaccaaaatttgccacaaccagcacgcgcttattttcatcctctctgtaataagccatgatgccatctgtatcctcatatgccggaacacatctgccataggtgaacagctccctaaattcttctgactttctgagtgccacaagccttctgtaatagttcaaaacagatgaaggatccttttcctgcgccgcaacattgatagccttatagttttcattgaccttaagccatggctttgctgtggtaaaaccggcatttgcctcatcactccactgcataggtgtccttgcattatccctgctcatccttccacaggctgcaagtgcctgctccttggataagcctgctgcaagtgctgccttgtactgatcctttgtgctgatatcgtcatactcatctatactgttccattttgcattttgcataccgatttcctgtccctggtatataaacggaattcctcgaagcagtacgctgacagttcctaacatctttattccggcaggattttgagcatgctttggtaaaaatcttgaggcacctctcggctcatcatgattttctatgatattggccttaaagccgtacttttctgtctcaagctgtgaaccaagaatggtctttctccatgtatcaaaatctattttcggtgcatcataccagccatgctctccatcacttaagcactgtgcacaaaaatcaaatatcgttgaaaaatgcccattctcaccgataaactccggaagctcctcaggcttcatattgaatacctcgccaaccgtaaatgcatcatacttcttaaatgtattgttctttaattcctctaagagctctccgacaccttctgcactttcaaccatcttgtagcaggcagccagtccgtcctctgcatccggctcaaaatcagggaaatcgagatttttctttatattgattatcgcatctattctaaatcctgacaagcccttatcaagccaccagttaatcatctcataaagcttttgtcttagcttttcattctcccagtttaaatccggctgctccttcgcaaacatgtgcagataatacttgtccgtgcccggcaccttctcccagcagcttccgccaaaataagagcggtaattgctcggcggattgccgtttttaccttttctgaaataaaagtaatcagcatactctccatccggatccttaagtgccttttgaaaccattcgtgcttatccgagcagtgatttattaccagatccatgatgatgtgcatatcacgcttctttgcctcggcaaggagctcatcaaactcctccatagtaccgaactcttcagctatcgcatagtaatcagatatgtcatagccctgatccacaaatggcgatttatatatcggagacagccatatgatgtcaattccaagcgattttaaataatccagctttgaaatgatacctcttaaatctcctattccgtcaccgtttgtatccagaaagctctttggataaatctgatatgccaccttgtcatgccaccattttctctccat

SEQ ID NO: 403 - DNA, 7612 bp, unidentified
  source 1..7612: mol_type = unassigned DNA
ttactcggccccctgattccttatgagccacgcaaaccctttcgctgtccggattccggcatctttgaagtgatttcccggattccattccaaaatcgttcggattttctgcatctttaacagattatacccttcccggatacagtcccctacggttgccatcagcggatttctggttctttcttcacggtttcccaagctcagatacaccgactttgctctcatatcgtattctttcatatattgcagaaatcccggaaaccagacagacggagatactgctgcaacacctgcaaagatatccgtctgatatgccgcccaaagagagaataatcccgccagcgaatatccaccgatataatacgtttttctgcgatccgcacattgtcctaaaagaaattgcagcagctcccccgcaccgtctccgaagccctctctgccaaagactgccgacgcctcccagggcgaaagatcccgattccaattgtccactttcaccgcaatcaactgaaagtctgcctttccctgttttctgatctcgtttaattccgtttccatctcctccagatcatgatcgcctaccggctgaatcagaactgtggaagcggagagatttccgtagtgaactatctgcatcgcgtcctccatttcttctcttttgcacccttcctacaaatacaccgtcagaaagagcaaataaacttgcccatcagaaaataatccgtactgacatccaaatttatcaagatagctccaccttctcagtcggccagaattttctgagtgccgcataggaaaccaggaagtttgcaagccagcctgccggcacagcaagccaaacgaaatcaatgccaaaacgcggtgcacagatcaatgccacggacaggcgaatcgcaaggtttaccatgttggcaataaggaatggccgcatgatcccgagtccgcgaagaactccatcggtcgccattttgattcccataaagagaaagaagtaaccaagccatctcatataatccccggacacctgataggccagggctgttccgtcttttccaaggaatagcgaggaaatctgtgtgtgcagcgtttcaataacaaggaaagcaagcgccgcgaagcacacatccaataccaatgctgcatggtagccttttttgatgcgctgggttttgtttgcgccaaggttctgggaaacatacggcgaaaccgcattcccgatggacacgaaaatcagggaaaaaacattctccacccgcattgttgccgcatatcctgccagtgcctgcgtgccgaagggatttaccaccgcctgtacaatcatcataccgatagacacggtagactgctggagaaccgatggaacagcaatttgaagcatggaacacagctcccgcccgtcaaaccaggaaaaggtactctgataccgccgcatccgattaaaaaaaatcaaaaaggaaagcacagccggaatgccctgtgcgatcaaagttgcaagggcggcaccgaacacgccgagccccagacctgctaccatccaaagatccatcccaatattcaggatggaggaaaagatcagcagccccagcggaatttttgattcaccgatggcggtgaacatggtagagagaatattgtacatgaacaaaaacggaaagcccacaaaatagacccgcaggtacagcactgcttccttcaaaatatcggcaggagtctgtaagcctctcatcatcccatgggaaaaccaaaagccaaagacacccaagaggatactcagaaccaaaaagctgatcagagatgtagacacaatggttttcattttgccatactccctggcaccgaaatagcggctcacaagcacacctgcaccaacaccagcccccagtgccacgcaaatgaaaacattggtcagagctgcacaggcaccaaccgccgccagcgcagaagaacccacaaactgaccgacgataatggagtcagccatattgtatacctgctgaaaaaagctgccaagaatcatcggcattgcaaaaaccgtcagcgctttcagcggcgtatcggtaatcaaatactcctcttttgacatgatcctatatcctccacaacttcctgatttttatctgactggatactctgtgtcagaaactgaccgtcccgaaacaaagcgtagatcgtgtccggttttgaccaggacctgacccaaccgactcacaggatatattccatctgccgttcctttgttttcatgcccattttttcgtagaagtgctctgccgatgtgtttcctgtccagacgttcagggttacttcatagcagcccagttcctttgcctgttgcttcacatattcaaacagactttccccaatgtgctgccctcgtgcctgcttgtcaacgcacaggtcatcaataaacaatgatttaaaggacaccatgttggtggaaaagggctgttccctgagctgacagaaggcatagcccatgcacaaatcgtcctcatctacggcaacatagaccggtttatcctcctgcttcaataattccgtcaactcacaaagagtatatttggtggtgcctggtataaaaatatccgggcggatctctgcatggatctgcaatacctgtcccaacagttcaagaattcttgggatatcctttttctccgccttgcgaatcttcatttcaaacttatctcctttacaatttcgatttttcaggtaaaaaatctccagttttgaccggtgtctgacacctgatttctgcggtcctcgccaccgggattttcccatcattttgaagctattttaccatcttataaaatgaaatccaacaaatttctgttagatttgtctattttgtacaatattagtaataattatcattattatttctacaggtaatatgagtcttttctcttttaaaatctgcccgacaggtatatactgaagctatcagcagaggtgctgaatttcaacgaaacggaggatacacagatgtcaaaattatatactattaccttaaacggagtaacggaggaggtttataacaaagcgacggattacatcgagaaacacgcgcttcgcttaaactacagaccggaggtgtccaccatcgacgccgagtttccggacgatatcgatcctgcaaagagccccgagctgcaggaagcgtacatccgcaacgtacagcagagactgtaaggttcggattctgacgcgggacgctgcatgcgcctgcaatgtgtgaaaacataccataaatttcgaaaaagaaaacctctcccgccggtttttcccgactgcggagaggttttttctggtatccaatagaatgcgcgctctgccatctttatccaaccttaatgcgacgtccccgtcccttatccgatcttaaaatctctggccgtataaaatataattatcacagaaataaggagctgcctttatgccaaagaaaatcatccgtcgaaagcaccgtctttcgtcttttcaaactatcacattagggtttgccggggtcattttgctcggagcgctgctgctgatgcttccgatctccacaacagccggatgtgtaacgccattcaatgaaacgctgtttaccgcgacctctgccgtctgcgtcacaggacttgttgttcaagataccggaagctattggtccggcttcggacagacgatcattctggtactgatccagatcggaggacttggcgtcataaccgtagcagcatcgtttgcgctgttgtccgggcgaaaaatctccctgatgcagcgcagcaccatgcaagatgcaatttctgcgccaaaggtcggcggaatcgtccgtctgacacggttcatcttgcgaggaacgtttttgatcgaactgctgggcgcactggccatgctgccggtgttttgccatgactatggatggcgcggcatctggatggcagtgtttcattccatatccgcattctgcaacgccggatttgacattcttggaacagaaagtaatctctatccatcccttaccggctatgccggcagtccgacaatcaatatcacgatcatgctgctgatcgtagttggcggcattggttttttgacatgggacgatgtctgtgaaaacaagtggcggcttcatcgctaccggatgcagagtaaggtgatccttgtcacgacaggtcttttaattcttttgcccgccgcgtttttctttttcaccgacttttccgcgctttctaccggaaagcggctgctggcatctttttttcagtccgttacgccgaggaccgcgggctataacacagtaacgctatctgcaatgtccggtgcgtcgcagggcataatgatccttctgatgctcattggcggttctccgggttctacggcaggcggaataaaaacaacgacactggcggtcttgcttgccaatactgccgcaacctttcgtcagcgggagaatgctcagtttttcggacgtaggattgatttcagcgctgtcaagaccgccgcaaccattctgacaatgtaccttacactgttctttggcggcgctgtttttatcagcgtgtatgaagatttgacgctttccgcatgcctgtatgaaacggcttcggcagtcggaacagtgggattgacgctgggtatcacgcctcagctgcatatcccttcccaaatagtgctgatcatgctcatgtatctgggcagagtcggcggtcttacgctcatttatgcagcgttttccggtaaaaaaataaacggcgcaaagctgccgcaggaaaaaataatgattggataaggagtctttacacatgaaaaacattttattgattggcgcaggccgcttcggacggcatatcgctatgcagttatctcagctggagcatcagatcatggcagtcgatatagacgaagaacggatcaatgatatacttcccttcgtcaccaacgcgcaaattggagacagtacaaacgcggagtttcttcgctcccttggcatcggaaatttcgatgtctgcatcgtgaccattggcggcagctttcagaattcgctggaaacgacgtcgcttctgaaggagcttggcgcgaagtgtgtagtgtcgcgtgccgagcgggatgtacatgcaaagtttctgcttcgcaacggagccgaccatgtgatctacccggaaaagcaggtagcagaatgggcagcaattcgatatactgccgatcatattttcgactacatggagatcgacgggcagcacgccatttttgaagtagaagttccacaagggtggattggcaaaagcgttggtgaactgaatattcgcaggaagtatggcattaacattcttggcatcaaacattccggaaaaaccgacgtttcaattacgcctgatacggtgctgtcaggagaaataaccattttagcgctgggtgaatataaggcgctgcaaaagtgtttccggatatgaacggacggtgaaacaatgtgaaagatgtcattttgatcgttgggatggctctaacgttcctgttcggatggtttctgatgaagcagctggatcgctttctgtacgaaaatcagaaacgaatccgattggacacaatagaaaccgccgccttttggtgctataataccatcaagaggggtggtgaaactgtgcagaacaatgaaaacaatctatcaaaagagcatattctggtgtgcctgtcctcgtccccatccaatgaacgtattgtacgaatggcaggaaaaatggcgcaggcattttgcggaagccttaccgcgctctatgtgcagactcccggatactctggcatgaacgcagaagatatcgctcgactgcaggcgaatatacgtcttgcgcagcagcttggtgcagagatcatcacaacacatggagaagatgtaccaacgcagattgcagaatatgcgcggctctccgatgtgaccaaaatcgtaattgggcgcagcggtgtgcagcgacggcatttctggagcgaaccgacgctgacagaacagctcattacgcttgcgccggagatggacattcacatcattccggatgcggaggtctataaaagctatcccaggaaaccacttttcgccgttcgcccggcgcttccaaccgcccgggaactgcttctgactgtcgggattctgacagccgctacgatcatcggatggttgtttctgcggcttggctttgcggatgccaatatcatcatggtttatctgctgggtgtgcttctgacctccgcttttaccagcggatatacctgcggcgtgctgtccgcctttttgagtgtcatcttgttcaattattttctgacagaacccaggctgtctttggtcgcctatggaagcaaatatcccataacctttgccgtcatgttcatggctgcgcttttgaccggtacacttgcagccaagctcaaagcccacgcgcagctatccgcacgggacgcttatcgcacaaagctgctttttgatatgaacaggcagcttcaaaaggcggaaacgtctgaggaagtttaccggatgaccgcaacgcagatacaaaagctcatgcagcggaacatcctgatttatccggcacaggaaggcgcgctgtccaaagggatcctttacccggctgacgcaagctgcccctatagtgccccggacacagacccggaacaggatgtgatcgactgggtctggcaaaaccggaaacgtgccggagcaacgacacaaaactttcccaaagcaaaacgactgtatcttgccattcgtactgggcagcaaatttacggcgttgtcgggattccgatggaaaagcaaacgcagcctgacgcatttacattcagcgttctgttctcccttctcggtgagtgcgctctggcgctggacaacctgcgaaatgccagagaaaaggaagaagctgccgttcttgcaaagaacgaacagcttcgcgctaatcttctgcgttcaatttctcatgatctcaggacaccgctgacctctatttccggcaacgccgacacactgctgcatagctatgacatgctggatgagcaaacacggaaacagatttttacggacattcatgacgatgcacaatggctgaccgagctggttgagaatttgctctccattacgaaaatcgctgacggcagcgtcaagctgcgtctttccgatcaggttgtggacgatattgtgtctgaagcgctacggcatatcgaccgaagatcgacagaacatcacatcacggtggattgcggagacgtgccgctgctgatacgggtggatgcaggactcatcgtgcaggtgcttatcaatctggtgaacaatgcagtcaaatatactacggctggctctaacatctgcatcacggcaatccagcaaaaaaaagcggttgagatctgtgtcagcgataacggccctggtatcccggacgaactaaaggagcgtgtttttgaaatgttctttgccgggggaaatccgattggcgacagccgccgaagcctcgggcttgggctcacgctctgtcaagccatcattcatgcacatcatggcgaaataacgctgaaaaacaattcgccgcatggctgcatcttttcctttacattaccacttagtgaggtgaacttaaatgaataa

SEQ ID NO: 404 - DNA, 15084 bp, unidentified
  source 1..15084: mol_type = unassigned DNA
atcaacgacaaggtgctggaagaagtcttcggcgcacaaagtgagtacgtacggcaacattttatcacgcccaacggaaaaggaggctacgcattactgccggagtttgatacccagcgaaaggtggaagcttatttcaatggaaaagaagacgaggatagtctgaaactaaaagaaggactttattccctgatcagcaacgtgctgttcgtcacagaccaccacgacaccgagaaactccatcccagaattgccgtacagaatgattccgtattccagcagctgaactggaagcaacagggagccttcaaccacctgtacaatcattactactaccagcgccacaacgagttctggtatcaggaagccatgaaaaagcttccggtgctcacccagtccactcctatgttagtatgtggagaggatttaggtatggttccggagtgtgtgccctgggtaatgagacaactgcagatactctcgcttgaaatccaacgcatgcccaaacaaatgtacgaagacttcggacaccctgaaaactatccattcctgtcggtatgcaccatcggcacgcacgacatgtccactttccgcggatggtgggaagaagacccagccctcacggagcgcttctatcatcaggaaatgcatcatcagggagagattcctgtacatgctcccgggtggctctgtaaggacatcgtcttccatcacctgaaaagcccctcactgctctgcattttggcatggcaggactggatgagcatcaacgaacagttacgcaatccggatatagaaggagagcgcattaacataccggcccatccacggcattactggcgatggagaatgcacctcacactggagcaacttctgaaagaaaaggaactgaaccagacaatccgtgaattaattgaagacagtaaccgcagatagaaatatacaataagggcctgaaattccaacgacttcaggccctcttcattttttcttatcagaagtttacttcttccccaataaaaattcgtcaatggtctttctcaaagcctcttcaggcaaggctccttgcgccacctgaggagttccctttgccggaatgaacagaagggtcggaatactgcgtataccaaaagctgccgacaactcaggttccttatctgtatcaatcttatagaccacaatctttcctttatattccgcagccagtttctccagtaccggggcgatagccttacatggaccacaccaagtggcatagaaatccacaatagccggtttatcaccttcgtatttccattccttcggattcttctcataattatataccttggccaggaaatcggctttagtcagatgagtaacattagcttgtacggctgcactctcctgtacttccgccttggtttctttaccagcattatttccacaagccggagtcagcatggcagcagccagcgccatcaacagcaatcttttcataattcacaaaataacgggttatcaattcttttcttcgtgcacaaaaatagtgcattttgtaataagaacaaattttgaatcaaacaagttgagaaaaacgcaggtttataacttttattgagaaagttcgatggaatactataaaacatcagcgggataaacaaatgtactttgttcattccgctgagatctaatcttttaatctgccccgacggctattaatacccttcttcgttgaaaaatttatacagattgatattaatacattatattactgtcaatgaaacttgcgcaaacaaactactccatttgaggcaattgtagtggggtaagcaggcaaacattgatcgctatctttaatcataaaatctgcaagtttcttaacccaaagataagaaacttgcagatttatcaaagacttatatatattaaattgctgaataacaacaaactaagcattcttaaggggaaattatgtattatttttctacaactacattcggatatttctttttccatatatctcttcccaaatcagtagaaaatacagaggtaatcaggaatttccccactctagtatccggatcctccggtttcaactgctgtagataagtacattctttcccgtaactatcgacagcatatacgatctgctgcctgataagcactgcaccattaggatcctgttccgcaaagttgttgtcgcaatagtatatataagcaatatctcctgcttcatcatattcgactccccaggctgtcatcgcatgatttccagttttgggaccggcaacatcaaacacatttagaccgatagccctcttgttgaggagggcatctgtaacaaatgcattgaactgctctctatctggattgtgcggagaccttgccgtcaaggcattatttctcgtgaatacttctgaaaagaatcctttaaacccattgatatcgcccccaagataagccccggtaaaaaaccattccacacctttaggatcatcgttgccaaaattcggaaaatgatctttgaagaactggaaaacttccgacctgttgactgtgacataatctggttcaggaagagaaccgtcccagttgccaactccgttagggtaaagcggtttgaaatcataggacggacgtttgaaagtacctgaaccagtcgtcactgaagaatcataatcttcatcgtatgccgcaaggtattctttattcaagcacatccaccacgacactacatttgatgcagatgccgcccagcacatttgggagtcgccttcatagtttccatgtgacttgttgcagtcataccagccacatccttcagtccatgtgagatattgctcctcatagtaacgattgtcatatctcaaccactggccttcaggcaaaccatactttttaccgagcctatatacaggaagattctccttacctggaaaatcaggcacattcaatccatatacccacaatgtctttcctgcaagttcaggattacccggtctcagagtaaggtttatcgaaatctgctttccagactcgaaaaatgtaaggtcattgttctcttctgtcttttcaggagcattaaaatacgctgtcttaccctctgcagcgatctgcagaagtccgtcattgtccctgtaagggagcgcactttgaggaataatcacagcggaaaaatttccttctgcatccttgaatggggtaatccatttgaaatcagttccactcacttcaacttcaccggtaaggagattgaaattgccctgtgtcaggcttctgactttaacctctggcgaagtcacactgccagagagaaaaatcctgattctatgaagagcatgcccgaaattcatattagctttgtatacacctaatccgacgactgtttttgaaaacagcaaatctgaattataaaaaccatcttcagtctgatctaatgccatattcagctgataagtctccggattctgttgttctccggttgccgggtaatgagcagacaaagatattggtccttcaccaaaatcactacgcttcagacgtggcatccactgtcctcccgaatatgtaagttcacgataagaaagacctttatccccttgaatataaagcccaactttatcgccctccgtaaaacttccggaaccatcacttgcaagatcagcccttgtcccctctttggaaaaaacgatatccaaatacccgtcatcactttcttggtaattatcctgaaattcggaagaacaagaaaagaaagataaaaacaagatgctgataaagataccagtgtatatacctttaaatatagaaaaacatttaaccataaaaattaatataaatgcaatacaggtaagatttaatttagtaagtctggtatgagtctttagaccattaattttgcaaagatatcaatttatctggtaattcatcggcagactagcctgccggtgagaatttttattcgtccgggaacagattactttaagattgattgcggagacctgagactggcaagatttctcacccattgctgtctttctcataaacaggatgaccgattcctcgctgggcttggctagtatgtggggatgaaagcggtcaatcgctgttgcccaaacaaattaaatccccgcaaatcttaccgatttacagggatttaatagtatttttgcgcttacaatcgcactaatattcttcctcgttgaagaagaaatcttctttactcggataatcaggccagatatcttctatactttcataaatttctccttcgtcttccatttcctgcaagttttcgattacttccagtggagcacctgaacgcattgcatagtcaattaactcgtctttagttgctggccaaggagcatcttccagctttgaggccaattccaatgtccaatacatagtatataattttaaacagttttacttctttatattgattcgcaaaaatataacaaattctttcactcgcaacgcttatcccaataaatttcgctttcgtctgttaaattgtttaaccgacgtgacaaaacgaacagataatcagacaatcggttcacaaaacactttgcctgctcctccaattcataggaaagactttcttccaaggcctgaatccgacgttctgcccgacgacagaccgtacgacagacatgacaaacggaagccggataactccctcccggaaggataaaacctgcaagcgacggtaaagaagcgtttatctcatcgatagcctgctccagacgctgcacgttctccactgagatatgactctctaccggaaaagtagtcttttccaagtcggtagccagataagagcccaatgaaaacagtttatgctgcacaaagcgcaacaattcttcatgctctacatccttcattaccgaaatcaacaacccgataaaagaattcaattcgtctatggttccgtatgcatccagacgtatatctgcttttgaaacacgtactcctcctaccagcgaggtggtacctttatcacctgtcttggtataaatcttggtcattttcatatatttaaggtcttaaagtcaaagaaagttcacaatacgatgctcctttatacgctctttatcaaaaaataccagtccgacatcataaaggtcgaatgtaattcccgtacgaggatctgctataacttctttccaccaccttttcttctctggagtagcatagggattaccgataatgaaacaggtatgtttatcagctagtggaatcagtcgttcaaacatctccttatacgctggagtatgggcgatatgtaccacttccggctttacaccctcctcaagtaacctatccatatctgcctcacagtttccggtcaggtaatcaatagaagatttaccggaaagaatccgtttcactgcatcttccgattgttctgagaacgtataaacctgcatgccagtattggcttcggccatataacgggtacttattccgctgccagttcccacttcccatactacagaaggccgaaggtgattaatcagacggaacaagaacttatcgactttttcccgataatgaggcaaaaaagccaccacacgtctcaagtgatgcaatggcgcataggcatagaatggtaaacgttcgtaaatgacaaacgtaataaaaaagaaatcggaaggagaatgtactccgtatccgcaacgatgccggaaacgacgacaccagttccaccctcttaatataaaatcccccattttcggacgctaatattggttgataacggggacaaagataaaatttatagcggaaaaacgaaaaggatagtgtaattatgatacaaaatatcctgaatggatgcagaaatcattccgcttccatccaggatcaatatttcatgaaaaacgtggtttatttacgttgtcccaatttgtcatccaaatacagaatgccagctgcgtcgccacattttctaagtttctctacaatgttctgtgcagtagcttcttcttctacctgttcacgaacatatccccacaagaaatcctgtgaagctttgtcttttacttcagaggcgacatttaccaactcgtcaatcaagctggatacatgacattcgtgcttgtatacatgttcaaatacttcctgcacgctgccccatccttgtggaacaacatcaattttatctactttagctgcaccaccacgtttaaccaaataatcagctaaatcataagcatgctgcaattcttcttgtgactgtttacgcatccatgaagcaaaaccgtcaaaaccttctttctgcaagtagaaagacatggacaaatacaggttagaagaccacatttccgcagtaatctgctcgttgatggcattttgcaatttttctgaaatcatagttctatgtgtttaagtaagtaattcaacatctataaaataaaccacaaaaaagatgccagagaagttcttgccagtttttttccagcgaactgacaggatgtcaccagagtaagtctatctacgaaagcatgcgagattttccccagaaaaaacgggacaaattcaacttatccataacccaagctatcgcaaacgaccccattacacagaaacataaggacacacacaaaaagagcatcccagtaggttcaaaagccaatacaggcaccaaaggcttcactgccattgtaaataccggagaaaacactaacagtacaaaggtgtgagaacctatgtagtccagtccttttttcagataatcgggtaaatagcgatatacagccaacaaaaaactaattaccagataagtcagagcgaccccggaaagagttgatttattcaaatttgtctcatctgcagccagccatattacaggcagcaaagcccaaaatgaagctgaaaagaaagtacggaagtcgattgagctacgtctcaaagccactccagcggtaaagtaaagcgcatttatcaaagaaagtattccacaaactgacaatacggcatagcttaaggccagtataattaagacggaaacggtattactccactttccagccaatttgtccaccaataaataaacaagtccacactgcatcaacgtatgaagataccaatagggccccaaaggatgcaagaacaatttatccagccatagaggaacacttaaatgctccactgattcacgaaccggcagaatagcagacatgatgacataacctgtttccatcacagcgtatggaataaaaatccaccacattgtacgcagaaacggacgtattcctttagctatattcataacataaccggaaatgaccaagaaagcaggcatgtggaaagtataaaccaaagctttagcgtatggatatttgtcaccgatatatacaagatgaaacacaatcatcaataaaataaaaatggatttcaagtaatcgagctctgcaatacgatttttcatggagcataagaattgattggtaataaaaaaaggttgacttaatcaagtcaacctctctgtacccagacccggggtcgaaccgggatggatgttactccactggtgtttgagaccagcgcgtctaccgattccgccatctgggcatttgtttttcgtttgcgtgtgcaaaggtaaacacaattttctaaacgcacaaggaaaatgctgatttttatcaaaaaaatctcttgttgtccttgtattacacaagcagcaacaagagattctatagtttcaccgtttatttctgacggataaagatatttatcggagttcccgaaagtttccagcgttcacgaatcttattttcaaggaaacgacggtaaggctctttcacgtattgcggcaagttagcaaagaacacaaatgaaggaacctgtgtattcggcaactgagtaatgtatttaatcttgatatactttcctttatttgaaggtggtggataagcctcaatcagcggcagaagttcctcgttcagacgagcagtcgggattcttgtcgtacgtgcctggtaaacttccttcgccagttcaagcactttcagaatacgttgttttgtcaatgctgatgtaaagacaatcggaaagtcagtaaaaggagccagacgatcacgaatcgcatcttcatatcctttcattaccttagccgttttatcctcaatcaagtcccatttgttgacaacgaccacaagtcctttctggtttcgctgtaccaaagagaagatgttcaaatcctgaccttctataccacgtgtagcatccagcatcagaatacatacatccgaattttcgattgagcggatggagcggattacagaataatactccaggtcttcgctcactttattctttttacggataccggctgtatcgaccagatagaaatcaaaaccaaacttattgtaacgggtatagatagaatcgcgcgtagtacccgcaatttctgtcacaatattacggtcttctccaataaaggcattgataatagacgattttccggcattcggacgtcctaccacggcaaagcgaggtatatcatcatccaaaatttcaggagtctccttcttgaacttgctcaataccaaatccaacaagtcacctgtaccacttccactcaaagcagaaacacagtaaggatcacccaagcctaaggaataaaactcagccgcattatactgcaggtcgttattatccgttttatttgcaactaaaagtacaggagtcttggaacggcgcaagatttcggctacttccatatccaaatcagtaactccattcattacgtctaccacaaacagaatgacatcggcttcatcaattgccagcattacctgtttgcgaatttcctcctcgaatacatcatccgagttgactacccatcctccggtatctactactgagaattcctttcccagccattccgacttaccatactgtcggtcgcgggttgtaccggcctgttcattcacaatcgcctgacggcttttggtcagacggttaaacagtgtcgactttcccacattgggacgtcccacaatcgcaactaaatttcccataattatcttcatttacggcttcgcagccgatattaatccaattgataaccaaaatttttcaattccttgtcagagcttctccagtccttatccactttgacaaatgtctccaggtaaatggatttacggaagaagtgctccaatgtcttacgcgcttcagtagctactttcttcaaggcttttccctgacgaccgataataatacctttctgagaatcgcgttccacataaattactgcattgatatggatgcttttctcgtcttccttgaactgttctactacgacctctactgaataaggaatctccttgtcataatacaacaagattttttcacggataatctctgtcacaaaaaaacgggcaggcttatccgtccattggtcctttccaaaataaggaggagaatccggcaacagctccttaatacgcttcatcaccacatccacattgaatttggccatagcagagataggaataatttccgcttccggcaacatttcgtgccattcatccaccaatttcaccaaatcctcctgattggtcaggtcaatcttgttaatcagcaacaaaaccggcaccttcaagttgcgcaccttttccataaactccgcattcttgtccggtttttccaccgtatcagtaacatacagcaacacgtctgcatccaccagtgccgattccgagaagttgagcatagactcctgaagcttatagttaggcttcaatacccccggagtatcagaaaagacaatctgcatatcctccgtattaagaatacccataatacgatggcgagttgtctgagccttgaaagtcgcgatggagatacgttcccccaccagcaagttcatcaaagtagattttccgacattcggattacctacaatattcacaaatccggctttgtgcataagtaaatattagttcacagacaaaaaaacgcatcgattgggatgcgttttttatctgtagtgttaattctttctttatttatttccgtcataaccccacttcacatagcaggcaccccaggtaaatcctgcaccaaacgcagtgaagatgatattatcgcccttcttcagttgcttttcataatcccataagcaaagtggcagagttccggcactggtattaccataacgctggatattaatcatcaccttatccaatggaacttctagacgagaagcaaccgcatcaatgattcgcagatttgcctgatgaggtacaatccagttgatgttatccttattcaagccattacgttctgcaatctgagccgttacgtcagacatattagatacagcatatttgaataccgttctaccttcctgatacagataatgcatcttattgtcaattgtaaaataagaaggaggacaaaccgaaccacctgccttcatgtgcaggaacggaagtcctttgccatctgtacgcaagatagaatccatgataccatagtcttctgtagtagcttctaccatgcaagccgcagcaccgtcaccgaaaatcggacatgtagcgcggtctccatagttcaccattgaagacatcttatctgcacctacaatgataatttttttatgacgaccagactgaatcatgctggcagcagtttccatggcatacaagaatccgctacaagcagcctgcaagtcaaatgcatacgcattcttcaatcccagtttgtcacaaagaatagaagcagtagaagggaaatgatagtcaggagttgtagtagctacaatcacgcagtcaatagaagccggatccgagtccgttttctgcatcaactgcttggcagccttacgggccaaatatgaagttcccaaaccttcttcgttcaggatacgtctttctttcaccccgatacgagtcataatccactcatcgttggtgtcaaccattctcgacaattcttcgtttgtcaggacataatcaggtacatatccaccgactcctgtaattacagcatttattttttccatcatttcttaatttcgtggcttataaaaaaacagccgaagagccgaaatggctctccggctttaatttccctggaacatgcaaagatgttctacaaagcgtcaagttattaaagagcagcttctttttcgatagccaatttacctctgtaataaccacaagccccacatactgtgtgataaacatgccattcgccacagttcggacaaatagctaaagtaggagcaactgccttgtcatgagttcttctcttcgcagttctcgtttttgattgtcttcttttaggatgtgccatttttctaaacttttatttaattattatctaatattttcttcaattcgttccatctcggatctatctcacgtgcttctgaaggctcatctgtcatttcctcctcatccaggaagtcatccatttcatcctcctcatctgcagaagtacgcaaatgtttgttcaaagctcccatcatacctttattacattttccgggagcatgcacatgcttcatcggtatgctcaatgcgataaactcgtacataaaccaagcgacgttaatatagccgtcttcttccggcacaatcaccatatcgtcttcgtccgagaattcgagtccgagtttcaccttcaatgtgtcatccgtttctaccggcaactccatgtcatccaaacagcggtcgcacggcacaactacggaaccctcaatatggaaattcaagacataaatgcccatcgttttcttcacatccaactgcacctgcaattttcctttttgaatctccggagcatcaatatccgcgaagaactgatttgtcagtgaaaactcataatgagccgagttttccttcatgttcttcaattctattttatatgtagcaagttttcccaagtcgcaatactatataaatcgggcgacaaagatacaaagaataattcattttatctagtctttctactttttatttattaaaaatacttgtttcacttcgaatctgccttcttaatacctattttaatatatccatatttcctaatcattaagaccagaacgctattgctttcctctcctttatctttaaagaagtaacattgcaccctgatagagtagagttttaatataattaaccctaatatcgtaaataaatatagtattaatagcacatttaattagtaaattaagtaactttgcggcacatatcaaagaaataaaaccttatctgtatgttaactcaaataattaatgcccgtattttaactccacaaggttggttaaaagacggttctgtactaatcagagacaacaaaatcctggaagtaaccaattgcgacctggctatcgtcggtgcgacacttattgatgcaaaaggaatgtatatcgtgccgggaggagtcgagatccatgtacatggtggaggtggacgtgactttatggaaggatctgaagatgcgttccgtgcagctatcaaagctcacatgcagcatggtaccacaagtattttcccgacgctttcttcgtctaccattcctatgattcgtgccgctgctgaaactacggaaaaattaatgagtgaacctgacagtccggtactcggactccatttggaaggacattatttcaatatgaaaatggcaggaggacagatgccggaaaacatcaagaatcctgatcctgaagaatatattccacttttggaagaaactcactgcatcaaacgatgggatgctgctcctgaacttcccggtgctatgcaattcggtaaatatattacatcaaaaggggtactggcagctgttggacatacacaggctgagtttgaagacatctatacaggattctacgccggctatactcatgccacacacttctataatgcgatgccgggattccacaaacgtcgcgaatacaagtacgaaggaactgtagaaagtatctacttaatggacgacatgacagtggaagtagtagccgacggtatccatgttcctcctaccattcttcgtctggtacacaaaatcaaaggagtggagaagacggctctgattactgatgcattggcatgtgctgccagcgacagcaaagaagccttcgaccctcgcgtcatcattgaagatggggtttgtaaactggccgaccgttctgcactggcaggtagtatcgccactatggaccgcctgattcgtaccatggtacaaaaagctgagattccattggaagatgcggtcagaatggcttcagaaacacctgcccgcattatgggtgttcttgaccgtaaaggtacactggaaagaggaaaagatgcagacatcatcgccctcgaccgcgacctgaacgttcgtgccgtatgggcaatgggaaaactggtggaaggtaccaacaaacttttttaacgacttaaatattcgacaattatgttgactcaaatcataaatgggcatattcttaccccacaaggatggttgaaagacggctctgtcctcattagtgacggaaaaatcctggaagtaactaacagcgacctggctgttatcggtgcaacggtaattgatgccaaaggcatgtatatcgtaccaggattcgtaagcatgcacgcacacggaggtgccggacacgattttacagaaggtactaccgaagcttttcagaaagctacacaagctcacctggtccacggagcaacttctatcttccccacactaagttctaccagctttgataatatcaaaagggcagtagctacatgtgaagaactaatgaaagcacccgaaagcattattcagggtcttcatattgaaggtccgtacctcaataagaaaatggccggagcacagtgggaagagttcctgaaagatccagatccggaagaatacattcccctgctggaaagcacacagtgcatcaaacgctgggacatcagcccggagcttcctggaggacatgatttcgcaagatacactcgttctaaaggcattctgactgcagtcactcacactgaagccgaatatccggaaatcaaggctgcatttgaggctggattcactcacgcagcacatttctacaatgcaatgccgggattccacaaacgccgtgaatataaatatgaaggtacagtagaaagtgtatacctgacagacggaatgagcgtagaagtgattgccgacggtatccacctacctgctactattctgaaattggtttacaagctcaaaggagtagagcaaacctgtctggttaccgacgctcttaaatatgcagccaatgaaggaggagtcatcgatgatccgaagtatattatagaaaacggagtatgtaaattagccgaccactcttcattggcaggaagtctggcaaccatggatgtattgattcaaaccatggtgaaaaaagccgccatcccattggccgatgctgttcgtatggcttccgagactccagccaagcttattggcatcgagtcacacaaaggaactctccagaaaggaaaagacgccgacattgttattcttgacaaagacatcaatgttcgctgcgtattctctcatggaaaaattgtggaaggcaccaatacaatgattcactaacctaacctaattatattatagaaatcaatcaagaattccctggactgtgaagtccggggattttttatccttatactttagaaaagttgacacaatacagccttccatctcccctccatagtgccttctacattccaccaaacatgtcagaaagtcctagaaggacaacaaccctatggcgaataaatatatcttcagtatggttcccttttcagactaattttcgtaggttttaagcgcatctgaatatttcggtgaagaatgactctccttttccggagaaaacggctccaggcgcatttctgaaggccgcccgggtgagcggcaagggaacaaaggaaagcaaggggaaaaaggaaggaaagaaagaatccggcagcaaaaagaagaagcggcctgctgcggaaacggacacggacagtacggatacaaaaaaagccctgaagcgttctgcctcagggctcctgttaaaacggcgactacctactctcccacttgcgcagtacc

SEQ ID NO: 405 - DNA, 5492 bp, unidentified
  source 1..5492: mol_type = unassigned DNA
ttatatactggtgtcttcaaacttatacagctcccatcctccggctttccgacggaagtacaggatgttggagaaaccgttgccgatacctttcaacgcaagaatcttcgttgtcgagttatcatcgtttctctgtccgtagttgatattggagagacgttcggaaggaagttccggtttgaaggcaaaccattggtcccggtcgagcgttgtctccaaaatggagaagtagtcatccggatcgcaggtaacaaaaatcaacggttcgcgtatgcgccgactctggaaaaggctgtcgacggcaaaacggccgaagaactccacaaagtcctcattgtcgtcctgctcgataggacgcaaattgatggcttccagcatccacgctcctttgatgcgttcaaagtaatactttttcatcatccgtgtcttcacgaatatccactccacttgcacagaggtaagcgcagtatctcctactaaatccatatcttcttctttatcaaacaggagcgtatagtaatgctgcttggtaaataagtcgtcatgcttccaacggtgttcgtcgatgttcagcttcttgtctccattgtagtagggcaacggaaacttcacacgctgacgctgcaacacgtcgtcggaggcaaaattatagatgaaatcgtcgaaagactcgtcggcctgtataggctgcggctcttccggcaattcttcctggtggactgaatcggttttgtaccggatggaatccacctcttttgtaatagatgcgaaggggtcaatcttagctttcttgtttccacaggaactcagcataccgagcagtatgacccctgcaattagttttttcattattttaatttctctcgtaacttttcaagcatatccaccgtcatgctttccaaatcgtaggcgggcttccatccccactcttcgcgagcacaggtgtcgtccagactgtcgggccagctatcggctatgcgctgcttcaaggggtctatttcataaaccatctcaaactgcggcacgtgcttcttgattgcctggtatatcgtttccgggtcgaaactcatggaagcgatattgaaagcattgcggtgtatcagtctttccgactcagcttccatcagtgtgatcgccgcgttcagcgcatccggcatatacatcatatccatcaaagtgccttgcttaatggggcacacaaacttctctcctttcactgccgaatagtaaatatcgacagcatagtcggtcgtacctcctcccggaggggtcacattcgaaataatgcccggaaaacggacagcacgggtatcgacaccgtatttattaaaatagtaatcactcaataactctgtcgttactttagtgactccatacatggtacggggacgttgaatggtgtcctgcggtgttttcgtgtgaggcgtactagcgccaaacgaaccgatagaactcggagtaaacactgcgcacccttgttcacgtgccacttccagcacattccacaatccatcgatgcctattttccaggccagcttgggtttcgactcggcaactacggacaacagagcagccaaattataaatcgtatcgatgtgatactcttttactacagatgcgatcgcttctccgtccgttacatcagcaatagccgacggtccggactcctttaattcccctttaggttctgcacccggaatataacctgctactacatttgcatttccgtaacgtttacgtagctccatcgttagctccgaccctatctgtccggtagctccaataatcaaaatgtgttccattttttcttctgacttagaatatcaagcttaaatagtgcgcaaagtaagcacttttttttcagattttaatcaaaaagacattgttattccaagaaaaattgtgtcctttgcaatataacttaatcacataaacaccatgtacggtaaaatgcaagaattcctcagccagacactggctgaaatcaaggaggccggactttacaaagaagaacgcctgattgagagtgcgcagcaagctgccattacagtaaaaggtaaagaggtactgaacttctgtgccaacaattacttgggactgtccaatcacccccgattgatcaaggcttcccaagagatgatgaatcgccgcggatacggtatgtcgtccgtccgttttatctgcgggacacaggatattcataaagaactggaagcggctatttccgactatttccagacagaagacacgattctatatgctgcctgcttcgatgcgaacggcggggtattcgaaccgctcttcaccgaagaggatgcgattatctcggactcgctgaaccacgcttccatcatcgacggcgtgcgtctgtgtaaagcgaaacgctatcgttatgccaatgccgatatgaaggatctggaaagatgtctgcaagaagcgcaggcgcaacgtttccgtattgtcgtgacggacggtgtgttctctatggatggcaatgtagctccgatggatcagatttgcgatctggccgagaaatatgatgcgctggtgatggtagacgagtctcactcggcaggagtggtaggcgccaccggtcatggggtcagcgaattgtataagacacacggccgcgtggatatctacaccggaacgctgggcaaagctttcggtggtgcgctgggaggatttacgacaggccgcaaagagattatcgacctgttgcgtcaacgcagccgtccgtatctgttctctaattcattggctccgggcattatcggcgccagccttgaagtattcaaaatgctgaaagaaagcaatgcgctgcacgacaagctcgtagagaacgtgaattacttccgcgacaagatgaccgctgccggatttgatatcaaaccgacgcagagtgcgatatgcgctgtgatgctgtatgatgcgaagttgtctcagatttatgctgcacgtatgcaggaagagggtatttacgtgaccggtttctattatccggtggttccgaaggaacaggcgcgtatccgtgtgcaaatctctgcaggacacgagaaggctcatctcgacaaatgtatcgctgcctttatcaaagtgggtaaagaactcggcgtattgaaataaaactttttcatatcttccattgttattatcggggtgcattagaagtgccgacaagataacaatggaagatttttttatttatatatggaagaattgactctcacgactcctgcccttcttttctcggcagtctcactgattttattggcttacaccaatcgtttcttatcgtacgcacagcttgtgcggcagttacgcgaccgctatatggagaatcctacggatatcacggtagcacaaatagagaacttacggaaacgtttgaatctgacccgcaccatgcaaggactgggaattgcgagcctgtttctctgtgtggtcagtatgtttttcatttatatcggactgcaactgctgtccgcctatgtattcggagtggctctgctgttgcttatcgcttcattgggcgtgtctttccgcgaaatacagatttccacccgttcgctggagatttatctgggaacgatggagaaaggaaagaataaagacagaaaatgacctgtaaacaaaaaagagggtgtgtcgaaaccctcataaactaaaaggggagttttgacacatcccctttcataacttttatttgtagcttattaagtatgtgtaacttattaacgctgtcccaattgtgagtctacaaagaaaattccggtatcaccggctttcttgattttgtcaacaatgccttgcactgtagcttcttcttctacttgttcgcgaacgaatccccacaagaaatcctgtgttgctttgtccttctcagcagcagctacatctaccagtttgtctaccaattgagaaacatggcattcatgtttgtaaacgtgctcgaatacttccagcggactaccccaaccgttaggaacaatatctattttatcaactttagcggttcctccacgtttgataatataatctgccatagcataagcatgcgccatctcttcctgagactgcttcttcatccaatgggcaaaaccactgaaaccttctttctcgaaatagaaagacattgccaaatacaggttagcagaccacatctcagcagtaatctgttcgttaattgcattttgtaatttttctgaaatcataatcgtatcttttattaagttgttaatgtagtttctttttgaactcattacaaaaataacaagatttcagttcagattgttccatgtaccccgtatttttaaactacattcacactttgattgtagcggtttattttttatttacaccagctcgtcggaagtatatcctttcggaagctcacgacagttatagccggaagccattatttcaccgtatgcaccggcagaacgaagggctatcaggtctccacgcttgactttgttcagatcaatcgcctttccgaaaacatcggacgactcacatatcggacctactacatcgtacgcttccatcggttcttcggaggtcaggttttccatcttatggtatgcctgatacaaagccggacggatcaaatcggtcatacctgcatcgaggatggcaaatttcttcttggctccttgcttcacatacagcactttagatatcaacgtaccgcactgccccacgacggcacgccccaattcaaaatgaagtgtttgataaggacgcagtttcagttgtccggcataggtggcaaaataatctttgaagttcgggatagcctgacggttgggatggccgtaatctatccccagaccaccaccgacatttatatgttctaccagaatccgatgcgcttccaacttgtcctgcaattcattgacacgattgcacaaagcgacgaaatcgcccatatcgagaatctgcgaaccgatgtggaagtgaaggccgataaacttgatattcttcattcccaaagccacgtctatcactttatccatatcctgcatactgataccgaatttattttcggcaagaccggtagtgatattggcgtgagtatgcgcgcctacatccggattgatgcggaaagcgacattggctattttgttttgagcggctgccagctcgttgattacttcaagctcgggaatagattctacattaaaacagaagattccatattctaatccgagattgatttcccagtctgctttacccactcccgcaaaaacgactttattggccgggaatcctgcacggatagcggcacggatctctccaccgctcacacagtcggctcccattccgctttcacggatgatggcaagtaccttcggattggcattcgctttgacagcatagtgtactgaataattaggatatttggcaacctcatggttaatagccgacaatgtatcacgcagcactttggtatcgtaataatagaaaggtgtctgcaaagtgcggaattt

SEQ ID NO: 406 - DNA, 30231 bp, unidentified
  source 1..30231: mol_type = unassigned DNA
acgccctatgtgaccatagactgcggcgattttccatacctgggcgtatggaccatcgaggcaacccatccatttgtatgcctggagccatggtacggcctgtgcgctcccgacggatacaagggagaattaaaagaccggccgggcatccagaagctggaagcctggggaacctgggagaaaagctacagcatccggatcgaatagaaccgaggagctgagtcttataaatacacatgccattagaagcgcatctgcggttttggggtatgagtgaaaaagaggaggaaaatcatgtacaagatcgttaaggcagaatgtctggcggacaagatctatctcatggacgtagaggcgcccagagtagccagagcctgccagccgggagaatttgttatcgtaaagattgacgaggtgggagagcgtattcctctgaccatctgcgactttgacagagaaaagggactggtgaccatcgtattccagaccgtaggcgcatctacccagcgcatggcggaattaaaagccggagattatttccaggatttcgtaggccccttaggacagccatctgagtttgtaaaggaagacatcgaagaagtaaagaagagaaagtatctctttgtggcaggaggcgtaggctctgctcccgtataccctcaggtaaaatggatgcatgagcacggcattgaggcggatgtgatcgagggctccaagacaaaggatctgctgatcctggaggatgaattaaaggcagtagccggaaatctctatgtgaccacagacgacggctcctatgagcgcaagggcatggtaacagacgtgatcaaggatctggtggagaatcagggcaagaagtatgacgtctgcgtagccatcggccccatgatcatgatgaaattcgtatgcaagcttacaaaggagctgggaattccgaccattgtaagtttaaatccaatcatggtagacggaaccggcatgtgcggcgcctgccgtgtaaccgttggcggagaggtgaaatttgcctgtgtagacggaccggagtttgacggccatctggtagatttcgaccaggccatgaagcgccagcagatgtacaagacagaggaaggcagagccatccttaaggctcaggaaggagccacccatcacggcggctgcggaaactgcggaggtgacgaataatggacgttttaaagagagtacccatcagagaacaggagccaaaagtaagagcagctaactttgaagaggtctgccttggctatacacaggaagaagcacaggaggaggcgtcccgctgcttaaactgcaagaacgcacagtgcgtaaagggctgtcccgtatccatcaatatccccaaatttatttcagaggtaaaagagggcaaatttgcggatgcagccgctaccattgctgagtccagcgcccttcccgctgtctgcggccgtgtatgtcctcaggagagccagtgcgagggaaaatgtatccgcggcatcaagggcgagccggtttccatcggaaagctggagcgttttgtagcggactggtccagagaaaacggcgtcgttcccgtaaagcctgaaaagaccaacggtatcaaggtagctgtcatcggttccggcccttccggtctgacatgtgcgggcgatctggcaaagatgggttatgaggtaacgatttttgaggcacttcatgagccgggcggcgtattaacctacggtatcccggaattccgtctgccaaagaccagagtcgttcgtcctgagattgaaaatgtaaagaagctgggcgttaagatcgagacagacgtgatcatcggaaagtccgtaaccattgacgagctgatggacgaagagggctttaaggccgtatttatcggctccggcgcaggacttcccaagttcatgggaatccccggtgaaaatgccaacggcgtattctccgcaaatgaatacctgaccagaagcaacctgatgaaggcattcagagacgattatgacacaccgatcttcctgggcaaaaaggtagccgtagtaggcggcggaaacgtagccatggacgctgccagaaccgcacttcgtctgggcgcagaggtacatgttgtatacagaagaagcgaggcagagcttccggctcgtgtggaagaggttcaccatgcaaaggaagagggcgtacagtttgaccttcttaccaatccggtagagatcctgaccgacgaaaatgactgggtaaccggcatggtagtccgtaagatggagcttggcgagccggatgcatccggacgccgcagaccggtagaggtagaaggctccgactacaccatcgaggtagatacggtgatcatgtctctgggaacttcaccaaacccgctgatttcttctacaaccgaaggactgcagaccaataagtggaaatgcatcattgcagatgaaagcaatggaaagaccaccaaggaaggcgtatacgccggcggcgatgccgtaacaggcgcagctaccgtgatcctggctatggaggcaggtaaggcaggcgcgaagggtattgatgaatatctgaagggaaaagaggcctgaagaatataaataaagcattaaaggatgtcagatcagggaagcatattgactggcatcctttttgtattctcaataaaaactcattataaaacacaagactatggtgggaaaatgtgataaaatgataacgcttcctgttgcagtagaacaagaaacagtttggttaaatagaaatcaaatggctgaattatttggtagagatataaaaacgattggtaagcatataaataacgctttgaatgaagaattgtaaagtacccctgcaactgtcgcaaaatttgtgacagttcaaaaattagtaatttaactatctttttactggaaaaacacctctttctgtgttagtataaaaatatgttcttgcttccggaaataccgggggggggtggtatataaatgtaccgtaaaataagtttagtggacgcagaaaaggtttacattaaaacatttgggggatttgacctgtattatagggggaaagagattgatttttcaaatgccaaagcaaaagaactgctggcagttctggtagaccagggtggcagggaaatcagcctgcatgagatggcccagattctttcggacggggaagatgatgaaacggccagacaggcagttcatgtggcgtggtccaggctcaagaaaacgctcgtcagctatgggctgggagatatcgtgaggaaaggccgcggattttatgcgctgaaccgccggcggatccggtgcgactgctgggagatgctggaggagaatgaagaccgttactttatgggcgaatatatgccggagtacagctgggcagaggttacattgtcatatctgctccagaagtttgaggaaattaaaacccggaaaataagggaagcacagaacgaataataaagtaatgggggaaaaaggactgcagggcagaatacctgcagtcctttttttggaaattatgtaaaaaaaacggtactaaaataaaaacactttgaaaatgttacgaaaatacaggaaacatgcataacaatgcaaaactgtaacggtactgataaggttcatggtgtatcttattaaaggatagttaataaaaattaagtttttattaagaatacgattaaaagcgggagagatatttaatgagtcagagggaagggcaaaacatatttataaaaacctttggcgggttcgatgtatttgtagacgggaaacaagtccatttttccagtgaaaaggcaaaggaaatgctggcggttctggtggataagagagggagcagcgtatccttatcacagatggcctggctgctgtatgaacagtcaccggaacagaccgccaaaaataatcttcgggtgatttattaccggctgaagaaaatactggagaataacgggattggcggcatgctgatcaaaaagagaggaagttttgcggtggacgccagcagctttatctgtgacgtatacgaatttgtggaagggaatcccgactatgtccccttgtttctgggaaactatatgtccggttacgagtgggggcaggaggtagtgccttatttaaacaacctttactgccagtactgtgaaacgcctatgaacggactttccgatcaggttcatgagacgattctcagtcaggggaaaaaaggcggaaagagaaaatgacggatcagctggaaatgatcgatatccacgctcatattctgccgggaattgacgacggagccagaaactgggaggaaaccggccgtctgctggaggcagcctgggcgcagggagtccgccatattatcgcaaccccccatttttccagaaagacggatatggagcagttaagacaattaaaagcaggcgtccgggagctggctcacagaaaagggctggaacttgaaataagcctgggacaggaactgcggtattttgaagaactgccgctgtatctggaacagggcagagcgctcacactggcagaaagccggtatgctctggtggaattcaaaccgggagatggatttcagaccataagacgggcagtccgggaactggtccagtacggatttattcccgtattggctcacgcagagcggtatctttgccttcgtgaaacaggcaggaccgaggagctggttcagagcggagcctgtctgcaggtcaatgcagaaagcctgacaggcggtctgtttgaccggacggcagcctggtgcctgaaagaaatccagaaggggaggatccactttgccgccagcgatatgcaccggccggatacaaggccgcccaggctggaagaggcatttaaaaaactgtcaaaaaagcgcagctgtccagatgcggccaccatatttgggaaaaatcagagatatattctggaaaacaagatactgtagcaaaactattatgaaaagaaaaggaaatgttataccatggaaaagaagtttgatgacaatgacgagatacagatcgatctgctggaactggcctatgctttaaaaaagaagctgtggctgatcatcctggggctgatcgtaggagctttcggagcggggctgtacagcaagatcctgctgacgcccatttataaatccaccgcaatggtctatgtactttcaaaggaaacaactcttacctcactggcagacctgcagatcggcagccagcttaccaaggactacagcgtgctggtaaccagccgtccggtattggagcaggtgattgaaaaacagcagttagacatgagggtggatgaactagagcgtatgatcagcattggaaatccgacagatacccgtgtgctcactattaccatatcggatacagatccgatccgcgcccaggcgctggcagaagaggtggcaaagacttcttccgattacataggcgatattatggaaatggttccgcccaagatcatcgaggaaggcgtaccggcagaaaaaccaagttctccaaatgtgaaaaagaatgcggctatgggcggtctggcagcagccgtactgatcagcggaattatctgtctgggagtgatcatggacgacactataaagacagaagaagacgtggagaaatatctgggacttactgtactggcttctattccggatgtggatgaaaccggcaaatcagaaaacgaaaagggaagaaaaaagaagaaaacgaagggagcggtgtaaaaaatggagatgagactggaattaaaaaatacggaacgaaatgattattactatgaagaagccattaagacactgcgtaccaatatccagttctgcggcagcagcttaaaaaccattctctttacaagtaccgtatcgggagaaggaaaaagcgctactacagtagccgtagcttcttctctgggaagtatcgggaaaagggttcttctggtagacgcggatatccgcaaatccgtactggtgaagcgtcatgagatcagcggtcgtcccaacggcctgtcccagtatctcagcggccagaaaaagcttggagaagttatttaccatacaaatatggaaaatgtggacatgatcctggcaggcccctattctcccaatccggcagagctgttagaggatgaactgttcaaagtcctgctggaaaatgcaagggaattgtatgattacatcataatcgatacccctcccatgttaaatcttattgacggcgcgatcatcgcaaatcagtgtgacggagctgtgatcgtagtggaaagcgggggcatcagctaccgtatggcccagaaggtaaaatcccagctggaaaagagcggatgccggatcctgggggcagtcttaaaccgggtgggaggagagtacggctcaggctattataagaagtattacggcaaatattataagaaatattacggaaaatacggtaagtacgagcgttacggatacgattccccaaaagaaagagaaaacattgaagaaagcagataagaaaaagagagaatggctggttacagcagcggttattctggcaatcctgtttgcagctgtttcctggaatctgtatcaggaaaaaaagctggctgccgccgaggcacagctctggagagagcaggccggtacatcacagaaagaggggaaagccggatacggacaggtacaaaacaccattgaatacaaaggaaaaacctatcgccggaatacctatgtaaaagccattctgtgcatggggatcgaccggagagaacctctgacagagacgaaaacagcgggagcggggggacagtccgacggcatctttctggtcgcccaggacacggccagaaaccgggtacaggttctggccataccaagagacaccatgacccccattccacttacagatctgagcggaaatatcctgggctatgatacacagcatctcacactggcctatgcctatggggatggaagagaaaaaagctgccagtttatgtgccgggcggtgacagagcttctggacggccttcagatcgacggatacatggctgtaagcatgggagcgctgaaacctcttaatgacgcggtagacggcgtaaccgtaaccattgacgatccggagctggaaaaaagagatccggcctttaaacccggaacctccgtaaccctgatgggcgatcaggccgaagctttcctgcgctacagggatacaggaaaaagccagagcgccgtagcccgtttggagcgccagaagggatatatcgccggttatgcggaggccgtgaagaaaaaggcttcacgggaagagggagttgcattaaagcttctggaaacagcagctccctatatggtaacaaatctttccaaggatcagtatctggatatgatgatggcatttattggaagcagccagcagctggggggagatgatatccgcacacttccgggagaaggagcagagacaaggatctatgacgaataccatccggatccggaaggagtaacacaaatggttctagacctgttttacagggttgaagaatagaacaaatttatcaggaaaggaaaggtgaacgatcatgaagaaaaaggcagtagttattgcaatggcagcagctcttgcggtttcacagtatgcagccgtatttgcggcaaacagtccgggaaccggagttgtgattcccaatgaggacagcgacggcgattatgacatcggagagcgcgtggatcaggtaacaggtggatcatcctcagcgtcaggcacaggaaattcctcagccgccacgccgggaggacagaccgcagcccagattacggttcccactgaaagcggaacagccagccagagcggcggccaggccgtagtaggagatacaggcatcgagtttgtacagggaagcgaaagcgcggtaagcggacttccggaaaccgttgtatccaccattaatgccattaataccggaaccggtctggcagaggccggaaccggtctggacttaagcggctacaatgccctggtaggaaccaccgcagttatgacctatcaggccggaaccagagtggaaaaaacaggagctaccaatatgcctgtgtatgtcccaaatctggtagagggtctgggaaccgtacaggtgctcttctacaacaacatgacttccaagtgggagctgatcacgcctacatctgtggatgtggcaaagaagatgatccatgtgaccatcccgaactcgggaacattttcggttatctataagcgctgacagagcgtgtaaggataatctgcgccggtttccatgatcgtgaggccggcgcagtcacaaaacgctgttttgaaaacacacaaaggaaaagggggacatattaatgaaatctgcaagtatgagaaaaatgatggaatgtttgatggttgtactgatggtatggtctgtatttcagatcagaaactgtattacattacaggacgtccagtatgctcaggacaggatccactgggacatactggcatatgaactgctctttctggcgtcctgttttggttttgtgacagctatggggacaggaattttaaaaaagaaccacagtgaggagtaattgattatgctgatccggaacaaatcattttatatgtttgcagacgccattgctgtggttgtatcatttatacttgccctgctgggcagatttgcttctctggatgcaggggacttccagctgggaaactggtacggctgtattttgatgctttttatttacattgtggttattttattctatcagccggaccagcctataatgaagcgaaaccgatggaatgaactgagagtagtcatcacggataacttttatatggttatggtgctgacacttattctttttgcatttaaacttggagacaattcgtcccgcaagttttacatattattttttcttttcaatatattgaccatgtatctgggacggatcacgattaagacggcgctgtttcggtattatggaaaacaggaaaacagaaagcgtctgttgatctgcgcatcagatacaaatgtattgaaggtaatgaatcaggtagttaacgcaagactatacgactatgatgtgtctgccattgcggttatgcacattcacggaaagatagagttgaaccaggtagggagaaatgaaaacggaagctatctctggtctgattcagacggattgacggaatatctgaaaaaacaggtggtagacgaggctcttttaagccttcccaccatgcgacgtgaaaaactgaatgacttaatccgccggttggaggcattgggaattgttgtccacgttacggttaatacgtttggaatggcagaaaaagagaaagcgatcgaaaatttcgggtcttaccgtgtgcttacatacagtccaagaatttttgaacccgcagaattgtttttaaagcgcctgatggatatagcaggcggtctggtgggaatcattttcacctgtattttatccattttcgttgtacctgccatatatctggaatctcccggtcccgttatttttaaacagaccaggatcggaaggaatggaagacgtttttccatttacaaattccgttccatgtatatggatgcggaagaacgtaaaaaagagcttatggcacagaatcagatggacggccttatgtttaaaatgaaggacgaccccaggattacaaaggtaggaaaatttataagaaaaaccagtatcgacgaatttccacagttctttaacgtattgaagggggatatgagtctggtgggaacaagaccgccgacgctggatgaatttatgcagtatgaagaacatcacaagagacgtttaagcttaaagccaggaatcacgggaatgtggcaggtcagcggacggagtgagatccagaattttgaggatgtagtgaagttggatctggaatatattgacaactggtccatctggctggatattaaaatcctgcttcagacggttctggttgtgttaatgcatagaggggctgagtaaagagagtatggaacgctttatgaaaagtaatttagatatagcaatgtttgggcataagcgaattccttcgagagaaggaggtattgaaattgttgtagaagaattgtgtaccaggatggttaataaaggaaaccgggttacctgttataacagagccggacaccatgtaagcggcgctgagtatgatacaaaagcagcaaaagagtataaagggattcggcttaaaaaggttccgacaattgaaaaaaagggactcgcagcagtatcctcctccttttttgcagcgatttttgctgctttagggcattataatgtggtacatattcatgcagagggaccagcctttttttgctggatccctaaattgtttcggaaaaaagtgatagtgacagttcatggacttgactggtcacgtgaaaagtggaaaagtggatttggctctaaatttattcgtcaaggagaacgaaatgcggtaaagtatgcagatgaaatcatcgttctcagtaaaggtgtgcaggattattttgaaaaaacgtacgaacgtaaaacctgttttattccgaatggaatagaacgtgcagctgtacgtcagccgaaattgattaccgaaaaatttggcttgaaaaagaattcgtatattctttttttgggacgtcttgtccctgaaaaaggaattcgttatctgattgaggcatttaaggcagttgaaacagataaaaaactggtaatcgcaggaggtgctagtgatacagctgattttgaacaggaattgaaaaatcttgcaggaactgataaaagaatcatatttactggttttgtacagggaggagtattggaggaattgtatagcaatgcctatttatatacactcccatctgatttggaaggaatgccgcttagtttgttggaagctatgagttatggaaattgctgcctgacatcggatattccggaatgcgcagaagtagttgaggataaagcgtttcttttcaaaaaatcggacaagaatgatttgagaaaaaaattgcaggatgcttgtgatcatccagaaaaggtaaaaaagatgaaattagaagcggctgattttatttgccaaaaatataactgggatgataccgtgaaacagacactgcaaatctatatgaaatagattttgtgaaggaaaaagtatatgagaacgttgattatcaataatctcctctaaccgaacgcaggtggtgagatgtacatagtgaaaatgccggaaaaatagcgtatttacggcacttttcaagatggacttggagctgcgagagcagtttttatctcgctacctaggttcagcaacagcagatgaaattatcataaaaactttcagtatcactacctgcgtttgtatggagcactctggtttatgaacaatacattggaagtgcttcatctgaacagaggtagtgaaatagaacatagaacaaggagaaatttaacgtgaggacgctgattttgaataaatttctgcaccgaaacggcggaagtgagacgtatatattcaaattgggtgaggcactggagcagcacggacatgaggttcagtacttcggtatggagcatgaaggccgctgcgtgggcaaccgagtcaatgcttatacatctgatatggacttccacggcggcagcaaactgagcaagctgacctacccgatcaagaccatctacagcaaggaagcacgggtgcagctgagaaaagttctggacgacttcaagccggatgtctgtcatctgaacaattttaactaccaactgactccttccatcatcttggaaatcgtgaagtggcgtaaggagaccggaagagattgtaaaatcatcttcacggcacatgactaccagttggtctgcccgaaccacatgctgaacaatccgaacacccaccagaactgtgagaagtgtctcggcggccatttcgtgaactgcatgaaaggaaagtgcatccacggttccacggcgaaatctgccatcggcatgatggaagccgaattctggaagtggaagggtacctacaagtacattgacaccatgatctgttgctccgagttcatgaagagcaagatggacagcaacccgctgtttgcgacaaagactgtggcaatgcataacttcatcgacaaggtggagtggaaagagactccgaagaaggattacgtcctctacttcggccgcttctctgaggagaagggcatcggcacactcatcaaggtctgcaaggaactgccggatgtacagttcatcttcgccggtactggcccgctggaagagacagtaaatggtattaagaacatcaagaacgttggtttccagaaaggcgaagcactggagaagctgatccgtgaggcacggttctccatttatccttctgagtggtatgagaactgcccgttctctgtgatggaatcccagatgtacggcacgccggtactgggagcgaacattggtggcatcccggaactgattcaggtcggcaagaccggcgagctgttcgagagtggtaatgccgaagatctgaagaagaagatcgagaagctctggggtgataagaagctgtgtgcggagtacagtgcgaactgtaaggacattagcttcgataccatcgatgagtattacaagaaaattatgagagtttataggtaggagaaaaaagtgaaaggcactatttgttgtgaggaaaagtgtacggcgtgtatggcctgtgcaaatgcatgtcctaaaaacgctattggtattggcgtaaataaatatggatatgaaaaagtagtcattaacgatgacaaatgtgtcgattgtggcttatgtaccaaagtgtgtgctaggagaatgcaaatagaacggcacagtcccatcaaatgctatgcagggcaatcaagggatgctgaaaaactgaaacgttcagcttcaggagcagcatttcaaatgttggcagaaattgttcttgaaacaggtggagtttgctatggctgtgccggagaaatgataaatggcgagtatagagcaaatcatattcgggtgacaaacgtagatgaacttcaatctatcctgaattcaaaatatattcttagccatataggaacaacatatcagcaaatcaaaaaagatttagaaaatggcaaactggttctctttggtgggactccctgccaagcattaggattgaagtcttttttgaaccacgaatatgaaaatctgattattgcagatgtaatatgccacggagtaacatcaaaaacaatattcaatgactatttaagagaagttgaaaaagaacagaatattataataacagattatatattccgagataaaaaagctggctggggaagcaatttctgttatttctactatgaaaatggcgataaggataaaatcaaaatcaagcgttttccaaaagaaggagcctcacatgaaatacactatttgagaggagatatttcgcgtgagaactgcttcagttgtgaaatgtcaaatactaacagggtgagcgattttacatttggcgattactgggctatagaaatagaacatccggaattcatagtaagaaatgcccccgcgctttcaatccgaaaaggcatcaactgcataatggttaatactgagaagggaatgcggtatttgtctaaattgcaggaaaaaatggttatgtacgaagtagatctggcttctataacacgacataactcgaatcttttaaagccatcaaaacgtggtaaagcgcgtgatgctgtattagaaaactactatatggagggatataaaaaaatagaggaaaactataacgatacagttggaaagaagagaacggtctatgcggcgaagaatatgattaagacgcatattccagataagctgagagttcagatttatcgaatgaaatttttaagaaaactgttatcgggagagtgaccaaaatgaaaatatcaattaattccacatatagctatattcggacaaatatcaattacggatcaaccttgcagtgttatgcattacagaagtatttgaaaaaaagagggcatgatccagaacatttaagagactatcgtgccaatccggttttaattatgaaaaggctgaaaaacattaaatattttaagcctttctgtgccaaggcagcggcacagtttgaaatgggacgatttattaagaagaatattgctgtatccaagaagggttatatttcggaaaaggcaatgtataaaaattgtccgaaggcagactgctttattgcggggagtgatcaaatatggcgaaatccaacgggaagtagatttttaaattatgctccagatgaagcaatcaaactttcatatgctgcaagctttggaagaacgtctttaccaaaggaaatagctgaaaaaatcaagccgtggctgagtagattcgatggtattagtgtgcgagaaaagaccgcagttaatatggtcgagtcagtcgtggataaaaaggcagttcaagttcttgatccaacgcttttgcttgatatggatgaatatccatatgcaaacaatgaagaaaaaaattattgctattgttatttcttgaatcttggagataaaaagaatgtttcatttgatgaaataaagagatatgcagtggatgaaaatatgaagctaatagtaacttctccgtctaattacacattgtttttgaatgaaaatccgattttcccaactgttgagaaatggcttgctctttataaaaatgctaactgtatctttaccaatacatatcatggaatgctgttttgcatcattttcaaaaagcaatttttgttctttgtacagaagggatcgggtgctgctgaaaatgatcgattctattcattaatgtcgatgctgcacttggaagatcggatggtcacatctgaggatgccgtgtatatttctgaaaagatgaagaggccgattgactacgaaaaagtatatgaggtgatacattcagaacggacacgaacggatagattctttgaaaaatttggaatatgagtatgaatgaaacgataaatacaaaagagagatatgagggaatcgatggaatgaaagcatatgccatcattggcatcgttctaatgcacattctcgcaaatggaaaatatgaattgggaggttttgtgtttgaacggctgataccatcattcacaaacctcgttttccttttcatgatggtcagtggatttgtccatctgtttggtaatggcttacttgcatatatctttacagcggttgcggtcatctgcggttccgtggtgttctcggtatatgcgaagtgtttttttgaataaaattgaaattttgattgttaataggagagttaatcatgtctgaagaaaagaagttaaatggtacggtcatcgtcacttaccgctgcaacgctcgttgctctatgtgcaaccgttataaagcaccttccaagccggaagaagaaatcagcatcgaaaccatcaagaaactgccgaagatgtattttaccaacatcaccggcggtgagccgttcatccgtactgacctgaaggatatcgtgcgcgaactgtacaagaagtctgatcgtatcgttatctctaccaacggtttcttcacagatcgtatcgttgatctgtgcaaggagttcccgcagatcggtatccgtatttccatcgagggtctggagcagaccaacaacgaaatccgtggcctgcagaatggctaccagcgtggttacggtacgctgaagaagctgcgtgaaatgggtatgaaggatgttggctttggcatgaccgttcaggataagaatgccccggatctggttcctttgtacaagatttccgatgagatgggcatggagtttgcaactgcttctctgcataacagcttctacttcgttgaggcgaagaacatcatccacgaccgtccgatggtggcaaagaactttgagaatctggtcaatgaactgctccgtagcaacagcccgaagaagtggttccgtgcatactttaaccacggtctgatcaattacatctacggccagaagcgtttgctgccttgcgatatgagcttcgataccttcttcatcgacccgtatggtgatgttatgccttgcaacggcaccaaggacaaggaagtcatgggcaacctgaatacccagagttgggacgagctatggaacagctcgcaggcagaggaagtccgcaagaaggttcgctgctgcgaccgagactgctggatgattggttcggtttctccggctatgcacaagtacatctggaaacctgctacttgggttttggtacataagttcaaggcactgttcaccaagcatccgtactctatgtatgaattgaagatttgccgtgattaccgtgatggcaaagtcactaaagaggatctggataagtgcagtacctgcgatatgaactgtgtgatcaacaatggtctgagtgaggcatccaaagagcagctgaagcataagactggcgaggaaatcgtggatgctgatatcgcacagcagatgaaaaagtaaaaggagagaaaggaatgaagcgagcactaatagtagcagcaacgggtggatttttaaatggttttttgattccggatatgaagctgttgcaagaaatgggatatgaagtacattgtgcagcaaatggaaattcggtttctacctttgtacctgaggaacgatttgcatctattggagttacgtttcatcaaatcgatttttcatcaacgtctccgataagcaaagaaagcttaacagcatataaacagtataaagaattactaaataaatatcaattcgattttgtccatgtccacactcctattccgggagcaattgtcagaatggccacgagccccaaaagaaaaagaggatgcgtagtggcttatactacacacggtttgacgttcccaaagggatcttctctaaaaacaaaaatcgtctatgggggtgtagagtggctttgctcatggatgacggatggcattataacaatcaatcgagaagattatgcacaaatgaaaaagatgggatgtaaaaacgtctatcatattaatggagttggcgtagatacatcaagatatcatgagtgtcaaattgatcgagaaatctatagaaaatcattgggactttcagaaaatgaaattgcgattctggaagtcggagaattatctactcgaaaaaaccataaggtcattattgatgcattagaaaagcttgcggatcaaagatatgtctttttaatttgtggcaaggctatgagcaatttgggaacctatgattttctgaaaaaatatgccgaagaaaaagaagtcagagtgatctttttgggcttcagaaaagatatcccagaaataaatcgttgtgcagatattgcagttctcccatcactgcgagagggacttggactggcgggaattgaggctctagcatctggagtacctgtagtaggcagtgatgttcagggtattaaggactatgttgtagatggtgagactggatacctctgtgcgcctacggatgcggatgcttttgcagagagaatcaaattgctaagtgatagagaagtcagatcttcgatgcagaaggcctgtgtggaaaaagcggaagagtttagaatggagatttcacaccagcaaatgacagctatctataaaaatttgctgagtggacaggagaaaagtaaatgataggcgtatgcattaaatactttcacgagaattatggtggaatgttgcaggcttttgcaacagtgaagatgcttgaatctcgtggaattgattatgaattgataagatataagaagaaacttaccattgcagaaaaagtaaaatccattccacgacttttaaatggaattcttctaaatgacaaatatgaagcctttttgaaaaggcaggggatgaaaaagcatccggaatttgcaaaaaatgatgcagttcggatgaaagcatttgaacagtttaagaataaagcctttacaaagttgtcacctgagttttgcggatataaggctttgtgtgaaggagcaagaaggtacgatgcagttgtgactggaagtgatcaactttggtcaccggcgggattgcctacgaatttctataatctgatgttcgttccagatgaaatcagaaaaatttcgtatgcttcaagttttggtgtcggtcagattccgtggtatcagaaaagaagaacagcaaatttcctgaagcggttggattacattagtatgagagaaaaccgaggcagtgaaattgtaaaagaactgacaggattggatgttcccgtaattctggaccctgtttttaactttaataaagaacagtgggaaaaattgatcccggtcaaagaggaaatgagtgaaccgtacatttttgcatatttcttgggggcaaatccaggatatagaaatcaggttcagaaattggcgaaatcaacaggccttaaaattgtagctttgcgccacatggatcaatatgttgaaaacgatgagacatttggagattatgcgccttacgatgtggctccgaaccggttcttaaatttcatacgaggagcagagtatgtatgcacagactcttttcatggaacgtgtttctcaatcatcaacgagaaaaagttcatgatttttaatcggtatgcaaatacaagtgcaacatcgaaaaattccagaatcgattctctctgtcagaacctcggtgtcagtgatagaagatatttaggtgatattttagaaatccagaaggatataaactacgcagaagtgaattgtaaattgaagttgctacaaaaaacgacgaatcaatatattgatacagcattccaaggcgatatataggaggaagcatagcaggatgatagagataaaggaaaaaagtaagtgctgtgggtgtactgcctgccaaagtgcgtgccctaaaatgtgtatagagatgatcccagatgaagagggatttctatatcccaaagttgaccaaagaaaatgtgtaaactgtggagcatgtgagagggtatgcccgtttattaccggattcaaaaaaaatcctgctatagagagcttggttgtgcgaaattcggaggatcaaattctggataatagcacatctggcggagctttttctgcacttgcgatgtatgcattagagcaaaatggtgtggcatatggctgtgtttgtgataataagatgcagattgttcatgcttgtacagatgacacaggtgttgagttatctgcatttagagggtctaagtatgtccaaagtgaaattcaaggaatcttccatagagttgagaaaaatttaaaagagggacgatttgttactttttctggaacttcttgccaaattgcaggcttaaataattatttgaaaaaaaactatgaaaatcttcttactgtagaagtgatttgtcatggtacgccatctccatatttatggaaattgtatgtggaatggatgaaagcaaaatataaatccaaaccggttcaatttagcttcagaaagaaaacatatggttaccatagcggaacaatggaagtactctttgaggacggtcagaaatatacgggaagtgccagagttgacttgatgcttaagagtttcttttcggaaatatcttctagacagtcttgctatgagtgtccatgtaagggcttagagagaccggcagatatttccatatatgactgctggaacgcagataaattgattgagggactggaagatgatgaccgcggatatacgaatgtaatggtcaataccgatagaggaagaaaagcaatagactattgtaaaaaaagaaaattgctttggatgcaatctgttagcacagaaaaggcaatcggatatgacggtattatggtttgtaattatccacataagcataaaaatagagaacagttttataaaacagtaaaagatgaaggtatatacaaggcagtacaacggtatattccaatatcgagaaaagactatatgattgaaaatagcaagcagctaatttatcgagcaggattgattgaaattgctcgcaaagtgaaagggcggtgtaaataaagtgaacattttaataaattatccgaagtctggtgaaagtgggccggcatttgtacttgaattagcaaaagggttaaaaaaaaatggacaaaatatttatgcagtgcttcccagaagaattcctaacgccaatgagtggtcacaggaatttacagaagaaaatatttattggctaaaaagcccagaaagtcggaataaaattgacaaactaattaagttgatttttgttgatttgattgctataaaattgaaattttggcataagattgatgtctcaataaaaccattttatagtacgcttgggcctgttttagacaaggctattaatagcaggttaaaagcagccgtttgtcatgatccaattctgcatagtggtgcaaacattagtaaagagagttatagaaagttttatcgagaaaatgatgatatatttgtgttaacaaagagttttatacctgtagttcaaagagagtttgattttcctgaagatagaatccattatttcccgcatggaaggatgaatatgtaccaaattacaaaagaatattctagaattcaatccgagtataagaaaaaatatcatcttctcttctttggaagaatagaaaagtataaaggattgcatattctttcggatgcttataatcgagttgttagtcaaaattcagatatagaactcactatcttgggttctggaaaatttgacgagtataaggatgaatattcacacttacctaatgttcatgtgattaatcgttatataaaagatgatgaagttggcaactattttgccttgccaaatacaattgtagtggttccatatgttgatgcaactcaatctggtgtgattcctatcgcatttgagtttggaacgcctgttgtagcttcaaatcagggaggacttagagaacaactggatgatggacggttagggcttttatacgataacaatgatcctaaagagctagctaataagatattagaattgatggacgatgaggagtgttaccaaaaggaatgcgagaaaatgcttcaatatagtagcaatctaggatgggataatgtagcgaaacagttgttggataatttgaagttaagtaaggagaaaaaatgaaaaaagtactgtggataacgccttctattcttccaagctcaggtggacaagcaatgcactcattgggatatattcgtgcactctcaaaaggctgtgaactaaaggtggttgcacgagcaacatcgcttgaactaaagttggctgaatctgacaatagtgtatttcatggattagatgttacattggtcaatgcgtataaacataagagtaaatttaataaagttagacagcctataagcaagtggatttcacataattctggagtgatggttccgtatacaaatatagtaaatacgataaaaagcatagtgaagaacttcgaacctgatatcgtagtaatcgattacatcggtatgtacaactactatacgttaatgaaaaaaatatgtccacgtgcgcaatttatatacatctcgcacaatgtggaatttaaaaattttatagatattaaagcaaacaaagcaaaaaagtcagtcgcatcaaattattggatagaaagaagaaagaaatatgaagaaaaaatgatttgcgaaagcgacgcaagtttatgtatttcaaattcggatatcgatatattcaaatcggaatttcctaatacaaaaaatcttgtgtttgcaaagccgttaataagatttaacaaaattaaagccaagaacgacttgaaaaaattcgataagaagcttttgatcgttggtagcatggactggtatcctaatattaatggaatagagtggtttgtcgagaatgtgtttattcctttagttaaacgtgatccagcatataagctctatttagtcgggagaaagccggattatcgtataaaacaattaggtgagaaatgtaaaaatataatagtgacaggcagtgttgattctgttgatccatactataaagaatgtgatgtcagcattattccggtttttgagggaacaggtgctaaaattaaagtattggagtcgttaggcaaggggattcctacagtatgttccgactttgctgcaaaagattattcgttgaataatagagagatgttggttgctcctcaaaatgcggaggcatttgaacaagcgattaatgaattagaatatagcttagaaaccagaatgagtatttacgataagatggaacgatatatggatacttactacgatatcaatccggaaattgtaaagctatttgagtgaattttatgagggaaaaatatgaatgtaaaaaaagaatacgagcgttggctggaaaatgcaacagaagatgctgatgttgccgttgaactggaaacgctgaatgataccaaaattgaggatgccttttatcgtgaccttacgtttggaaccggtggtctgcgcggtgtaaccggcgcaggtaccaaccgcatgaacatttacactgtggcaaaggcatctcaagggttggctgactatctgaagaaaaattttgcagagccttctgtggcaattggctatgacagccgcatcaagagcgatgtgttcgctaaggtagctgctggtgtttttgcggcaaatggtgtcaaagtcaatatctggtctgttctgatgccggtgccgacggtttcctttgcaacccgctatctgcacacttcggccggcgtgatgatcaccgcttcccacaatccgagcaaatacaatggctataaggtttacggtgcagatggctgccagatcactaccgaagctgctgctgaaattctggctgaaattgaaaaactggatatttttgctgatgtaaagcacagcgattttgaaactggtctcgcaaatggaagcgttcagtatattccggatgatgtctatactgcatttgtgaatgaggtcaagaatcagtccgttctgtttggtgaagaggtcaataaggatgtggcaattgtttacagtccgctgaacggtaccggtctgaagcctgtgacccgtactttgaaagagatgggctacaccaatatcacagtggtcaaggaacaagagcaggcggacggtaagttcccgacctgcccttacccgaatccggagattaaggaagctatggcactgggcatggaatatgccaagaagtgtaatgcagaccttctgctggccactgatccggactgcgatcgcgtgggtattgcggtcaagaacaaagcagaagagtacgaactgctgaccggcaaccagacgggtatgttgctgctggattacatttgcagtcagcgtcagaagcatggcaagatgcccgctgaccctgtcatggtcaagaccattgtgacgatggatatgggcgagcagattgcttctcactatggcatgcgtactattaatgtgctgaccggtttcaagtttatcggtgagcagatcggcaagctggaaaagcagggcaaagcagatagctatgtgtttggctttgaggaaagctacggctatctgacaggggcctatgtccgcgataaggacggtgtggatggtgcgtacatgatctgcgagatgttcagctactatgctaccaagggtatcagcctgctggacaagctggatgagttgtacaaaacctatggctactgcctgaacaccctgcatagctacgagtttgacggcagtgccggatttgcaaagatgcagagcattatgcaggcgttccgtggaaatatcaaagagtttggtggtaagaaggttgtaaagttgctggattatgcgcctggcttggatggactgccaaagtccgatgtgttgaaatttttactggaagataactgttctatcgtgatacgtccttccggcacagagccgaaactcaaaacttatatctctgtcagcgcagagaacaaggacacggcagaaaaagttgaaacagatatttgcaagagtgcggaagcgtacttgaaataatagatgatgggagaaatacaatgaatattattttgctttccggtggctcaggcaaacgtctctggccgctttctaatgatgttcgtagcaagcagtttattaaactgttcaaagatggcgataagtatgaatctatggtgcagcgagtctatcgtcagattactaccgtagatgcagatgcaaaaattacgattgcaacgagcaaatcgcaggcaagtgccattaaaaatcagcttggcgaaaaggcttctatttgcgtggaaccctgccgtcgtgatacgttccctgcaatcgcattggcagcagcgtatctccacgatgaattgggcgttggagaagatgaagcggtcgtggtttgcccggtcgatccgtatgtggataacacctattacgaggctgtcaaaatgttgcaggagctggctgaacagggcaatgcgaatctgacgttgatgggcattgaaccgacctatccgagcgagaaatatggctatattatctctgaaagcggcgaaaatgtcagtaaggtcaaggaattcaaggaaaaaccggatgtcgaaactgctaagaagtatctggctcagagcgcgctgtggaatgcgggtatctttgcgttcaagctggaatatctgctggataaggctcacagtatgatcgatttcgaggattatcgtgaccttttcaataaatatgacacactgaccaaaattagttttgactacgctgtggtcgaaaaagaatccagcattcaggttctgcgctatagcggtgactggaaggatgtcggcacttggaacatgatggctgaggtcatggcagacaagactaagggcaaagttattctggatgagacctgtgaaaacaccaatgtggtcaatgaactgaacattcctattctctgcatgggttgcaaagatatgattattgctgcaagtggtgatggtattctgatttcagacaaagagcgtagcggttatatgaagccatatgttgaaaaaattgaaaccgaggtaatgtatgccgagaaatcttggggtacctatacggtcattgatgtgcagccgggttctatgacagtcaaaatctccatgaaggctggagagaaaatgagctaccatatgcataatgagcgcgaggaagtctggacggtggtttccggtaagggaaaggcaattgtcgatggcatggaacaggttctccgtacaggtgatgtgattactattgcagctggctgtaagcatactgtcgaagcgattacttcgttggatatgattgaagtccagttgggtgatgaaatcagtgtcagcgataaaatcaagtttgaacttgattgagggacggtgcgatggaaatcatgaaactggtgccaaccggaaaggattatctttggggcggtacaaggttgagagaagaatatggcaaaaaaattgatttaattccgttggcagagacatgggaatgctctgttcatcctgatggaccgagctacattgcgaacggtgagtttaagggattggcattagcagatgtattaaaacagcatccagaatatattggaacaaaagtggaagatggaaaactgccggtgctggtgaagtttattgacgcaaaaaaagacttgtctgtacaggttcatccgagtgatgagtatgcaagagagcatgagggtgacaatggcaaaacagagatgtggtatgtcattgatgctgaagaaagtgcgcacctgatttatggtttccagcatgaggtgacggaagaaattctgtgcaaggcagtggaaaccggtacgctggacaaacatttacagaaagtagaagtccacaaaggtgatacatattttgtgcgtgctggcacggtgcatggaattggaaaagggattctggttgccgagattcaggaaagctccaatgtgacttatcgggtctatgactataaccgtgtggacaaaaatggcaaaaagcgtgaactgcactttgacaaggcagttcaggttatggatatgagcgttgcaccggatgtaagtcagaaaccccggatggtaaaacattatccaggatgctcccgtgaaattctctgtcgttgcaagtactttgagacagagaaaattcgagttacaaagggctttgcgttttcggtaatggatacctcatttcaggtgctgatgtgtctagatggctatggagaagtccaaacgatggatgctgatcagaagccgatgcgcttcagcaagggtgaaacgctgtttttgcctgcagggcttggacgatgtcttataattggagaaacagaactcctaaaaatacgttgctagtttggagggaaggtgcacgagtgaaagtatctgtcaataaattgattgtttttatgtttgcggcaataatgctactaccagattatttttcaagttcattactgaatgcacttgaaaatgttctgcttataggaacaggctgtattttgctaaaatatagatatagaccatcaaaatggatgtgcatggcgtttgcgtattgtatcctcctggtgtgttcttcttattataatttcacagacaaggcaaattatcactttgtgatttctaatttgaaaataataatacttttgtgtgcagtagaatgggagacaaagaaatatgggaagagtgctttaaaaagcatatggggatttttgttgattatattaagcgcaaatacggcatcgattgtgctgtttcccaatggcctttatcaaatagattatgtgtggaatgaatggggagcaaaagatgtcatgagacagtggatacttggcaataagaatagccagactgtttggtatttgctcttattgattattacatatatgctgttttctgatgctcataaaagtagaggtaagttaaagaacaaagttatactgttgtatacaataaccgtttctttcatcacgatgttactggttgcttctagtactggaattgttgcagttgcagtgctggctgtcggtattgcactgtctttctttgaaaaaacgatatttgattttgaatggaatccaaaatggattttagttggatacatggtaattagtgtggtgataatcggcggaaatgcaacattcctaaaaccgcttgtagcagatctgtttgggaaggacctgacgtttagtaaccgaacgacagtgtggttaagatctctggtactttttatccaaaaacctatatttggatggggtgtgcttggcgatgacggtatgcggaatgcattaggaagtttgtcatatacaagtgcacataatcaattcttaaacacaatgcttcagggcggattaattctatttttgatattgattgcgatgatttacattgtttttgataaattatctaaatgtgaagataagaaggacaaactagtgggcagtatgggaatgatcggtgttctagtaacgatgctttttgaaactgtcttaggtggaacacagtgctgggttcttctttattgcgtttattgcttggcagatatgagtattgctaaagtagaagcaagaaattctaattaagaacgaaaggcagaatgatgggaaaaggatataagcgtttagctcaaacgatcataatatcgggattgagcgtggtaataggctatttaattaatttttttataacgccgtatattacagacaatattggaattgatgcatatggctttgtatctattgcaaatacaacagtcacatacgcaacgattattacaacggcattaacggcatttattgtgagatatatatctattgcatatcatgaaggaagaaaaaacgatgctaataaatacttttcttcatcattgatggcttgtgttatcctttcggtttctatttttgctgtaatggcactcgtcacgctgaagctggaactgtttttgaatataccggatcgattggttcattcggtcaaagttctatttatactggtgtacattaattttatcattacaacggtgaccacaccatatggcgcagcggcatacataaagaatcgtttggacataacaggaatggcaaaggttattggccatttgtgtgatgctggtgtattattaatattattttcactgtttaaaccagaagtttggtttgtgacaataggcaaaataacgaccgctgttgtcttgcttttaattagtaagattgtaacggttaagcttacaccggaattaaaatttaaaaaggaagatgtttcgttttctattattaaggaaatgatgggaaatggcatttggaattcacttaatacattaggaaatacacttaacagtggattggacttaattatagctaatctgatgctgtctggagtagctactggacaaatttctgttgcgaagacaatagaatctatgtttactatgctataccaagtggtgtttcagccgtttcaaccaagactgttaaaagcatatgcgtctggaaataaagaagtattgagaaaagagcttcaaaattcaatgaaaatatgcggacttttttctaatattgcttttgcaggtttcttttcacttggagcattatattttaaactttggttgccgtcacaggattatgtgcttcttaatagcttgacattagccacagtagcggggtctattacagccggtgtaattcagccggtgtattatgtgaatacactcactgtaaaaacaaagattccttgctttttgacaattgcgagcggtttgttgaacattgggtctatgtatttgctgcttaagtatacgaatttgggtgcatatgcagttgttctgactactgtagtaatcatgactgctattaatttgacgtttaacccgatttactctgcaaagtgtttgaatgaaagcccggtcattttctatagtgttattattagacatttgatttcggcggctgtaatgtctggtgctttcttggcaattgaacatttgttacagccgacaacatggatggggctgattggaaacgtagctgtgatggttccatttggcgttataatccatgttatcattatgtatccaaaagaaaaaattaaacaattagtaaagagaaagtcaaaatgacatttacttaagccgagaaacctcgctaagagtgtgacagtggaataaaagatagcaagaggaagaagttatgaaaacaacattacttatcatggcagccggtataggcagccgatttggaacaggaatcaagcagctggagccggtggatgatgctggacatatcatcatggactattcaatccatgatgcgattgaggcaggcttcaaccatgtagtatttatcatccgcaaggatatcgagaaggagtttaaagaggtcatcggtgatcggatcgcctctatctgctccgctcataatgtaacggtagactatgcgttccaggatattaagaatatccccggcattctgccggaaggccggacaaagccgtggggaaccggtcaggccgtgcttgccgctaagaaggtcatcaagactccgtttattgtgatcaatgcagacgattattatggcaaggaaggctttaaggcggttcatgagtatctggtgaatggcagaaagtcctgtatggcaggttttgtgctgaagaatacgctgtccgataatggtggcgtgacccgtggtatctgcaagatggatgagcagaacaacctgaccgaggttgtggagactaagaacatcgtaaaaacagtggatggggcagaagcagacggaaaagtgattgatgttgattctctggtttctatgaatatgtggggtctgacaccggcattcttagaggtgttggaagaaggcttcaaagaattcttcgagaaggaagtaccgggtaatccgctaaaggcagagtatctgattcctatcttcatcggtgaattgctggagcagggtaagatgtccgtgaaggttctgaaaaccaacgatacctggtatggcatgacctatcacgaggatgtcgcagcagtaaaggacagctttaagaagatgctggagaacggtgtatacaaggtcgacctgttcagtgatctgtaaacagcgatgaaagaaacgattgatttactcgggaagattatcacaaacatcctgactgcgttgtatgaaccgtttggattctcgattcttctgatgtagcacaaccggaagttccatgtggaagcattattggagtggatgattttgc

SEQ ID NO: 407 - DNA, 14200 bp, unidentified
  source 1..14200: mol_type = unassigned DNA
taccgtctggaaagcgcatccaaggcagtggtaacgacagcttcagcactgtttttggcactgatcatttccgtctggaccaactgcaaccagtaccgcaagaatcggcttttgaaggatgccgatttgaaataccgagccatcaggatctgtctgccgggggatgatccagacatcgccttccttgagaagcattttaccatcgagcgagacgaggaaaagatccggcgtgtggaaaagctggtgaccgcttttgaggactcggtcaggaatcgcatccgtaatcatgaaatggcggcctacaaggacagtctggcgcaccggctgttcagggaggcacaggaaatcagaaaacaactggacaatccaaatttaaaatgactgtacaatggcaacaatcagaaccaaattcagaccctcttccgtggaaggcagggaagggacgctttatttccagattattcatggaagggtggcacgtcagatcaacaccggttacaagattttcccgtcggaatgggacgaacatgcatcggaaatcatactgtcggtatccgatgatgccagaagaagccttctgcttgcgttaaaggagcggatgaaaaaagacattcgccgtctggaaagtatcatcgccggactggaacggtccggtggtacctatcctgccgacagggttgtggaattttttcacaacccgcctcctgctgacagctataatttcatggccttcggaaagaggctagtagaggaactggagcgtgtcggcaagaagcgcaccgctgaaaggtataccaccgtactgaacagcttcacgcgcttttgggggagggacggcgacatcccgctggaggatatcggttctaccctcatgctggaatacgaggcatggctgaaggataagggaatatgtccgaacagcacctcctattatatgcggaacctgcgtgccgtctacaaccgtgcggtggacaaggaactgacgatacagcgcagccctttcaaacatgtctacaccgggatagacaagaccgtaaaacgtgctgttccgttgaaagtgatccgcatgatacgcgatctggaccttcgcatttccccgggcatggaatacgccagggacatgttcatgctgagcttttatacccgtggcatgtcgttcgttgacattgcctacctgaaaaaagctgatctgaagagcggtgtgctaacctaccgcaggcagaaaaccggacggcgtctgtccattaaatgggagaaacccatgcaggagatattggacaggtatggccacaatgacagcccctacctttttccggtcatcaaagatacggctaaggatgtcgtgcggcagtacaggagcacagcgcatttcatcaacgggaaactcaaagaacttgggaaacggctcgggctcggcatgccgctcacgatgtatgtagcgcgccatgcctgggcgagtattgccagaagcaaaaatgtcccgctggcaaccatcagcgaggcgatgggacatgattcggagaacacgaccaaaatctacctcgcctcactggatacctcacaggtagacaaagcaaatgacatcatacttaaatctttataacgggaacaaatgcgacacgcagaatactgaataaaaggctataccgatcctgcttctctttttaagagaaatattagacattgcaaagataggtaaaatataggaaaatatccacctgtatgataaaaaacagttttcttcgaaagaaaatgtttcaaattccggtttaattgtcaaacaaatccttgtcaggttccatatatagcatctgattatcagaactatccctttccggtatttctcttaaaaagaaaagtaccggaaaagatctatgaatacagtggcagaatactgttggaaatgttcttattgacaatttaaaaccagatgcgtttgaaaggtttttgaaagcattttgtaatataataaaaattgttgagcatacggctcattttcttggcaagagaaatattacaatgtgcaaagttatgtaaaatattgaagaaacgatagaaaacaggtgataaaatataaccaaaacattcatacagagtgtatttgcttaacatatattggataaacgccacaatgccacttcgcttttctatttgtttatcaattaattacataaaatatggtcctctaatatttctcttgccaagagaagtagtgacggaagccccggaaatgaggtctgtacactttgtcaaaagtatggaactaacaatggatattatgggaaaagggaacgtaatccattgtaatacatgccaatatgtaggttggcatgaactaggtttatatccacacctataaaatgtttcggaatatgagtacgagtctttttacagcggaggaaaaaaggcaggtccgatggttcgtcatgcgcgcctacaagaatgagaaaatggcagaggacaggctgaaagacaaggaatatggtttggaatattttatcccgaaacattatgccgtaagaacttatcatggagtgaagtcaaaaaagttggtgccggttataccgagtctgcttttcgtccacgccagccattcgcagatcacagaattcaagaaacgatacaatttcttgcaattcgccatgtgggaaaagagcacgggggcggaatatattaccgtaccggatgaccagatggacagcttcatcaagatagcttctcattatgaggaggacactgtttattataggcccgaagagatagacttgaaaagaggaatgcgtgtatgtatccacggtggcaagttcgataacgtgaagggcatgtttgtgcgggtgcagggcaagagaaaccgtagggtggttgtcctattggagggtgtcatggccgtttccgctgaggtgcaccccgatctgattgaagttctttcctaaaaccgctggcttttacgggacttcgcaaaaatcacgataaaaattaattgaaatcacaaattagaaataatataaactgtacagatataaatatgaagaatcgatttttgatttatctctttgcgatagtgttgtttacatcctgtcacacttcgaaggagattctttactttcaagacattgctgtgaatcagcctgaagcgattgtgggtgcaagagacatcaccgtgcagcccaaggaccaaatttccatcatggtatccagtaaagacccgcagttggcagcgttgttcaacctgacacgtgtccagtatcgggcaggaactgccgatttacgtagtagcaacaataatggtgaaatatccggttacacgctcgatgacaagggaaacatagactttccggtcattggtacgcttcatattgccggtatgaccaaaagccagattgccgcccttatcaagaaacggctgatggaagaggacttggtgaaagatccggtagtgaccgtagagttcatgaatctctatttctccgtgttaggtgaggtaaaaacccccggcaagtacaacataaccaaagaccagatcactttgcttgaagccatcagcatggcgggcgacttgaccattaccggtaaacgtgatgctatctttgtcatccgcgaggaaaacggtgagcgtgtcacccactgggtagatcttcgtagtaaggacatttttaaatctccggtctactatttgaagcaaaacgatgtgatttatgtgcagcccaataagatgcgtgccggtcagagcaccatcaacgagaataacgtgaagtccgtatcgctatggatcagcgtcgcttcattcctcacttcgttgggtgtgctaatattcaagtaaccatcagaaaaggaatcactttatatttttataatatgacagaaaagaaaacaaccgccagcaagcctgctgacgacttcatacgcatacaagacctgtgggggattttcatgccccggtggcactggtttgccctctccctgttcgtaaccctggcgacagccgccttgtacctgctgggcaccccgaacatttacacccgtaccgctgccattttggtgaaagatgattccaagggaggaacatccaccaatgcggtcagtgaattttctgacttgggtattttcaagtcgaataccaatatcaacaatgagttgctcaccctgaaatcgcccacgctgatgaccgaggtggtacagcggttgggattaaacgagacctatactgtccgcaaaggactgaaagatgtggaattatacaaaagttcgcctttagcagtcacctatcgccacttggatgaaactcctgtcggttttacaatagatatttcatccaaagaaacgtttgtcatatccgacatggaagtaaacgggaaagcgtttggggaagatttctccggaaagatgggcgattccatccgtactgaaataggcacacttgtcatcaatttcacaaaatattggaacgattcattcgtgggcacttccatacgttatagaaaaggtaatgtgtgtgccgtcaccgattattatacagccgctttgcatgcggaattgggaaacgaggatgccaccattatcaatctgagtatcaacgatgcctccattcagaaggctgaagacattctgaacaccctgattgaaatgtacaacgagaaatggattcaggacaagaaccagatcgccgtcagtacttcgcagttcatcggtgaccgtctgagcgtgatcgaaaacgagctgggcaatgtagatgagaacatcgccggttacaagagtgagcacctgctgccggatgtgcaggcggcatccagcctctacctgtcccagtccgccgagaacaagaaggagttgctggcactcaacagccagctttccaccgcacagtatatccggaaagagttgaacaacaagaaactcagccagctgttacccaccaactccggtatcgctaatgtcaatatcgagagccagatcggtgaatataacacgatcgtgctcgaacgtaaccgcctgatcgccaacagtagcgagaagaaccctctggcaaaagacatggctaactcactgcaaagcatgcagcgtaccatcattcagtcggtggacaacctgattgtttcgctcaatacccaaatacgcaacatccgccaacaggaagccacgaccaccagccaactggcttccaacccgaaccaggcgaaatatctgctttctgtggaacgccagcagaaggtgaaggaggaactgtatctttatctgctccagaaacgtgaggagaacgagctttcacaggctttcaccgcctacaatacacgtgtgattaccgctccgagaggcagcatgcttcccacagccccccgaaagatgaatatccttttggtggcattcgccatcggtctgcttgttccggcggtgattattttcatgaaggaaaacatgaataccaaggtgcgcgggcgaaaggatctggaaaacctaagcattccgttcatcggtgagatcccccaatatctcagtgctaagaagaaattgggattcgataaacacacacagtctgtcatgaaagccatcgtggtgaaggaaggcaaccgtaacattatcaatgaagcgttccgcgtgttacgttccaatattgactttatggcaggcaaggacagcggtcagaacgtgttcatgcttacctcgtttaatcctggcagcggcaagtcgttccttgccatgaacattgccatgagctttgccatcaagaaaaagagaatattggtgatagacggtgacctgcgtcacggctccacctcctcctacgtggattccccgaagactggtttaagtgattatctgggcaaccgtgtcagtgactggaaggagattatcgtgaaggatgaaaaatacgacaacctgcatatcattcctatcggtactgttcccccaaacccgacggaactgttggaggacggcaagctggccactttgatagaggtgcttcgcagcgagtatgactatatctttattgactgtccgcctatcgatatcgtggccgatgcgcagatcatcgagaaactggctgaccgcaccgtctttgtagtccgcagcggtttattggaccgtagcatgctgcccgaactagaaaatatttaccaggagaaacgtttcaagaacctcagcgtgatactgaacggtacagaaagtgccggaggccgctatggctatagatatggctatcgcaacggctactcctcctactatggaaataaaggaaaaatgggggggtaaatgggtggtcatcaagtgattgattttgcatgttatcgttctcgtaagaacttttaattttaactcaactatcatgtggccctttcgtaagacaataaccttcgcccggagcggtatcctgaaaggaatgaccgactgtcacagccatctccttccgggagtggatgacggagtgggaacattggatgaatcactccgaattctagatatgatggaaaagcatggagtcagaaaggtatggctcacgccgcacatcatggaggacatccctaatgaaactgtgatcttgcaggaaaagttccaagaattgaaacggagttataacggcacactggaacttgccttggctgcggaatacatgatggacaatctctttgaggaacggttggaaaaagatgacctgctgcccctagaggaggggaaacgttacctgttggtggaaacctcctatttcaatccaccaatggaactgctctctgtcctgcaacgcatccaaaagaaaggttattacccgttgcttgcacattcggaacggtatgaatatatgcagaagagggattatcaggccttgaaggacgagcatgtctccttccaactcaatttgccctcgttggccggaatgtacggaaaacatgtacaggaaaaggccgaagccctgctgaaagccggaatgtacgaccgtaccggttgtgacatccatgccataggctgttacaagacattggtcgcttcggcagtaaaatcggaagtcattggaaccttacagaaacaaagtgatcaatgattgcaaattttgcattgacgagccttgtaatccgaaaggatgaccgctggaacaggaacgtactgcgcatcttgaaacaaggtgaacaatatcagttcaatggctatggtgatgagtgcaggtcgcttgaaaggaatttctttgctgcgggagtgacaataagtgccattgtcggcaagaatggaagtggcggaagaaattatctggaaacgtaaggcacgggataagagctatatgaagatgatggaaaatcaatacgatgggatgaccataactccttcccttcagagacgtatcatttttggttttctggagaatgaaacggacattcatctacgtccgttgactaaattgcaacaagacttgtacaatcaacaggatttggtgtaatctttaatcttagaataaaagacactgatatttttatatccaatgttgttatgcatggtttcactacggctcatgccataacagctatggctttggtccagacagtggtcggatacgaagctgcattaacaacattgacgataatcacgattgttcctctatcaaagattctgttgtccttcgtgtgaggaatggaatttcttcgtcatgccccacaagtatgtcttaggtgaaatagaatagatgcgatcaggaaacctcttgattattagtcaaatgtatagtgctttgtgcttacgataaattataaacaatatacttttatgaatgttcatcttataagggaaaacgaaaatcaaaatgatggttcttatatccacttgtatcggaataaacagatcggtgcatggtgtgcatacggttattccgcatacggtttacgtctttttgataaacaacaaggctacatgaattttcgtagttactcagactgtcttcagatgccgtgtacggttacatccggagaatcccttgtttcattgttgcaaggttctgttgaggtaggttcacaaactgagacctatataaagttaaaaatggcagatacaataaattttaatgcttatcagaagtggttgcataagctgaaaaaggacgacccgaatgatgatgcaataattgtcaccacacatgtcagccaatatgtgccacgggacagttttattcccgatggaatgtctgcatttgcgcgcaatgtaaagcgtattggtgattttatcctgtcattggttgcattgatcattttttctccgttattcctgttttgctatattgccattcgcagggaagatggaggaagtgtcattttcaagcaagaacgtatcggcagattcgggcgcccgttctacatatacaaattccgctccatgcgtctggatgccgagaagttcggaccgcagcttagtcataccgggggtgaaaatgattcccgattgactaagatcggtcgtttcatccgggcgcaccatttggatgaattaccccaactctacaatgttctgcgtggcgatatggcattcatcggtccacgtccggagcgtaagttttatatcgaccagatacttgaacacgacaagcgatatacttatctttaccaaatccgtccgggcgtaacatcatatgccacactatataacggctatacggatacgatggagaagatgctccgacgtttggaatatgacctttattatttagggcatcgctcatggtggttcgactttaaaattctgttgaacacattctgttcaattgtactcggaaagaaattttaaaagattaataacttatataacagattgataatgaaagcttgttttatgggcttggggtatatcggattgcccacagccgttatcgccgccaagcacggcattcagattacaggagttgatattaacccccaggtagtggatatgacgaatgcaggacatctgcatatcattgagccgggtatggaggagatgttgcaggaggtggtgaatgccggctcgttgaaagcttccataaagccggaggtgagcgatgcttattttatggtagttcccaccccgttcaaaggaaatcatgaaccggacgttagttatgtggaagccgctacacgtgccgtattgccattattaaaggaaggcgacctttatgtcatcgagtccacttcacccgtaggcaccaccgaagcgatggcccgcctcattttcagtgaacgtcctgaattggaagataggatttatgtggcttattgtcccgaacgtgtattgccgggcaatgtgatttacgaactgatacataacgaccgggtcataggcggtttaaatcctgaatctaccgataaggccattggattttattctcaattcgtgcagggaacacttcatagaaccaactgtcgtactgctgaaatgtgcaaactgacggagaattccagtcgggatgtacaaatagcctttgcgaatgaactttccttgatttgtgacaaggccggtatcaatgtgtgggaacttatcaatcttgccaacaaacatccgcgggttagcatcttgcagcctggttgtggcgtgggaggtcattgtatagctattgacccttattttatcactgctgattttccagcagagagtaaattgattgccgatgcccgtgaaattaacaactataagagtttttggtgcgcagaaaaagtgaaaaatgccatgctggaatttgaactgaaacatcatcggaaaccttgcgttgccatgatggggttggctttcaaaccgaatatcgacgatttgcgtgagagtcctgcaaaatatattaccacgaaagtgatgcagagttgcaataatgccaatatcctggttgtggaacccaatgtaaaggagcaccatgtgttcaagttaacagattacaaagaagcctacgacaaggcggacatcgtggtattccttacagcacacactccgttcaaagaattagaatggcgagaggataaggtgatattggacttttgtggaatattcaaaaaatagtgaatatatgaatattttagaactgacaggtatgaaatcgactaaatacggcggagtagaatcctacttcgctgaattggtcaagatatgccgtgttgataaatttatttttgtatacgagtcgatgccaatcagtgaaaactatgtaaatgacatcaataagtgggggggggtaatactttgtaaacaaagcatttccacatttcaatatttcaaatttgtgataggtgtcatcaaacgtgagaaaatagacattgttcattttcattttggaagttatcttattgcaccattcttgcgaattctgtttccccggattcggattatttcaacccgtcatagtgaaatctttgtttccaacaaacttaaaaaattatatctgaagttctgtttttttccttttgaaagattcctttgtgtcagttgtggcgtaaagaaagaaatgattgaaggcgtaggtttttcttcaaagagtgaagtcctatacttgggagtccggaaaaaaaagattgtcaacccaaatctgaaaaaaacattggacataccaaagggggtagtcgtgttgactacaatcggattcaatattcgtatcaagggattcgatatacttgtcaaaagtattcagagtctgatggactccaacagacttaaaaacgatataatagtgcttgtcatcggaattagcgaaaattctgaagacagtaatagcttgaggcaattgattgccgaggccggattgaatagaaagattatgtctttgggaatacgaaatgacattaatgatattttgaatatttctgatatttacttgcagccttcccgtacagaaggactttctcttagtattatggaggccctaaactattcgttgcctgttattggtacacgagttgggggcattcctgaaatcgtacatgagggagaaaacggatatctttttgaaaaagagaatgttgaagagcttgctgacaggattgagatacttgtcaataatcgtgaagtccgagaaatgatgggtagaaaatcaaaagtaatatccagtcggttcacgcttgcagacggtgtggaaaagttagcttcgatataccatcagaccaattgatttgccgctgacactctattgtcattcaggttgcaattgagattaaaaaatgtaggatagttataaatgcagtcatcaaacaaacgcatagcacgcaacacgttaatgctttatatacggacattcgtaatgatgcccgtatctctatatacttccaggattatattggaagtgttgggagagaacgattttggagtatacaatgttgttggcggctttatcgcacttctgtcttttattaattccgcaatgacaaaggccacccaacgttttctgaacgtggaattgggaaaaggcaatcatgacagagtctcgagggtttattccatgagtcttctgatacattttgcaatagcggtatttatcggcttcgtattggaaacagtggggctctacttctttgaaacaaaattgaatattcctctggaaacacaagatgcagcacggattgtgtaccatatttctgtagtgaccgcttgtcttcattttatcaggattcctgatgagtcgagcattattgcatatgagaggatgtcttttttcgcttatgtcagcatcattgaggtaatggcaaaattgggaacagtatttctccttttttgggctgaagacaatcgtctggtgttgtacgccgttgcccttatgaccgttgggatattgttgaatatcatttatgccatttattgcaagcgtaatttcacgacttgcagattccggttctattttgacataaagctgctgaaagaaatgcttttcttttcttcatggagccttttcggcggtatagcccatgtcgcatccatacaaggcatatcaatacttttgaatatttttttcacggttgctgtcaatgcggcaatgggggtagcctcgcaagtgttcagtgctgtcaatactttggttacaaactttcagaaagcggtgcagccacagattgtccagtcctatttttcaggggataaatccagatttctggaacttgttttccgctcgtcaaaattgtcgtatttcctgctctttttcgtcgcttatccgttgattttgatttgtcggcctgtcgtcgagttatggcttgtctgtgtccctcaatatacagtacagttcattcagctttatctcatcttcctgcttattgatgcattatccggaagtctttgggtgtcatctgaaacaataggcaatatagccaagtatcagtttaccgtttcttcgatgataattatgaatattccgattatatatgtattgttcaagttcggttgcagtcccgtctatgcggtgattgtcagaattgccatcaatttcattactcactgttacagaatattctatctcaaacacaaagtgaatttcccggttaggaggtatgtcgtggaagtgatgtttaggtgtctttgggtgtcggtctgcatcattccggtcccattctttttgcataaatttctaacctcaagctggggtagccatatacttgtcgtattgaccagtcttatcatttccggacttgttatctataaattcggacttgatgctaaagaaagagggtttgtaatcagtacggtaacaaataaattcatgttcttaaaaaaacaataaaatgtagggaataaaggtggtggcaacagtatacaatacactccgttgcgatttgtatccttttaaacatcagcttgttacgggacttttgaaattccttaatttggtcaaattgcaatgtttgttaccagcggttcgtttcatgcgcttgttttttcgtatgccgttctttgctgtctatggagataaggacaactgcatgattacttttctcgataatatcggtttgcagaaacgtactatcagtgaaacagataaagaggaaaaatacaaagaagttctttgggcagattataagtgtgcggatgtatttcttgcagaagaaaggaagaggaacttaaacttttgaaataatggaaagggacattcgtatagacatacttaaaggcatcggcatactccttgtcgtttggggacatgccaccgcaatccttataaaggaaatttgtattttccatatgcctttgtttttctttttggccggtatgttttatcatcccaaacaaggatttattcaatcaagagcaaaacggttgcttattccctttggggaatattctctgatattcgctgtattttattttagcatggggttgcagggaataccgcttgataaactgagcatccatcatatcgccgcatttgatggtccgttgtggttcttggtcgctcttttttatatatgtgtcatgtattattttttggacaaaaccgttaagaaaaaaaacgttattcttatcgtttcttttgtaattgggctggctgtcgcatattccaagatcaatttgccgttttatatcgggcaggggctgttctctttgccattctatgctgtcggcaaatggatgaacgacaaagggctgacacaagcagagggggcaattaaaaaagcaaccgttattgctatagccggatatatcatagccatagcattctgccgtttggcacattatcaatttgatatttcgcaactgaaattttccagtttcccgtttatattctatgccggagctttctgcgccatatatcttttgttgaatttcaagcctttcaacaagataacaactccaaacagaatattggcttctttgggagctaattcactcacgataatggctatacacgctccttttctgtggttgttcagggattttatcagaacaaacagtagcttttatgacacaaaactgggggggggtaatttcaaacttaatcacttttgttatcttcataacattgagttatttaattgcccttggaatagaacaattaaaaaaactgacagctaaaaatcatggataatccgaaagtatcaatcattgtaccgatttatagagtagaggaatatattgagcggtgcgctgaatcgttgttcgcccaaacgtttgatgacattgaatacatctttgtggatgattgttctccagacaagtcggtggagatcttgcagagaactctggaaaaatatccgcatcgaaagaggctgacacgaattgagaggttgtcgtc

SEQ ID NO: 408 - DNA, 48459 bp, unidentified
  source 1..48459: mol_type = unassigned DNA
ttatctggaaataatcatctcccaccatttcctattatctaaataccaacggattgtctcctttatcccatcctcaaactttgtttccggcaaccagcctaattcattatgtatctttgttggatcaatagcataacgcaagtcatgacctttgcggtctgttacatgcgtgatcagactttccggcttgcctagttccttgcaaataagctttacaatgtcaatattcttcatttcattatgtccgccaacattataaacttctccaacgcgacccttatgaatgatcagatcaattgcccggcagtgatcctttacatacagccagtcacgtacattcacaccctccccataaacaggtaaaggcttgtctgataatgcattaataatcataaatggaatcagcttctccggaaattgatatggtccataattattcgaacaacggctgatcgtaacaggaagtccgtatgtcctataatatgcaagcactaacaaatcagcagatgcttttgaactgctgtacggcgaactcgtacgaatcggagtctcctctgtaaaaaataaatccggtctgttcaacggaagatctccatatacttcatctgtacttacctggtgataccttgcaataccatatttacggcaggcatccatcagcaccgccgttcctttgacattcgtatctaagaaaatctccggattctcgatggaacggtctacatgactttcggctgcgaagttcactaccatatccggatgttcttcttcaaatagcctatagactgcctctctgtcgcagatatcaatcttacaaaaacggaaatgcggattatccatcgccgaagctagtgtagataaatttcccgcatatgtaagcttgtccatacatacgatacgatcctccggataactgtccagcatataaaatataaaattgcttccaataaatccggctcctccggttacgataattgtcatggtgtttatctcttatctatcctatctatggtctcaaatctgcccatgttcgatgattttatattaatcctaatcatattccaagtcaacttatcgcataaaatcggagttaaattaccaaaagttacacctagccatgctgtttattacatcaaaggtttttttcaccctttttcttctatgcttttcctgtcgacaaaacaggcgccagctctttcctacccgtacggagcaggaatgtctcgctgaactccggaatcatccgcgaagttactttgcttatcagaacatgacataggaatggaagaaccactttcttggatttatggagggtacgaaaactctgcctttaacctatgatccgtttttcaagaagctgttcaatccggatatctatccggaacggttgtccagtctcatcagcagtatcatcggtacgaaagtgacggttcagtgcatcctgtcaaacgaagacagcatgctgccgtccacctcactcctgcttctggatatcctagtcgagctggaggatggtttgatcgcaaatgtggagatcctgaagattccattcacaggcttttcttccgttgtgttgtttacagacgtatctccattccggtcgggaaccggaatgctctccacatctgccgccgggaaatcgtatacaccggggtcagacagtatctgtctttgagctgaaactgtgataccgtcggatttggggctttatagcctatacgcatcttctcctctctaaatttgggtataaaaataccctgccggttttcaccagcagggctgacatcgagttgtttacttgtaaaggtcctccaaggtgatcagctgaacttcacctcgctcccgtgcttggagcagtccatccgtaaatccacctttagagaaaatatagtagtgataggtgtttccttttccgaaaactgatgcataatccctaatcagctcaagctcatccacaccaattttctcattcctatatttgcaggagccaataatatactcttttccttctacaggagttccaacgatgtcgatctgtatctgctttttcttcttggaatcagttccccaccactgaccaatttcatttagttcaatggggagcttgtcggcatagtacagcagatagtcctgacacatcttttcaaatatcaaacccatgtaatcggaaagatattgttttacggcgtgtggataggcctttacaattctgcctgaatcaattgcactcatattgaccgggacaaaacgataccagaaccggaagaagttatctgccagcaggtagattgttttcttaccaggtttttcactaattggagtctccttttttacaatgcctaggtcaatcaaggttttgagatatttcgatacaacagaattatcctccccgaccttcatcgtaatatcattcagtcgtgatgctccctcagcaattgccttaatgatggcattataaatggccggctctcgcagttcctgtttgagaagatttgccggctcctcatacagatagctggaacggtcaaacagattgtcgagcaatgcttcatctactctgtctcttacatccagcttgttaatataatgcggaacaccacctgtgataccgtaaatcagcgaattatcctcatccgacagattcggatggaacacagctgtttccttataatccaacggtgcaatcttaaattgagctgttcttctcccatacaatgggctttctttcccaagcacctgactttccataaagctcattctcacggcaataaaactgactcattcgcccacctccaatttattatactcgtgagttactaactcgtaagttactttcttacaagtataagaactaaatggatgatcgaagtcaagcgaaatggcgtgaccgccatggcttaaaggcttcacagtcaggaggctctcatgaataattattgtgcatttagcaacaatttatggatatatactgcatattttctccacgcattatcctttaagctgcaatgcattccaaatgtccacataaacatctcctgcaccagtaatcatcacaagctgtgttgcacatatatctaaaaaaacatccagtgtatcgcacacgcgaagcatcgtccatacttgctgcagactccgaaacagagaattaaaaaatacatctctggttgtatatttcataccatcaaacagcctcgccgctgccagctggatattcgctatccttttatttaatcgatccagatttttctcctttgtttgatcctttgcatgatatgtaacccgcagtacactctctaaaaaattctcagtcatcatgcgatctgtcaggaaatcgtactccggcatacagatactcatcgccatcaccggtttcctgccaggtatataatcctgtatatgatttcccaacttatcatatagcgcaatcagccccttctctttcaagcgtatcctatgccacaaaatctgctcctgtgcatacagcataccatcgccaagtacactcaatacacttacatcatctgctttctcgtagcttccgggaagcggacatttcttgatctcaacaaacatcacacgctcctttccttccaagatcatatcgcaatcacgttctgcaagatctccatccttataatattgccctgtgatatatgaaaaacgcttctcccgaaacatttgatagaccagctgctccagatactctccctgattcctgctaaacttcgttccatactttgcaaataagatctgaaacatcacttcataaaatccatatcccgccatcctgccatccagacagaaataagtatccgcatccagcctgacaagaggctttctccagctatttgtctcatccagataatacacaaaatcctgattcaccatatcagcatccaatgcagtatccagcaagatctgttctaatttgtaagtgctgattcccagacgttccgataattcctgtcttttaaatatccgggggccctttgctgcatccatcacatatatagcaaattccaaataattatgaaaagaatatactctcattttatctctgcctgtaccataaaatggttccagcatgttttgcaaaagaagccttacaaactccggatgatattgccttggaatacaaagtttttcaaaacatagatttttcgccagccgatatggaaaatcctccagatcaataaaaacatcttcccaggtcatatacccctgcagctgcagaacctccagataatcctgtgccatccgtatcagctcctgatatctgtgctctttatatgcatttgtgaatattgattctgtcttcagaaattttagcgacagctgaagtaaatattgatacggtattcttactttgatatggcgtttttctcccattgatatcttatttcgatagatcaggtatcttccaagcttctcatgatatcgtgcacaaatctccctgtcaaataactgacggatcacatacattccaccaagctcttttatccgtctttctaattccgcaaccaaacactgttcggaatcctgttcaaactccggctctccatttacgatctgaaatgaaaaacctgcattgatcagatttctcgttgattcgatcaatactgctgtctcttctgacattttcggtgcatagggcttaccggacttcttcgatgccccataaagatgtccgatggtctccatgacctgtggcaggttgcccatcttaaaatggttccatttggcagatacgcaagcacatgccccagaatatccagttcaagctgcatatcccgattatttattgcttcctctagctgcatatgtacaatgatccggcgaaaatcaacactttgaaaccatgtccctttcaatgttttttctcttgcctcttcccgtttgtccgtacaatccgcctttccatcgtcaatgaaagctgccagactttttattgctgcttcgcattcttctattgaccggtcactgttcgaccattcacctctccggaatctatccgccagatcgcatgctgcttgatataatttgttaaatgttgttttattttttaattccatattagccttgtcccccctgtttggttatttataatctgaagaccgtttacacaatcgtgatacatgaaaaaagtccggatgcatgtctaactgatgcattatccgatatctacctgcaccatggcagaactgttcttgataccggcatcaaactgaatcttttacaggaattctatgtggtttgtaggtttgtcaaacatatgttacacagatgccagataatcctttagtacctgatttggagatttccatcctaatggacgcataggaaagttgttataatccctgcgattatacactttcaactgtttggcaaagtcctcaaaagaataaaaagtatgagttgcataaaaacgctcattatcctttcggtggcttctttcaactttcccgttatgtcgtggtgtaaaaggtcgtataactttatggcgaatcccatgctgcttcagatgcacctgaaatagtgtgggtttgtcacggtgagtggtaaaacgatttgtaaattctgctccattatcagtttggatacattgaatgggtaacggaaaggctttcaccagatgctctataaacatagcagaagaatacgtgttgtgttcttcaaaagcctctacgaaacgccatctggaatactcgtcaatggcagtatactgaaagaattgtttgccgatgaccttggggtttttgaggcatgcagaaggaacaaattttacatcaacctgtatgcgttgtcccggataatccatctgttcgtaaggctttggaatatatttaggatttggcggatgaactgccataattccctgcttacggagaaatctgtatagtccagggatggaacgggagtaaccacgctacttgagtttaacccaaaagacaacaagaccggcattgggattgcgtctgcgcatatcaaagatcagcttgatctcttcaggggtatgtaggtttggatgatgatggggtctgcgagagcggtcacgaagggactcaatagaaccgtcataacgtcgtttccaacgataaatgtattgacggtaggttttatatttgatagcagccttggtgacaccaaacctttcagcgtatttgattaaggatagacgataccgcatatcttgtgttatagtagctatagcagagaactccttttttgtttttttgttgtggtgactaaaatataacacaaaagaagcatctctgctttttttatattcagttgtaacacatgtattgtaatcctacaatcttttacaggaattctatgtggttgtccttgacgttttccgtgaaagtaagtatgctaaagatatcaatgagttaaacgcttggttgtctctgctgaccgcacagtcggttgacgaccttgctacactggtatctgactatccatggatggaagccatctgcaaggatatgtacgaatatatgtatgattccgagaaggttatcactatgttttcagaaacacttcgaatgttagatgagaatacggttcactatatgatcgatgaactacaaaaggaacgagatgatgcagtagccgctttatccgaaaaagactccgtaatatccgagaaggatgctgctctatccgagaaggactccataatatccgagaaggatactgaaattgcaacagttctttctgagaagaactcaatgctttctgagattgccgctataaaagctcagcttgcggtccttaataaataaagcaacattcgtgccaaagcattatcttatcataattataacgcatgctcatataactaacttatgccagacagctccaataggggatgactggcactttatcgtaaagggcaaaccactatcatctaatacccttatttccagttgctttcataactactctccctgtatcagtttttcaataatctcaagaaacgaattcgtatgcatagctgcaatctgcttttctgcttttttatattcatcatatatattttcaagacgtttctttaaatcgcataaaccttccaatgtctcttccagctttatatccggcatactctgatatgatttccatattccctcaaaataaccagggaaatataccttgtccgcatttgtttctctcttaaaagcctctgctgttgcctctgccatcatactatcaaatacaccaaaacgatgattttctgcatatgcaaatgcctgagcagaattttctttcattaacttaatatactgtctttggtttctggaaaaaataaactgattttcctcaaatatccgttggatgctctgatatatttcccattcttccggcataaaatatgctctttgctcctcacaaattcttctacggatatgcggctgtctgtctcctgtttcaatcaaaccagaaatcttattctttactgctgattgaacttgattccaatctacttccggaatttttatttcgtattttctggccatacatatattttcaatcaataatatatattcatccaaggaaagctttcctgcatatgcatattgtattacatctggaaatccttgcataacaatatcatcttccagatcgatgatacgatttgttcgaacctgatcctgtggcttgcttgcactatcacgttctattacatcatctaactccatattcatatcttgatcagaccattttccagatctgatccattgaatcattccatttatcatgtatcttgaattataatatccaggatataaaatagccatattatctgtggaaaataaatctccatattctgttttttccatgatcaacccagcccgatatgcaaatgtatacgtcaaatatgaatataaccatcgctctttgtctggcatatctttttctaccaacaattcatagatacgttcaaaatcctgaagtccacacttcaaacttcgaatattgtgtggtcgcctctgttgtaatgaaattctacgtttttcatcttctctctgttcttccctgtttctattcagcttctgccagctgctatctgttatattcaaagaaccaccagttggtgcagtccctgaaaaaattgaagctattgtagcctcgttcatacttaaaaattcagaataattcttacacctccagttgtttcctttaataatgttagcaactactcttttataatttccttcaaaatgaattgttctctgtatcagcttttctttcatctctttataaaaagaatcagtatcattttcttttaccttctcttcatttgctatgacgatggtaggaaaattctgattctcacaatattcatttatacatccaaatctctctgactccgacaatccggtccgctccagatcatcaaaaatcaagataactactttatctgctattttatttcttattgaaatacaattcataatatctacagacaaaatactgccaaagttctttactgtatccggcaacaaatttccaacttttgtgctgacatcttttaaagcatttgctgctttttcaccaatttcaagagatttttcagaaactcctttttcctgaataaatgcttctatccattttttcttaacagttgcatgtaattcctctgttgttgctattccaaacagactaatacgaagcaatatatgagtatatctcaaagcatctttcaactcatgctcaataaaatatgtttttccacaaccccattctccagtcagaagtatcgctccagctggctttattcccctgcaataatattctaattcttttaaacaatccatatatattcctctttcaaacatcttaattttcaaaacaatgtaaacgttccactgtgagtaccccactaataattagccgctcgtctgagcggccttatttctgtattatttcctgcattctgcagggagttcagctgaccagggcagaagtttctcgcagaagtcattgttcttatcatccatgtgttccgggatttctgtaagaagataattaaagtattcatacagtctgagcttgtttgcttttgctgtttctaccaggctgtatattatggcactggacttggctccatttattgtgtcacacatgccccagttctttttaccgatacagaaacttctgatactttgttctgcggcattattatctatcgggatctctccgtcatccagaaatctcctaaggtatttttcctggttaattgaataagtcatcccattataagtcttacttttgggcatgactttatctatgtttatacggatccagttaaaatatgcatctacaagtggcttgataaacttctgtcgatgtttacgtctctctgccggtgtcatatcctgaagctcagcctcttcatgatagatctgctgtatttgtgagagggcaagataggcaaggctcattttctgttcgcttttaggaagtgctttaactgcttcatcataccgcctgcggctgtgtgcccaacagcctgatatctcaagatcttccagttctccttccagtgtatgatatacctgatatccatctgttacacatactcctctgaaatccttaaggaattcccttgggtgatcagccttccttgtcttttgataatcgtaaagtattacctgcctgtccgactgatatttccctgttctatatacccacatatagcttttacttcctgcaggccttccaagatatatttttctccattatgcacaaatatttatcagctcatatattcgaaagatacttctttaactgcctttcgtggttctatagtaagcccctccatcagccatctgaattgttttggtgtgaaacttttaacttcatttgcattgcgcggccactgaaatgaaccatttgcaagtttcttgtacaggagtagaaatccatcaccttcccatacaagtcctttgatcctgtcagatcttcttccgcagaataggtaaagcgtacctgctgttgcagggttctcaatgccaagggatctgaggactctggcaaggctgtctataccatacctcagatctgttctgccacatactatctatatttcagaaaaaccaactgcatcattcagcatctacaaggacctccatgatggagcggatcactgcgggagcagcaccgccatcgatctctatgtgtaggctgccgcagtctatccttatctttaaattgctgcacgaatcaaagtcattctgataattggcgcattcaagtttgactatctgctgcttctcggtttcaactggcaattctggttgagaaccagaggcctgcatgcacgctgccagtctcaactgcttgaaccagtagtaatactgatcctttaatatgttattttcagcaagccagtcctttgttttcataccgctgttcctgcattcctgaataatcgcggtccaagtcgcaagctgcttttcccgaatagcaagtcgtgttgccataatctacctcccgaatatttggatttttcgctcttattttccaactagttgaggtaattataaaaaaattcgggtaagatggataggtaccggctatggagcgtttacctcacagccaacaataacctttttcatttcagttttattcatgagtttctctgtccatcgaaggaaagtaaggaatcccattccggtgttgctaaacttaaatactcttcttgaaagctcaaaccctttccagtcaaacgctctgcagaagtgagtttgtgatccaatatctactccgacaattaaagtgtcacttgttacttgctttagtctgtcattctgtgttaaattcattttgaacctccagtgttttgattgttttgtttacatccgccaagatgcaactcaatcataccttgaggttcttttttattcaattggcattatttctgaattacaggaatgatcctataatattctttattttgcaatttcttcgctattacataattaaatactatcattagttatacccaaaatatactggaaactacaggcatctattttaatacatttacaaatattatcaaatcataaaaagatactatcaacgggcaataccatacgctatagaaacatcacacatcataaaactgacacttaataacacgactttggttgtcatgcatatgctaaatacgaaaaagccggaataatcagcctcaatattcaaagttctgttcattccagcttcttctattttctattaaacaggatctgtaatattcgggactatatcagttcatataaataatattaaataaaatcccgtctaagctttaacttttataaattcatattatatattgcagctatatcttccattaacttttccttatccatactaaacttatcctctgcgctttcatatatcattaactgaaatacatctcttgaactcctgaattcagcagtttgtttctctgcattgatgtatccacaccaaatattcttattgttgtccttgccaatcaatacaatgtacatttgtttctcatcagtatcggtataataatttatagcaacatttaatttattaggattaatgcttaatcctgtcaaagaattcttcaaatcactaatctcctgcacaagatatttttcattatactcgtaaacaacatatgctgcttttatttttcccttccctttcattgaaatttctaactctggagcactataattatacattatctgctcgccattatcatctgtttttaataattttccaggtaatgcagtattatcaggagaaaataccattctgtctttttcaatcgtaacttttaattcactgacctccagagaagggaataaaatattatcataaaaactatgtaacaaaaataaaataatagataaagggattgtccaaacaatatacttaataaaactatttataaactcatcctttatcctctctcgtattgttttcttatcatcatgcaactttctactcataataatcccctttctttcattgcattatatctttttcaattagttttctccgaatcattaatacattcttaacgaaacaatataaattgatttattacaacaactaaactttctactcaaccataatttatctctccaacaaaatttatttctcaatcaacattaaatactgtcttcccatagctgtaattttataactatccgatcccaatacttttttcaattttggtattttaacatttttcggcttagctttcttactttctttatcaatattttgaagatattgtacaattgcctccatattatcgtcattgatttcttgatttttgctctgcaataatccaaaacgttcgagtttctcccgaatgaatctcatttgtttaaaatctatttgaatatctttacaaatatctaaaatagattctgcactactgtctatattagagaaagttttcaatacacgaatatccaaatcacttaattgtgatagtgttttaaaaaacagtagcactatatcaatacttgtattattcgattttaataagtttatataaccattaacattatatctaaccattttttcttgtggctcatctacaatattatcaagcaacacttccgtaatctgtctttgatatatcgggtctttctgttgtaagtcccttatttgatcttcaatttcatcttgacgtttttgaataatctgcaatgcttcaacaacatttctttctaatctattctgtttatatgaaagacgaatattatttaccattggaagtactaagccaacaatttctccagctaacacacctataccttcactaaccataaaactccccacttcttcaacaaccgaaggcaaaacattttctaccgcaacatttccagcctcttcccttgcagcatcaataaaatctttcattttatatctattcattataaactactcccttctgctatataacatcctgctattcttggcatacccattacattttattaatattgcactatataaatttttctcataaattcatggattttaattagatctgccccaaaaggcataaaagaaatcccccctctattcgattacttatattttgattctacccctatttatacgcaaagtcaacattttttgacataaaatctcagcataaacacacgcttccataccaaataaaagtaaatggtaaaccactcgtgggcatctaaataaaaccaccccctcaaggggatggatttaagtttattttatgctcttgcataaatcgggaagcgtatctgaccacggaagcagatcgtttatatatgattcaacaggttcatcctggcgaatcagtatttcgttaagtgcatgtttaaagtattcatacggcttcagtttgttcgctttagctgtttcagctatgctgtaaagcatggcgctggatgttgctccgttttttgaatctatgacatgccagttatgcttgccaacaccaaatgcccggatactgcgttccgcatcattattatcaagcggaattatcggatcatcaaggaaacatctgagatatttttcctgattcagtgaatactgtattgccttgtatgtttttccggtcttatcaaatgtgtgagtctcacataacgattttagccacgcaaaataagagccaactaaaggttttacggatgatctacgattatccagtatctctttctttgactttcccttgtacatgttatcaacatgatagattgcggctatcctgttattgccttccgcagctatggttcccgcagcggtttttgcaccaactgatttgactatctcagcccacttccttttagtgtgtgtccagcatccggcaactatgatgtcatccggacgttcatcttgaagagtgtgatagacctgatatccgtcagttaccagggttccatgaaaatcctgaagaaacgttcttggatgttctgtttttctggtaggctggtattcatatatgtatatcggcggattcaagcagcatttcagcctcatttattatctccatagtttcgggatcaaatgaaagctgggtgctgatcgtatctgtcttttctgttttacggccaaatctgttctgtgtaagaactgcaagattttcctgaagactggatatctgtctgttcagatttttcacttgcgcagtaagcagttttatcgattcggtctgctgcagtaacagcatgatgagagcatcttttgatagattattaagttcatcctttgtgaaagtttgtgctttactcatgatcttattataccacaaatgcaggtgaaaacccagcatttatgcggattctcaggactttttatatatctttttattcagaaggaccgagtaccgattgttagaaattttctagatcacagaatctggtttcgtcttttttatggttttttttgttctattgacaggccgtccataagccaccgatactgttgcggagttatttcctgtacctcagatgctgtccgtggccactggtattttccgtctgaaagacgcttataaagaagaacgattccatcttcctcaaacacgatagccttaatacgatcagtccttctgccacaaaagagaaatatcctccccttatcataaggatcaaaatcaaagtcattttttataatggcaacaaggcggtcaatgccgctgcgtaaatcggtatagcctaatgcgatgtatatatgttcaaaacatgtagcatcattcaacatgggttatcacctctaatacagcggcaagttgctcttttcggataccatcagcaagtgatatcctgatattgccaagttcaatagttatacttggcaattgatcctgtgaaaatccagttgttgcaggctactgtttcgggtcttcaagcagtgcaaatccggatgtattctccggcatagctgccaatgcattttttctggcaatcgacagccagtagaagtactgatctctcttgagattatttgcttcacaataatctttcacactaagtccggatgctgcccggtctgcaaatatctgttgccaggacgcaagcctgagttggcgggtttcctctctggtcgacatatatgatacctcctctgtaattagtaagaaaagctcaaaaagtgagaattacactaatttcacttttacactttccatcacagagtataatggcataaagtgcagagattaactaggcacgagtggtttaccatttacgaaataaagccgctcagacgagcggctaattatagtggggtactcacagtggagcgtttacctttgattggacataccttgatacactgataacaatgaacacatttattttcatcaatctttggatattcaaagccttcttcgtcctcgaccatagaaatagcctctttcggacagatggcataacaagccgtacatccacagcattcttcttttcttttatataatattggaatctctctttccaccttttaccaccaactttttaatttttctcttaatctttctcaaaagcaacttagcatcattttttagtccgatgccaccgtatttcttggcaacatactcaaacgatttattttcaaagtcactccagaactgctctctattatctggttttggaaatggagctttaagaggcggctgcatactgtcctctagctttgtctgcttccagatcagtctctcttttactttttcaaagattttttctccagcctcattatttactagcaccaatgaaacgcccttgttatcatcaaactctggtgcggctttctcgattccccagtaatctgcaattgtaatatctcctggatgcattacagacttatagggacattcatagcaactcggccgcagaacggtatgcccgtagaaaagttccttgaatacccgactactcgtagactttccattttcaaaacaaagtgtttctacatgatcatgccatccaaagtctttcttatttcggaagtccacacttgcaactttagagtgcattttctgctcttgccaacacagatatgcctcccatatttttttgcttggtactccgtgacagacaatatccacgcagaacaaattatcatactcttttccaatgtattttttcaatcctgctacctgacaggaagttccagaaaaaagtacacttttcttagcatcaagatctgttttgacacttttaaatgtatcacctagtttactctggatatattttgagcctcgcattcgattacgatcttccgcattatcagtgcgaatatgtacggcatcaaattcttccgtcaaacacaaccatagaccacaccaccgttggataaaacctgatccgaaagagctgtaaaaataccacctgatctggaagctgctcttgtcatttcatccttatgttttactgcatatactttaggctgcttccagttcattatgctgccctcctttcggagtaatcagcataataggtactaccttctgtgtaccccccccattattttgaggagtttattcttaatttttgttttcactggaactgccccatatttcttcatcacgaaatcaattcctttcttcttataatcattccagaactcttctctttgttcagacttttgggtcggagcttcaagatttgcctgccagcattgtattgtattacttaatctataatccaaatcactttgaatcttttcgaatagtttttctcctcggttcgtatgaatcaagaataacgaattaccattagagtcatagaaattcgggatggtctcctcaatatgccagaagtcgcctatagtcatatctgtttttctttctgtggtcgcataagggcattcatagcaagagggccgcaacgcacaccggttataaaacaccctaacataatctttaagaggtctctctgacccgttaactttcacgtaggctgtaggcgatttccagccattgcgcttgtctttgaaggtaagataagttatctttccatccttcttctgtattgattctgcatattctctccacagttttggacttggagagccatggcagataatgtctacgatatgcacccgatcacggattcctttaatttcactgaacttccgaaatccatctgattgacatcccatgccaacaaagagcaattctttctttggattatccattaaccaacgatacgcttcctggtaaatatcaccgggcttgctctgcatatattttgagccttttgctctttcacgctgcttctcatccagaatcatctggaattccacagtatgattctcataattatagactgcagccaccactgcatctccgcttttcagaaaagcattcgaaagtgcagtaaatgcgccaccagaagaactgctcatcaaggcagatttgtcttttaaccttcctgcatatactattgtatctatcaaatccaccataggctgttcctcctgcgtattatttgtttttaattacagttttgaccttgtgtaaaccggcaagaaatataatcgttgcacaaaaagcacatttgtcgcaatatatctataaatcgattaacctccgagcttatctactactctctaaaaagcagtaataagaattgaaagaaaaatataaaatcatgcggaatactctctttaatcacagccaaaacctattttccaaaacgactttttactaatttcatgccagatttcaacatatcaacattcgtcagcactgcatagattgccgtgatacaaagtgcgatgagctgaatcatcttattttcacaatagtatgttcctatcagcatagtaccaattagaatgcttccaataataatgggcttccgaattcgcatatgcacagtcttattaacatcaatatagcgaatgataaacattgaaaagaatgcaaccagtgtagatattgatgctgcaaaaatcttaattttatttattaaaatcaaattcactgtaatattgattatagctgcagaaatagaagtataagcaatcttttttgcatttttctgagctacatatatgcaactatataatccgacgagcactctaaaaagcattgcatacatcaaaatcaagatttggtcatatccagcaacatacttctcattaatcaaaatcgggaatacaaacggcatacacgcaacaatgccaaagcatgcagctgcaaacagtttaaaaagagacgtcattgtttccgttaggaattcgtcgcgatcctcatcgtcaaaatgtaatgatactgtctcagtccaggacaaattcaagatattataaaagttgataaacacattagggaacttatttgctatagaataaacaccattagcagcagttcctaaaaaatgtgcaattatagttctatctgacgcatttacaacccaccaagccagattattgggaattaaaggaatagaataagcaccaacccgtttgaataccgtcggccgaatactcttagcagaaaaatactcccacgctttggatgtaaacaccaaatacaacaacgtcaaaaactgagctatcagagtagacaagaacaatccttgcagccccattttcaaaatagccaacgcaatgacatttaaaactgttgttgctgaagcggatataaacgatgcaattgtatatttaacgctatatcccaatcctctaacaaattgaagaaacaatgccgtgtagacatgcagcaccacatacagcaacaaaaaatacgcattttgaattttcaaaaaaggttctacacaaacaaaaagaataatgtaaataatactttgtatcgtactaaatagtaacagcgtagaaaagagttttccttgttcttctttgtttccacgataatcaagcataaatcggaacagtccctgatccaactgccagtttacgagtggaagtaataatgttgaatatgtgaccaataaatcaaacgtgccatactcttccgttgacagaattgccgtatataaaggaagaaggaaaaaactaatacattgcgtgcataattttcccactgtaagtatagccgtattttttgctaattctgttttacgactcattaatattattcctcatataattaattattttttgactgtgtaggatttttcagttctcaacatctcagtgaatgagccagaactataggcacttcactgtgtcagatactaaaatgacaacagaaggctactcgaaataaaccttcattgatgttcgtttaaccagtcctagcgtgtctccatctctctattgaaatatctcttccatatccatcaagaatatcattgtctccagaaatcctaactgccttttcctataactatagtagttatcaagcaggtgtcctcccccatggatactattcctatcgactcattccttggattgttgattactgactcgctttccatttcagacttcacatgatttaagagcatctatatatatcttttgtgattccttcctttttttttcgattatagtctcgaataattcatagctatgttgtttggtaatcaggctctcaaattcatcatatgtagctgtcaacgacaacattgcctcttctttatgtgtccactcaagtaaatctttcaatttttttgaacaactatagatagcgcaattcttatgattcaacaatgtgaaaatcgtcccatggaatgtcgttgtataaacacactcagaaaactgaatatatgaactaaactccaacgggtgacagttaatattcaaatcacaccaggactgatacaaacatatcgatacaagttttaaattattctttcttgcatatctttttaaatatgcctgatgttctttaggaacactatatgaataaacaatcatatatctatctttaatcttacgttcgtgcggaaaatccaattcattaataggcagtaacatcgtaggatcacaaacaatttctacttgctttgcaacaagttttccaacaatattcttagtgttttcatctctaacacccgcatacgtcatttttcccaagcactccctaacccatggaaaatcattataatccttgagtgctgcctgtcctgcactaggtgcatatgctatacagcttttttgctccacaccaccataaaaaatcggattttgaaattgtgaaacctttatgttccaaatttcatcactacctactactgtacaatctaaatcaccagtatttttctgaatatcaaattcctttaatgcctgggtcatgcgcttataacgtgcacataaaaagggatatcgttgaatacatctaatcaattcctttatggtcttgggtttagaaaaatattccttttttcgctgcttttcatttctccactgtataaaacacacattatagttattcttttccaaaaaacatttattagcatatgcttgcaaataagcaccgcagttcgccgaatcatacggagttactattcctattttcataatttactctaattcactcccatcatcattattagcataattaacacttattgcacatgcaataaaatacggcacaaacatttcacgatcatacaaaggatttcctgtgaagccatataatataaaaaatatttgcattgccaacgaaaaattcatcaagcaataatctatgttcgtataatcttctggatttacacgcatctttgaatacatcgaccatgtccttactagatgaaacaaaaaccatccacaatagattataaatcctattataccggtttcaacaagtaactgaatatatatgttatgaatattccaaaaccagccaccttggttaacatactgtccccaacctatgccaacaagactatgtttaccgaacatagaaaacgcctttaaccatacatcaactctacctactgacatgtccccagtctctgcagtatcaataaagcgaaaaacaacagttgcaagtgccggcacgcaataacttgctacagcaaatacggttaatgcccccaataaaacacctatgccttttacgagtcgactttttttagcatttgaattatatgcaaaataacagaggtacaaagcagcaagtccaaaaacagtatgtgctctttttcccgataaaagcaatgcagcaactgatatcaaaaacaataaatagtcagaacgtcttttttcagtcaatgcatagcttccaaatatcatcgtcccaactgcaagaagcattccatttgttgaatagtgctttgttaatcctgggatccccgcattatgatactgattaagaattgtactcgtagcatccgggaacaaattacatacaaaatttatcgctgaactatctaaaaacatataaatggtaaatgcaatataaataaagtaaagatatcgccaagagcttaccatttttatcatccaacaccgatcattgaaacctcccaatgctgaaaataatatacagcagacaaaaagcaataaaacttgcatatacgttagactatagaatttaatattgggattatttcgtacataaaagaatatcattaatggtatccacaataatccaatatttttttttatacctttagtgccaaatataaaaacaacttgtcccgccaagataactgcagcactgaactgaactacgcttggcaaaagcgaaccaagagacgctagcgtagcaaaagtcaaaattggtatacattggagtaaaagtcgtagttcatgtttcttaacttttaattgcatctatatccctccatctagcaaataaatttttcatacaaaatacattctctctgcatcacgttttttcaagataatcattttgaaacacacctcataaatttatacaaaagaatacaatattttatagataaaacaccaaacacttgttttttgtccatatatgaaagcactgatttaaaactagtagatttaattttatcaataactagctgatactcctttttgtattgattcctgaaaggatacatcctacgtagaacagtgtagtatgcaatcaataattgatatcttgcaaagacttccaaattattacggcctttaagttcttcatatattctatccgcaaagtacagtgtatcgaaccatctttcagagaaggattgattagtcaccgaattttccctgcaataataataatacaatttttcagcgcaatagactatttttttacttttcagcagagatctaaatacaaaatatttatcttcatttatcttcttaccttcttcaaaatgaacatcctcgatcgtagaagctttaaacaacttattccatgcgcccgactcaattttttggcccaacaacagccattctatcgcctgatcaacagtaatttcctcataattgcaatgataatttttcttctcctcttgctttttttcaaaaatcctatcaactccacacacagatatatctgaatcagttttccttgcttgagtatataaaatctcaagcattctgcaatcaagttcatcgtcagcatctataaaaataatatagtcacctgttgcattttgctttcctacattacgagcttttgatacgccttgattatcttgatttattatgataatgcgcttatcaatctcttgtaatctatagcattcagcaagagattgatcattagatccgtcatttacaacaataacttctatatctttcagtgtttgttgcaaaactgaatttaaagtatcaactatataatttcctgcgttatagacagggataataacactaatatgtggcattggtgtcctcccatagaatcattctattcaaaaatcttacactctctatcttcaaatatgtgtgtgaataaatcgaagcaatccaattacttattctcaacaacctcaactttttttcctttatttaaatggcgtgcaacagttattaggcctgttttgaatagaaatcttttagatttttcaattattttatcctttaatataattggatcaattttattcaaagccttatcaattggataatgttcagccagctggtaaaattcagcccgcctaggatgtggttttgcactattgcaaaccataacaccattttccgtcacaagactatttacatcttcttcttgtatttcaatatatgattttatggcctctaaaatctttccacctttttcagtatgcacaaatattgatgaataccctctattatcatcttttcttccggtgatttttgaatattcataacaatcaaagacagtgatatcgcttggtctttctattcctttaaaaacacatgctgcgcaagatggtcttgatgagatttctcttacaaacgccttcatgtatggatcgactctaccagacccatagtaggtttttccatttgcaaaatctattttcatcgtgctcgtgtgatacccatatgttttatgtttaaaacgggctccaactattttcgagctgtatttgttttccatatacttcacatagttatcccacaagccaggcgatggtacacctctgcaaacaaaatccacacataaaaggttatctggttttttccttaaaaagcttagcagccctgccacttgacaaggtgtcccagaaaacaaaatagtcgtgccttcttttaattcttttttaatatcttgaaaaatgtttccaagatcactttgaacaaatttagagcctcgcatctcctgcaactgttgctttgtagtagcccttttacacactactctcatgttattgtcgtatccagctccataaactataccattctgctcaaggatataatcagccagagctgtgaaagcaccaccagaggtactctcatagagaattttgttatctttaattctaataatatagccttctgttttttcagatattaccgtttttttattaagaatcgggcatgctctttcgcatgctccacattcaatacaacgtctcatatcaattttaggatacagaaaaccttcttcgtcaggaaccatcgcaattgcacttttagggcaagaacttgcacaggcagtgcagccacaacaatccaatttgctctttatttgaatcatatatcctcctgaatccaaatcattcagaagcaataacagattctcatttcttgttcttcagaaacttatacacacccatccgataaaagattcttttagatttctctattaaataatcccttattctgattggtacaaatttttgtatatgtgctcttagggtttctttatctaaattcagatagtattcatctcgtcttggatgaggctctgctgaatggcaaatcatcgtgccatccagttctatagccttttccaaatttgttgcataaagctcatacctgtctgcaattctatccagaatcctttctccctttgaagactgcacgatcagattagtaaagcctttatcatcatcaacaagaccttccactaagttatttgcatgccagcaatcataaatagtgaaatcactacatcgttccactgatttaaagtgacattgatagcaacttggtcttgacgaaatttcagcaaagaaactcttaagcattggatccacacgggcgcttccataataaacaaactgatttttgaatcttatacgcatggtgccactatgatatccatatgttttatttctgaaaacaatatcatctatttctgaatgatatttgtctttttgttcgtctaaatattttttccaaagtttcggcgacggtgtaccatggcaaaccaaatctacggttaccagattatcgtattcttttctcagatatgattttaatccatacacctgacacggcgttccaataaagcacactttcgtttcttgcatcaagtgtttttttatttcagaaaagcaatcgcctaaatcgctctgcacgtattttgaacctcgaaactcttctgccccccccagaaattttatgaattaccttatattcttcattataagttgcgccacaaataacacctccctgatttaggatccattcgcctaacggtgttacaaatcctccagaggtacttgtagaaacaatttctacgtcctttgctctgagtacgtatgcttttctatcaaacattttagacttgattttattttcaataggacaagcagactcgcacaatttgcaatctatacactttgaaatttccacgaatggatataaaaagcccttttgatcctgctgcatacttatagcttttttcgggcatacactatagcatgccgtacatccacagcaatctgctttattcttcactacaatcattaagtactttctccttccatcctttatagtttttcagcaacattcaaatacagttgtgcaagtgtatctgctgtctgctgaatatcataacctgcctgctccaatatttttctttcacttttcctatgcacattcatatacttcaaaacatgttccgcccacacatcaggtttttcttgaagagaaaggaattctgtatttgaagttaagcctacttcttttgttattacatctgagaaaacacatggcaatccgctcgcctgtgcctcaacccccgtgaccggaagaccttcatgtaaagatggcattacaaaaacatccattgcctgccacattttattcatttcatttgaagctccataaaaaattacagcgtcttcaattcctaatgtcctagccttatttttcatcgcttcttgtagttcaccaacgccaaataaaagtaacacagtatttggattttttcggtgtactgcttgaaagatgtccagcaaaaagctgtgatttttttgatcagaaaaccgtccagcgtgtcctacaacatacttaccttccaaattcagcttttttcgtatttctcgacgaatagcttcattataatcatatttctccaaatcaattccattcggaagtactgaatacctaccagattcaataatcgacctcggaaatagaaatcttgcagctagttctgaacagccataaaagttatcgcaaaagagtggaattaatggctttaagattttgctcataaatcgaattccattacctgctgctccaaagccagcattgtgactatgtattgtaatatattgaaccccacccaattttgcgccaataatatttgtcatatctgctgcacaatccgcattataatgtaggattttaatatgatttctcttgcagactttccgaatttcattaattctccaaattcttctaaaaggtctaaatttcacattatcagctgaagcaacatactttttacttcccaatgaaagaactttgtcttccataggttcgtgcctatcatgaaaaacaagatagtcaaaatttattttagatctgtccaggtgttcctggatatgaatcatcatattagttacacctccaacaccaagcggagatgtcaccaatactctaactacttcattattcatataatatttatcctttcgcggcgacaatctcatgcattatttcatattcctatttcggcacgattacacacgctttctaatttctttcaatacagtctttaaatattgatctgttaccagcttaaggtttttatatttttcccctacagctttatagtcaatatcatcttttacaacgtctaataagtccattccatttttatagcgccgactttctagaccaaaattcacacacagggtatcaatacgagaattttttgaaaagctggaattttcagcatatctgttaaataccacaaactgcttttcattaagaatagaaaatgctgtcccgtggaaagaatccgtgcagacatactctgcatttcgcagaagatttagaaatctttctggactcacatcatacagagcaaagtctccaaagttttcatcttcttctacatactgatccatgtgtcgtaacgcaacgactttcatgcccttgtcatgagctaatttctttactgcattgcgatattcctgtgtggcaccaaggaagtatgcaaaaatatatggctcattgatttctctcttattaggaattctctccagccattcatttttactcaaaaagaaaacaggatctaaaatcgtaggaacatctcgaccagtcagttccttgacaatctcacttcctcgattctcacgcatactaatgtattcaatgcgattcaaatactgtatcgttcttttcttttgataccacggaatttcctttactccgaaactagaagcaattgaaatttttagcgtgtcatccggaacaaacatcaaattgtaataattcgttggcaatcctgctggactccaaagctgatcgcttcctgttataaccgccgaatatttctttccaccctcgcataatgccgcatagccgatatactcatcggagaaatccttaaaagcccattttttgaatccggcaaatgctttcatacgaacttcattattctttgcatactcaggatgcttttttagactaagttttctctgaattccctcaaatctgctattaaaccaaactgcattaaaaagacgcggcacatctttcagtgcttctgtcacagtcttctttctagtatatcgaaccaactcatactcaatattttgattttccaaataactaacagttgcatatgcttgcaatatgcctccgtaattttcatgcatatattttatgcatactccaaccattttaaactctcctctatgctgcacatcttactttttcagcagttcctcatatattgcctgatacttctcgttttttttctgccaggtatacttttctgctttcttccgtgcgttttttccacgccttgttacttcatcaggataagcaatacattcaagaattgccttttttaaattctcaatgtattcctctttcgagtttcctccataaagccaaccggtgttttcatcaaaaagagttgctccgccaaacttattaatggtgataaccggaataccttttgacattgcctccagtaagaccgtgcctgtcgtctctcgaatgctcggcataataaatacatccgcacctgcatattccttttccatttccatatagggaatagaacccatgcagtgcacatgctcagacaagttcaagtcttccttaccgcgtttacgtagatgttcaagttccgggccatcgcctacaactctaacctgatatctagtttcctgcggaattctcatcaatgcatcaaaaagaaaatccaagccctttcgatatatcattcttccagcaaccagaaagacgcattcttcatttctgcccttttcattgcaagtatctttaatatcatttatatctaccgcaacctcagtcactggctcatcacttacattgtaattcttcattcactttttccttttctgtccagctcaccaattcgtccggtcttaatccgttatcaaagactaattcatacggacagtttagttctgccccctctacgaggaattcttgagtctctttatttgcaaacataatatagtcgcagcgatttagtttgccagtgattctcagtttaaagcgataccagcgatttatccctgagcgaacgacttcaatgatttcatgcccctttgcgtaatcttttaatccattaggcaaagactctcctccgccaagtggtccgcagacgaatttgatatttgctatctttccatagtctccaattgcacggaattcaattggcgtaatctgatgaataacgtcaatttttttatccgcacagattttttttgcgagaggaagtacccgtctattccacacattaagtcttccagaatacatgaattccttgaagattttcttgtaaaaattcgggatgtcaacataataaaactttatattttcaagtgggtgactctgcaaatatttttcgactggttcacgttgctcttcttttgtaatcacataaactttatttgtttttgaactttcataaggaacgcaccaaccgattttatcttcacttccagcaaaagggttacatgaataagctatatacaggatattcattacttcgtctccatctgctgtgcgatatcagcatccacgatttcctcgccagtcttatgcttcagctgctctttacttgcctcactcagaccgttgttgatcacgcagttcatatcgcaggtgctgcacttatccagatcctctttggtgacttttccatcacggtagtcacggcaggtcttcagctcatacatgctgtacggatgcttggtaaacagagccttgaacttgtgaaccagaacccaagtagccggtttccagatatacttgtgcatagccgggctgacagaaccaatcatccagcagtcacggtcgcagcaacgaacctttgcacgaaccttctctgcttctgggctgttccacagctcgtcccaagtctggttgttcaggttgcccatgacctctttgtccttggtgccattgcaaggcataacatcgccatacggatcgatgaagaaggtatcgaaactcatgtcgcaaggcagcagacgcttctgtccgtagatgtagttgatcagaccgtgattaaagtatgcacggaaccacttcttcgggctgttgctacggagcagttcgttgaccagattctcgaagttctttgcgaccataggacggtcatggatgatgttctttgcctcaacgaagtagaagctgttatgcagagaagcagttgcaaactccatgcccatctcatcggagattttgtacagaggaacaaggtcaggagcgttcttatcctggacggtcatgccgaaaccaacgtccttcatccccatctcacgcagcttcttcagcgtgccgtaaccacgctggtagccgttctgcagaccacggatttcattattggtctgttccagaccttcgatagagatacggataccaatctgtggaaactccttacacaggtcaacaatgcggtcggtgaagaaaccgttcgtggaaataacgatacgatcagacttcttgtatagttcacgcacgatatccttcaggtcggtacgaatgaacggttcaccaccggtaatattggtaaagtacatcttcggcagcttcttaatggtctcgatgctgatttcctcttccggcttggaaggtgccttataacggttgcacatagagcaacgagcgttgcagcgataagtaacgatgaccgtaccatttaacttcttttcttcagacatgattaactctcctattgtttactctctcttttaagaacgtttcgattttatttaagaaccacttggcacataccgagaacacaaccgaaccgcagatgactgcagctgctgtgaaaacatatgccaataggccatttccaaatagatgtacaaggtgtagcttctcaagcacacgataaattaccatgtggcacaggtaaatctcgaagcagataccaccgaggaacttggcgactggattgaccagtacccccccccgcttgcatccgagggtatagaccagtgttgccacacagaagaacagcatcgtgagcgtattgccgcctaatgcaaaataagcaactgcggcaatcaacaaaatcgctccagcgataactttgtattttgctgcaaattcggtcaattctttccgatagaggaagatcaagcctcctgcgataaagtaaatcgcatcgtagacgatattagtcctccctgctttgaagtaattagtgcacaaccagttaaataccagcgccacaaccgctacactccacgctcttttcttatttccaatcaggaagcagaagaacgggaacagcatgtagaacacaaagatgactgccagtgtccagctcacaccaatgaccgaaatcttggcatttggcagaagtccctgacataaagtcaagtttgcgaaaacctcaaacaaggattccttgcttggtgaaatcacaaagtctaacgcacaaagcagtgcaaaatacggccagatcttgatgtaccgtttcttgtagaaatcctctacactgatcttctggtcaacaattttctggtaatagccacagcacattccaaaaccactgaccatcataaaaaggaaaacgaggtttgtgaaagatggtattagccgttcaaacacaaatcctcctatcccatattctccatttgcgaggacgtgcatcaacgcaatgccaatgatggcatacgccttcaagccgtctattccctcgtatcgatccgattttgtagccacaaattctctcctcacataccagtcttactgatacaccttcataattttctcgtaatactcatcaatggtatcaaagctgatgtccttgcagttcttgctatactgctcacacagcttcttatcaccccagagcttctcgatctttttcttcagatcttcggcattgccgctctcgaacagctcgccggtcttgccaacctgaatcagttccgggatgccaccaatgtctgctcccagtaccggtgtgccatacatctgggattccatcacagagaacgggcagttctcataccactccgacgggtagatggaaaaccgtgcttcacggatgagcttttccagtgcctcgcctttctggaaaccaacgtttttgatgttcttaataccatttactgtctcttccagcgggccagtgccggcgtagatgaactgtacatctggaagtttcttgcagaccttgatgagtgtgccgatacccttctccttggagaagcggccgaagtagaggacgtagtccttcttcactgtttctttccgctccaccttgtcgatgaagttatgcattgccacggtcttcgttgcaaacagaggattgctgtccatcttgctcttcatgaactcggagcagcagatcatggtgtcaatgtacttataggtacctttccacttccagaactccgcttccatcatgccgatggctgacttcgccgtggaaccgtgtatgcacttgcctttcatgcagttcacaaaatgaccaccgagacacttctcacagttctgatgcgtgttcggattgttcagcatgtggtttgggcagaccagctggtagtcatgtgccgtgaagatgatcttgcaatctcttccggtctccttgcgccacttcacgatttccagaatgacggaaggtgtcagctggtagttgaagttgttcaggtgacagacatccggctggaagtcgtccagaacttttctcagctgcacccgtgcttccttgctacagatggtcttgatcgggtaggtcagcttgctcagtttgctaccgccatggaagtccatatcagatgtataagcattgacgcgattacccacacatcgtccttcatgttccattccaaaatactgaacctcatgaccacattgttctaatacctcacccaatttaaatatgtatgtttccgatccaccatttggatataaaaacttattaatcatcaatatacgcataattattaccttctatatagctgcaatgttttatctactatctcattccaatcatacttcttacatatataatcggctgcctgatccttataattatcaaccaacttactattagcacataatttctgtaatttatcctgcaagtctttcacatctgattttttaaatgcaaccgctttatttccaacaacttctgtacattcctttatatctgaagtaagacaacagttaccataactcattgcctccaacagactaagcggcattccttccagatcacttggaagtacatatacataggcattactatatagctcctgtaacaactgtccctgaacaaatccggtgaatatgattctatcatcctgttcagccatctgttttaactgctccatatactcatccgtatcggaagatccaccggctatcacaagttttttatttgtctctatatccttaaatgcctctatcagataatgctcacccttttctggtacaatcctgcccagatacaatatataggaatcttttttcaaaccaaactttttctctattagatcagcttctatcttatctggtctgataacaccattgggtatatatcttgtctttcttccatatgtatctttaaaatactttttgacttcactgctaagcacaataatttcatctgcatatttgactgccattttctctccaaaatgaatatatttggagccaaatcctgccttccatttttctctctgccagtctaatccatgaaccgttactataaccttttttctaaatatctttggtataaaacaaaaagctgccgggccttctgcatgtatatgcacgacatcatatcctccaaatgcactgcaaagtgctgcaaaaaatgacgacgatactgccgcaagtcctttcttttctatagtaggaacagatttgattctaacattcttatattcttttttctcttttgtatcatactcagaaccactcacatgatgtccacgtctgttatagcaagtcacatcatgccctgccatagccatacgagtgctaagttcttctacaactatctcaaccccaccttctcttgatggaattcttttttgtccgaacatcgctatcttcatctgttcttattctccacatatgtatttatcttccatattatatccaatcaggatcacatcgacccttcgcccttcagcacaacgcccactgtcttgaacagtatcttgatgtcatttacaaggctccattcatcgatgtacttacggtctaatcttacaacctcatcaaaatccgtgatgttacttcttccactgacctgccatagtcctgtgattcccggcttgattgccatacgacctctgtgatgggcagaatatttctcccattcatcctctgttggcggtctggttccgatcagactcatatcaccctttaacacattgaagaactgtgggaattcatcgagcgaccagtcacggatccggtttccgatgcccttcttgatcgtaccatccggcagcttcttgcagccgatgattcgcggatcatattccatcttgaacatcataccatccttgacctgattctgctccatcagttcggcttttcgtgcttccgcatccatatacatacttcggaatttatagatcttgaacttcttaccattcttaccgatacggtactgggagaagaagatcggtcccggtgatgcgatatagatacaaggtgcaaggatgatcgtaaggatgcctgtaaagatacatcccacaatccctccaaggatatcgattgcacgcttcacaaatgcctgatacgttgttatatatgtagtgctgacggtcagtacatgatgaccaagctgtttatcgaatacatactgataatcggaaagctctgccggaacacgcacccgcacatgaaccgtgattcccatatctgcaaactgtcccagaagattctccggaatatgcttctcaaatggtatattcacataaacctcatctacccagccatgcatgatctgttccagaacttcgtctgaatatgtatatatgctaagctccaaatctgcatattctgtattgtagttttctacctcatcctcagttgcatctaataatacaacacctgcaacccgatacagattatagtattctgtatccatttctgcaagtaacgcattcaggtattctttgactgtcacaattacaatggatttctttgccacacgatgtcttcgtatatattccttccagagaagtgtaaccacataacccataaccagataaatcatgccaaacaaagccataacctttctggaataggccgcacccatcttcatcatgaacagaacgaatactgccagaagtacaaccagtacagactgcttcacagacgcaacagcttcacggaaatatccccgtttcagcacgcctttatatatatgacatactatggtaactaataattgaaataatgtcagaagtacggctattgtccgatataacttactatgatacggattttctgttcccatccgtataaaatacgccatacaataagatgcatgcagtgctatcagattcagcactgtaaaatcaagatgctttaaccagccctgaggctcttttctatacattctattccctcattccctcataaatgtgttcatcatgtatctttatcaagtcaagctatataaatatagttgttaatggcttagaaattcttaacgcttcttaaccactaacaactataattcaattcttattaaaagtcaattttctaggcttaagttgaatgtagaaatttctgaaaataatactgttattttaggcaatttttccaaagtatttgacaaagttctatagcttatatccattcttctttaacagctctctggcggtttccggtgaatccacaccctctgcattcttgattggtgcgaattcatagtctctgacaacctcgaatggcagacagtcattcataaactgaagcatatcaagagcaagtgtctcgaacttatagccgttcggctctgctggtttcaccagttcccgattctcattcatataaggaataaccttctttgccgtatgaagtggcattttctgattcagcagtagcttcaactgattaaccgggaagatataatttaagatcaccccataattataagcataatcgcccataaccgttttctcataccgcatctcatccgacacttcataatattctactatgtaaggcttattgtctttcttacacagcacacctacccgctcatacggatccgctttctttacaacttttgccgccgactggtaatcttccatcatcattgagccaaggaataccggatctgcaatcttctgtaatacattgtccaccgcaaatacattgatataccggatgccctctttatcgagctgttctaccagtcctgcacgtttcatggatgagaaccagccaccatttccatttggtgacaggcagatctttgatggtgcttccatcaatatctttccattgaaatcaacggatggtaccagctcctgtttgaagaaatgcagatactcctccttatatccaaaattcttatgctctgcaaagaaggatgtcgttgcttcgtagttcttatcactggtcatgatatagagatggatccatcgtccaagtgtcctcacaacagtcaggatcgtcttcacctgacattcgaatatatagagatctctcgtcaatccgatattgtatgtgcccttcggcccatcaaatccaagtctggttccctgacctccggcaagcattacaagggcaagctgtcctttctggatcgccgtttcaccaagcaccttataggcaaattcatagtccttgatcgtgtcaagtgtcaaaacctctgttggtgtgatcattccttccttaccgtctgattctttctcttttaatacatcaaatatagagaagtcgatctcttcaatctgggaaagcaggctctgcttctcctcatcgttcaattcatcataataggcgagcacatgctcctgcccgtactttttcagcacttctaaagcgttttcatatgtcatataattttccctcatttctatttttctccaccactataccttgaacttgcctataccattattccgcaaaacgctctcgctctatcctcaacgtagcggtacataaggctgcaagacacgcagcctaagtaccgacgttcggacaggtttgctacataatatatagacaagttcaacacatagtggaatctgctctctaactataatttattaacacgttttcttacttcaacagtctctttaaaaacttttgctacatcctttaatccgatccttcttccgcccctgctgtcatcccggctgtagttcagctcgatcggagcttcgcagatctttctgccatcttttgctgccatggcaaggatctcaatatcaaatgcatatccttctgcctgcatccggccgacgattggtttgatcacttcttttttgaataacttgataccggtctgtgtatcgtgggtgttcagatggaacatcatctttaacatcagataatatccatagctcatgatcttacgcagcatcggataatggagcttcgactccggatgcagcttggaaccgatcacgatatcggcatcctgctccttcatatcctttaagaatcgtttcagcaggattggtggcagttccagatcggaatccagaaatgcgatatatcgtccctctgctgctgcgatccctgtccggatggcatgtccttttccaccatttggctgatatgagattcctctgatatgagtatcctgcatttctgcccggcggatgcactctgcggtgttatctgcacttccgtcgtcaactgctatgatctcataccgtttgacgaaaccggacagcactctgctggtttcaagcagattatctgttatatgtgctccttcattataggcgggcatgacgacagatagtgtcacatccccttccttatttgtttccatggtcaacgttctcctgtctgacagtcttattcttctatgttcgcctgttttacaataccatagactgcctctctgacgatttccgacatggatacgcccttctgctttgcatacttcgaaagcagttcatgtgtatctgtgtcgatcctaagtcttagaattgtgtctttccgtttatcggtcggtcttcccggacctctcttgatttcctctgccatctccctgctccgtttctttttatttaaagaaaatatttctttactccatgtatcgcatatcctgcaaaatatccaagtgacttcactgttccaaatcccatcttccggtatacctgatacgtcatctttgcagaatgtaatttggaacctgatttactgttcttcaccatccggtaaagcaataacggttcattgatgcctgctgcctccccgtatttcttaaggatctgcagccagcagatataatcctcgtgagcatcatcatctcccatcgggaactctgctgccacctctcgcttcatcactacggatgagcagttgatcacattcccatacagtagcatcttgtaagtgatgttctccggtaccggtaagatccgtccggtatgggttccgtcctcttccatcagttctctggcagttgaggataataccactccggtcttcttcataacagcaagctgctttgagagctttcccgaccgccagatatcatcggaatctaagaatgctacatattcgccctctgcaagctgcacacccttatttctggttgctgctacaccaagattggtttcattcttatatagtctgacctgtggattgcttttatattctgccagacactccgtcagatccttcggtgaacagtcgttgatcacgatgatctctgatatcacatcctgacaaagtgcggaatcgatcgcctgtttaattgttctgctgcaattatatgccggaatgatcacggatacttctggtttcatttatttcttttcctctacactataaaaggcatcctcggcttcatcatgcggatgcttgatgcctgttttctttgtcttgtcttcgcggatcgctgtcgtctgatttgcatcaattccctctgtattctccttctggaataagatcttgaaggtcagcaggatcagcttcagatccagccataaggaatactgctcataatatgtcaggtcaagcttcaccttatctctcggtgtggtgttatatttaccgtaaacctgtgcatatccggtaagtccggccttcatcttcagacgatagtcaaattccgggaaagtctccctatactgtgctgcgatctccggacgctccggtctagggcctacgactgacatatcgccctttaagatattaaagagctgtggcagctcgtctaagtgtgtggcacggatcacacggccaaccggtgtgattctgtcatcatgctttcttgcaagctgtgcgccatgttcctcggagtccatccgcatacttctgaatttcatgatcttgaataccctgccatttaaggtcagacgatcctgtttatagaatacagggcctctgtcatagagcttgatcgcaagtgcgatcaggatcataaacggtgaaaagataatgatcatgatcagggatacgatgatatccatcagacgcttgaagatcatatcttctcctgtcagtccctggtttctggataataataacggtgtatcaaacaaatggatcggttctgctcctaagataatgatatccgataacttcggtaccacatacgaacggatcgaatgctcgaagcagtattttaccaattcgtttctgatatatgcctttgtctcacaaaggataataccatcgtactgtaagattttttcttttaatgctttctcaccttcactgacatgaatacggtcagcaatgatgtatttgtcttttctggcattgatcttatcaatgaattcggtcggtgtcttatatccgtagacaagcagtaaatgtcttggaggataaaacttacggtacatcatcctacagacaaatacccatataaatataactatgacctctaagaatgtaagctcgatcatgttcagtgccggcagataattacgggcaatgatacacagctcgacataacctacgatatttgcacagaccaatgataatatctgtgaaaagagaacatccatcacccggaggaagcctactttataaccaccatacagcttcgtaaacagataaatgataatcgcatacataccgattaccgcccagttacctttgttccagaacggaatctggatagcctgagtattatctgcatattcggtataccacattctcgcaaacagcagtacttccgcagctaacagaagcacgccttccgaaaatgtgataatacgtttgtaaatgtctctctttctcacatgtctggtttcttccatatcaatctccatcccaccatgagaggtggtcaccaggtggatatgccacctgctttctcttcatttttttctattggtatcgattattttaacagttcacggagcatctggtttacggatgccggatctgccttgcctttcattgctttcatggtctgtccaaccaatgcgccaagtgctttttcttttccgccacggaagtcttcgattgcttttggattattggcaataacttcttctacgaccttacggagtgcaccctcatcatttacggtggcgagtccatgttcttttacatagctttccggttcgatatcatctgtaaatatcttttcaaatacttcctttgcgacattgctgttgatggctttcgcatctaccatctgtatcagctttgcaaggtgctctgcgctgaatgacagctcatctgcatcgatggaatgttctttcatcagacgcatggtctctcccatcagccagttggataccttcttcggatttgctccgagagcgatcgtctcctcgaaaaggtctgccatcttctttgtatttgtaatgatatctatatcatagtctgggatatcatactcttctttataccggatcttcttctcatcccggaattccggctgacggcttcggatctcctccatccactcgtcactgatctgtaccggtacaaggtcaggatcagggaaataacggtaatcctgtgcatcctctttggaacgcataggatatgaatattccttggtatcatcccatcttctggtctcctgtacaaccttttcgcctgcttcgatcagatcgatctgacgttctctctcattctcgatcgcgtgggcgatagccttgaatgagttcaggttctttgtctctgttcttgttccgaattcttctgctccgacttcacgaacagacaggttgacatcggcacgcatcgaaccttcatttaacttacagtctgatgctccaagatactggatgatcagacgtaatttctcaagataagcaattacttcttccgcagaacgcatatccggctcagatacgatctcgatcagaggtacaccggaacggttgaaatcgaccagtgaactgtctgtatatggatcatgtaccagtttacctgcatcctcttccatatggatctcatggatccttacgaatttcttcttgccctctacttcgatctctacctttccgtttctgcagattgggtagtacagctgagagatctgatagttctgtgggttatccggatagaaataattcttacggtcaaatttacagttctgtgtgatcgtacagttggttgcaagaccgacagcaactgctttttctactacccctttattcagtaccggaagggaacccggcataccggtacagaccggacatgtatgtgtattcggtgcaccaccaaatgcggtactgcagccgcagaatatcttcgtctttgtcgcaagctctacatgaacctccagaccgatcacggtttcgtatactttactcatcttacagacccctttctgctacagcggcaggctgcttgtactctcttgtctgctcaaatgcatatgccgcctgaatgattgctttctcgttaaatgcatctcctaccatctggacaccgatcggcatgccgtctttgtcgtacccgcatggaagggaaatacccggaagtcctgcaaggttgaccggaacggtgtatacatcgcccagatacatcttgatcggatcggataaggattcacccatggtcagtgcagttgtaggtgcaaccggaccgaggatgatatcgtattttgcaaatgctttatcataagcctgtttgatcagagcttttaccttaagtgcttttacatagtatgcatcatagtaaccggatgacagggtaaaggagcctaacatgatacgtctctttacttctgcgccgaagccttcggaacgtgtcttcttatacatgttgtgaaggtctgtgtactctgctgtacgatagccgtattttacgccgtcgaaacgttccagattcgagcttgcctctgcggatgcaatgatataatatgcaggaattgcatattctaccataccaaggtcaaattcttccacgatcgcacctttttcttttaacacttcagctacatggtacacagcatccttgatctcaggatccagtccttctgtgaaatagtcctttggaagtccgatgcgcataccttttacatcgtcctttaatgcgcttgtaaaatcattatccgtacgttctacagatgtagaatctttcttatcataccgggaaatgatctctaatatcgttgcacagtctgttacatcctttgcaagtggtccgatctggtcaagagatgaaccatatgcaaccagaccgtatctggatactctgccgtaagttggcttgattcctgttacaccacagaatgctgccggctgacggatcgatccaccggtatcggaaccgagtgcacacggtacttcttctgctgcaacagcggctgctgatccaccggaagaaccacccggaactttatttgtattccatggattctttgtctcgccataataagaagtctcggttgtacttcccatcgcgaactcatccatatttgtcttgcctacgatcacggctcctgcttccattaatttcacaacagcatctgatgtataggtcggtacgaagtttgataagatcttggatgcgcaggtggtaagcacaccgttctgacacatattatccttgatcgcgatcggcacacctgccagcgggcctgtcagctcgccactgtcgatcttcttctgtatttcttctgcctgtttgaatgcaccttcttcatctacggtgataaaacagttatattctttgtcgtatgtctttatattctcgatgcaggctttggttgcttccataacggagatttctccggccttgatcttctttccaagctctactgctgtcatactcatcatatccaatgtccgttacctcctaatcaaatgttcttggcaccttatagcagccatctttctgctccggtgcatttgacagcatattctctctgtcgtcgccatttgttacttcatcttcacggaatacattattataagaaaatgtatggctcattgcttccacattctcagtgtccagttcgtttaacttacttacatagtcaagcatatctgacatatctttctttgcctgctccttctcctcatcggaaagctcaagcttcgccagaatacctacataatcgattgtttcgtctgtaataaccatggtatgtctccttgtctggtttttatttatagtaccacaaaattagttagagtgtaccacataactccgttgtttgcaagtctacataaaaaggaaggcattccaccttcctttttatgtcttatattctatttatctcaagttatataattcactatttattaaatgcttcacacaatccggaatagttttattcttatctgatactaatattttattatatttatcaatacacgcttcttttgcaaatataaaatcgactatgtctccaccattacttctttctattgatgaatcttctactctcaatgacataggaagaaataagtctttttgtttttttcttgttgatctttactctctattaagcctaatgtgaattccagatttgttacactcaatttatatacaatcgtaatagtcttcagatttttaagaatacatatcgtatcatttgtcaattctggcaatctctttaaacacggtattttcttttttacattagcaaatgggtgccttgcatcaaaataaaactgattattggtaagctttcttcttttcgcattcttataaaattctctggctgataagtttgtttctactccggtcaagtgaagaaaatgatccaccggaaaggatacctcaaaatattcttcaccatatacatataaaaatactttacccgctaacattttactgtatatttcagccgattctattattccctgtcgtattttatttttcttttctgtctttgtagccattcacacctcatcatatgcaaagaggagtgtgatgaaaaccacactcctctttgtattcttcataaagagttttatgctggttgtcagcctcgatatccagttaagatatctaaatcggcgtggaaatcattaagtcccccacgtggactacaaccatatcctgattgcacggctcgatatcaattaagatatctaatgaaatggattttttaccctgctccatttacagcccaactttttacgatgctctttcatcgagaatatctctattcttatatttataatactcaaatcatattataaaaacaacatttttatagttattttataacatgccctctaaggtctcacggattgccttgatgaagttctcgctgtttaatacagttgggttctcaagggttgtgataagtgcaagatcctttgtcatctttccggattcgattgttgcgatcgtcgctttctcaagcttgtttgcgaaatcaaccagagcgtcgatgccatccagttcaccacgttttctaagtgcacctgtccatgcaaagattgttgcaacagagtttgtggatgtttcttcaccctttaagtgcttgtagtagtgtctctgaactgttccgtgtgcagcttcgtactcatactttccatccggagaaaccagtacagatgtcatcatggccagtgaaccaaatgcagatgagatcatatcgctcattacgtcaccatcgtagttcttgcatgcccagatgaatccaccctcagacttcataactcttgctacggcatcatcgatcagtgtatagaaatattcaatacctgctgcatcgaatttctctttgtattctttatcaaagatctcctgaaagatatctttgaatgtatggtcgtatttctttgagattgtatccttggttgcaaaccagattgtctgcttgatatccagcgcatagttgaagcagcatcttgcaaagctttcgattgatttgttgatgttgtgctgtccctggatcacacccggtccgtcaaattcatggatcgtttctttgatcactgtaccatctgcacctgtaaataccagttcagccttaccggcacccggaaccttgatctctacgttcttatatacatcaccatatgcatgtcttgcgattgtaataggagccttccagttctttacacatggctcaatgccctttacgatgattggtgtacggaatacagttccgtcgaggattgcacggatcgttccatttggactcttccacatttctttcaggtcatactctgtcatacgtgcagcatttggtgtgatcgttgcacatttaacagctacgccatacttctgtgttgcatatgcggaatcaaatgttacctgatcatttgtctcatttctatattcaagtcccagatcgtaatactcggatttcagatcgataaatggatagatcagttcatccttgatcatcttccagagaatcctggtcatctcatctccatccatctctactaaaggggtagtcatttgaattttttccatcttgctcgttcctccatgttcttttattatagttctaattacttacctgtttttatacacgcctagaattatacatgaaaaatgttgctatttccagttttttgaaagttttttacacatatccgtaaattccgcgcacggacacttccccggatataatgatcgactcctgtccatcattatccttcacacgaagtcctccatttggtgcaagtccaagggctgtgtattctgtccggttatatccttcgatcacatagacctgttcatccttgttcacaaggatggaattatattcatccagcataaactgaagatcctgacatttgacaaatgcgtcatacagctcttcaaaatgatttgccacactggcgaccagtttgcttctgtcacagccggtttcgttttccagcttgatcgatgtcgccttatctgccagttcttccggaaattccatcatggatacattgatgccgatacctacaactgcatatttgatatccataccttccgaactcatctctgtaagaatgccacagatcttcttgccgccgactacaacatcattcggccatttgatctgtgcctgtaagcccgctgtatcggcaagagcacgcgccgttgcaagtgccgacaggatcgtaagtctggatacattctcgattggcacatccggacggagcagaaatgtcatggctatactggttcccttcggggtgctccatgcccttcctcttcttcctcgtcctgcattctgttcgtttgcaacaaacaacgctccgtgtgttccatctgtctctcctgcaagctttgcccgtatatttgtggaatccgtctcatcataataatacagttctcttccgatcaccgatgtcgtgagtgctgcctctatcttctctttcgtaacgatatccggctctccgaccagcagatatcctttattgttgactgcatcgataatgtagccttctgcctttaaggcattgatgtttttccagacagcggttcttgagacacctaatttctcacagatcgcctgaccggatatataatccgtgctttcccgaagcaatgcgaggattttttctttcatacatgttccttctttctgtcgcgttatcaactgtcacttttattttcttaccactggtgtttatctatcatcctttatcatttatatcctactcatctaattctctctgttctcctgatatattcccatcttctttaacagatgataatagatggtatcacatttctcacgttttccgctgaacggcagtacgaattgctcttttcctatatcgatcttcaatatgtaatatggcaaatgcggatccggaatgaccagattcacatttgtaatcttctcatatggtgtatgataagatttctttcccttttctatgatcagttcatcgtcttcaaaatgataggtcagatcaaatgccgattttcgaaatgatgatttcaccagcaccagtccgtatactccaagtgcaagaccaaatgccagcttaaaaatacgaccaccggtactgccatgggatttgatcatcaacaggataaatgctgctccgataacaacaaaaaatacaccaaccatccggtatgcaattctggttgctctgtttttctttacggtatgctgcatgtgttttcctcgttctttctgtatattttctgttctctattatattttctacagtcataaaaagcaagccagagtaaacatgacattttgtactaaaacccccgacaaaaaacatgatttttaccagattgatttttcttataaaaagaagtaatatccagtatgcgctgaaaataaacaaggaggtaaaatcattgaaaaacttactgaaaaaaattaacggttccaaggatctgactgaaggcaatcctatgaaactgatcttgaactttggactgccattattatttgggcttttattccagcaattttataacatggtcgatacaatcatcgttggtaaatttctgggtgtcgatgcacttgcagccgtcggctcaaccggatcgatcaactttatgatactcggtttctgcatcggtatctgcaatggttttgccatcccggttgctcaagcctttggagcaaaagacactgataatatgaaaaagtacattacaaactgtgtctgggcttcgatcttcttcgctgccgttatgacagttgcagtcggaattcttaccagaaatattctgatctggatgaagacaccggacagcatcctggatcaggcatttatctacatatttattatatttatgggaatacctgcaaccttcctttataatatggtttccggtatcctgcgttctctcggcgacagtgtaacccctgttgtctgtctgatcgcatcctccctgttaaatatcgtactggatatcctgttagttcgtccgatgggtgtcgccggtgctgctgttgcaaccgttgttgcacaggcaatctccggtgtcggctgtctgatctatatgtgtaagaagctcggatatcttcattttacaaaacaggactgggcatttagtatgcgccactgtctgaccttatgcggtatgggtgttccgatggggcttcagtactcgattacagcgattggcagtgttattcttcaggctgcagttaattcgatgggtgaatccgttattgctgccgtatccgccggaacaaagatttccatgttcctctgctgtccgtttgatgccatgggatcgacaatggcaacctacggtggacaaaatgtcggtgctaagaaaatggatcgtgtggatgccggcttaaaggcatgtatcaaactcggtattgcctatgcgattcttgcatttgtatttatcctgttattcggcaagaatctggcactgctcttcctggatgcagaagagacagagatcatcaagcttgtatattatttcctgcttggc

SEQ ID NO: 409 - DNA, 34352 bp, unidentified
  source 1..34352: mol_type = unassigned DNA
aaatctgattgtgttccgttggcacgcttgacaagtccttctgtcgtcaggcagtaaagtcggtctgcttccggatggaaattatcgaaatgtgtctcccaccatagccagtaacctcctaaaatgaaggcagtaaatcctacggccagaccaatgatgctgacaattgattgagttcggtatttcagtagttcccgaaaagaaactttgacatagtgtgataacataatctgattgtttgttataagatattgttcaaagacattcttattccgacttgatcacttctgccgggttctggttcgctgccttctgtatgcgccaaccggtacaaagagtcagcagcaggaccagtacaccccagatgaccggataaagccaccaactgattgctgcttgcaacacatagttttcaatccatgatttcatgatcaggtaactggccggaaatgctataaccgaagcgatgcatagcaggcggagattaccggcaaaaaacattctcatgatatcggaggcttctgccccgtttactttacggacagcgatttctttcttcttctgttcgcagtccagagttacttgagagaatacgccgaacaatgagatcaaaatacagactatagtcacgaagtcaagcatcttgagtagcgccttttccgatttcagaaacttttcatactcttcttccataaaagtaacatgtatgtcgacggcgttcggttgcattttctttgccaactgttcaacctgttgtttgcacagttcgcggcttcccggctgatgccggaatatggcagtcgttgaataatcattctgtatattcttttttcccggactgaactcgagcataaccggctttaccggaacggtaggaggtgcgatataaaagtctttgaaaatgccgtcgatgataaatcctttctgatctttgcggctaagtgttttgccaatcgggttgtcgatcttcaattcctttacagctgcttcgtttaggagtatgtgccgttcggtatctccttccggcaacttgccttttagcaattgcagaccataaaattcaaagtagcgattgttgcatgggattatttggatcgtaagaccttccacagaggccggcttgccttcccaatcggtaaaggacctgtaggaacgtgaatggcttggaaatagtggatcgttttcatccggatatacttcggcgatggaggagagtttggcaatttcttctttcaaaccgtctgtttggggatatatacggacatcgccccggtctttccggtttagtccgatatcggtggtgtgcaagtgatggatttgcttgatcagtaccgacgaacagaatatgaatccgatgctgattatcaattgcaaggtaaggcttgctttggggaagaggttctttccttttccgtcagacgaacctttaagggccttttgtagcgaacgcttcctgaaatagtagatagggaataaagagaacaggaaagccagtaaggtgatgaatccgaaatagacgaatgtttccagatagagactgaacgaatccgtttttacattcgataattcttggaatacaggcagtatgatttcgatcaaggctattccggctaaaagagagatggaaagcgtaagcaggtattcggaagcgaacaggacaaacagattgccgtcagacgagccgcacactttccgaagcccgatctctttactgcgtattcgtatacggtttacgaatagggtcagatagttgaatagtgcgcacaggattaccaatcctccggcaagagcgaatagcaagatatgttcgaacttgatagttggctcttcttcggggtggtcataccgcatggcggtgattgacgtcagaacgaaatgactcagcgagtctctgtctttctttattttatgttcgtaaagtttctttttaaaagctctcatatccgtttccggacggacctttataaaagtctgacaataggctacgttccattcctccgtttgtcgggacggcttcagtattccgaacgggaaattcgagtgctggtcctgacttttgactatggcacatatttccatatcgtcagaccaaattttcagtttttcacctaatgggtcctttgtgccgaagacctctttggcaagcttgtccgtgatcgcgatcttgttacttttcgggatcataaaatcccggctaccggagatcagttctatttcgaacatatgttcggcagctgaatccatgaccatgtcgaaagattcgtatttcttctcgttgtagaggaaatcggttttccaggcactcgtgttgcaactttcctctatctccgggaatgtctctttcaaatatcgggccagcgggtaaggtgtaacgcttgataatccttggtcatcggtttccgattccatccggacgtaatagatccggtctgcgtctttcctaaacgtatcgtaggtcagttcatatcgtatccagagcgacgataacgcgaaacttgtaaatccgattgcgagcccgacgatacagatgaatgattgcaatttatatttcaagagattacggaaagctattttgatgtaatggtgtagcatggttcaatgatttagtttgttattattccgatttgatcacttccgcaggattggtccgggcagcctgtatcgtctgatagaggacggttccgatgatcagagtgatggtggcaaatacgattacgatatacatccaggcagagatatggctccgataggcatattgctgcaaccaactttgcatgaacaaccacgcgagtggcaatgcaagaaggttggctatcaatgcaattgtcagatattccataaaaaacattttgacaatcgtgccggcagaggctcccatcactttccgtatggcaatttctttccttcgttgttccatattgctggatgaaatggaataaagcccgaagatggagattagcgtacagaacagagccagcaaagtaaagagctgcaggctggcatcttcggaagtgctgagccgatcaagtatctggcttatggtctgtacattgcaggtagtgggatcgcctgacttagagtgttttttgaatatattccggattgctttgatcgtggctttttcttttccgggttcggtacgggcataataaaaataactgttccatttgctttggtcgattacgatcacttgtggcaggatcgggttgcgcaaactggccgcttggaagttttggatgatcccgacgatctccatttcggcacgtcctctgcttccgtcttgcatgatcgtataattccaaatactgattttcttgccgatcgggttatcgatgcccatgatgcgagcagcttcttcattgatgacggcttttgtccaagaagctcgccaatctccattgtctgccagatcgccgtcattgatgaaacggcctttcagcatcggtatgttaaaaacttccgagaagttgctgcctacttgcaggacttggaagtttggattgaaatccagaggcttaccttcccattcgacttcgttttgtgtataaggttcatgggtgatggtaaatattccggcttgtgtgaatccttttaggactgctaatgaagaaatctcgcgactgattccttcccggtcgttgaatgtcatttccatctgtatcagaccctctttctggaatcccaagtttttatgtttcatgaaagatatttgcctgaacatgataaatgtgctcatcaggaagaatatgcagatacatagttggagtgtcatgctgattttgcggaaaccgcttttccgggtaggagagattcctccggatattaatagagaagaagcgcgtacaaaatgcaagaataacggtagactgacaatcatgagtgtcagccagctaatgcctgctatgatacaaagatggctgaataataactttcgctgtaatgtcgtatcgaagaggtgtgagaaaccgccagcggttaattccaacaggcaggaagccaatagaaaactgatcccgacaagcaatgtcaattccagcaacaactggataaccaagttctttttatcagcgccgatcgcatttctcaatttcatttctttgttccgtaagtagatacgattcaacagcagattggtgaaattaaagaaaacgcagagtaacaataagaggccggttaccgtgaatgtccggatgtaggaaagattaaatgtcaattcacttccgaatgtatgacggacatctgtcaggggaaccaactttaacaaaattgatttattatattcatgttcgactatataagaattgatcttcttctcaaaagcttttatattaatgttgggtgctaataatagatagattttagtgtttagcaaggcccattgtttttcgtccgtgatccggttttcccggtcacggtcgaatttgtccagttcataaacatcggcttgcatcatggagttgttgggcgaatcttccaggacggacacgatcgtaatgcttttgcgatatccgttttcaagggttttgcctaatgcttcctccggtgttttgaaatatttcacggcaaaagagcgggtgacggctatctcatccagcgttttcaggatatcatcccttttaccgcaaattacgggacgtggaaagaatttgaaatactgttcgtcaatgaattcctcgtccggatcctctaaccttgtttctccatatttgaaagtcgagccgtatttggaataaatctgcgttgtctctattacttccgggaaatcttttttcagtttgcgtgccagaataagtggtaattcctccgatttctttcccgtttgtttatcgattccgtatattcggtaaatttgtccggattgtgggtagaacccgtcgtagttcgtttcatacctgtaccagttccatccgtatgtaaaacagatcagcccgattgccaaaccgacaatactgatagcagattgtactttaaattcttatctaattgatgtcttgatttgaaagacaaacgcttatgaaagttttgaaaagtctaaggtaacgatttggagattgtgctaatttcagtattttacaacctcatacttataaggaactcttctatggacaaagatacacattttttagattagggaaaaaatttgaaggaaaaaataaaaaaaagtttgggaaaggattggaaaaattcaagagagaggttgaggaattaagtgtatgtgtatggggggaattgtataatcaatttgcagttaccgaaaaaggcatattcagaattcctgtatattgcttctactagtgattgcagaaccgacaattatatttaaaattacccaaatcaagtattccgagtggggcataaagattatttaaattgtaaccatacccctatatattcaaactggtttcattcaaaggaaagtcaaaagatgttcataataatgctccttacattattatgacagacaagagtcatgacattggtaataaccgtcttttgtaaatcgtcatttatatgcagtgacaatttcatttccatgtctacgaaatttggtaataacatcttttaaaagtgtctagaattcctatcagttatgtacatatctgaattctgattttatgcgtatttattcataaaattagactctatatctgcttacacaggttatcactatactatttcctgcaaataacatttgggaatatatttcgtaacccaatggtttcaaagatgtttcctgtcagctcagagggaaaccgatccgctccaattgtactattcgctcatctgacatgtttcccttgcggtaatcccgtctttggatggtacaccaacgtcccaatgctccttcacggcatcccggccatcgtccttgttggttatgaaacaagcacaattgttcgaagttaccttgccagacctgttccgccgaccaaacaaatcctattttatccaacaaaattcggcgatcactggataattttcccaatttgtgcatttttcgctgtgtatgacaccatccgcccaagttcccttctgtcgatttaggaaaacgataaaattttccaataaaagacttcagctcctcgtagttcttcatccattccccttggaggtcctggttccagataaaactgatcttatccaaagcccggatccgctctttgctcaagcgtccattcttccgcctttcccgttgggtataacaccaagttgcaagcgaaccgtcttcccgtttaggccagcgtccgcaggtatcaaagaagactttcaacgcatggtattctctcatccatttggagtcgagctggttccattcaaaaccgatcaattctagctgacggcggcgttcctcctgcaattttccccgtttataggcaatgcgttgggtgttgcaccacaaaccgagttttccttccgtaactgacggccagtcgttttcttcccgacggaattcaatcagcctctcatacataatctgccagggctccagttctgccaatatctcctctatgcgcagccgtatgtccgatagaaaacctgtcgtcagaaaagaggtgttcccttcgaatcctttgggtgatggaaggagagatagacgctccaagtggggagccatcacgtcatagaccgatttccctgaaagattgttgacaaaatccaagacgaccggctgttttcctgccccggcatccaggcaacggcccaattgttgcaaagtaacgatgtatgattccgtccgcctaaggaacaagacagcatccacaccctccacatgcagtccttctatcagcatattgacggagaacaatacgtgcagctggtctgattcttctcggaaagcatccagtatccggccgttctgccgttcaccttgggcatgatgaatctcgaacggagtaatggcacgtcccgctcgcgtgagccatccgcatacttccggcaccatctgcttcaaatcggtgagatcgcgacagaataccagcagcttgcgtacgcttgtcggcaggaacttccggatgacttccgatacccccaaagcctctttgaaatccacacgtgccagatccagtttcttctgtaccttttcttttcgtccttttgaacaaccgctgcgttccagctttctttgcagccggtccagttcgttgtccagcccgtaagcactctgtaccagaaccggaaccggtaagatattgtaataccaagcctgcggcaaggtaagttcataaaacaaatttccttcgaaataaagatccaccgtatcgatcattccctccggacggatcggcgttgccgacgttcccaggacataggcacagggattattttctatcacttcctgcaaggcacttccccaaatttccgccccgaaatggtggaattcatcaataagaatatgatctgcccgtaacaacccattgtcctcccggttacggatcagtgactggaatgtccggtacgtcacttgcggaatagaaaatccgacggctttccggatctcatccagaatcgtgatgttcggagcaaagaccaatatcttttcctttgcatgatctgcgatatagcgtgccagcaaataggatttccctgttccggtagcctgcacgatcgcaccgatacggtgttgtttgaatccccgcatgatcgccctgtaagccgcttcgttatgcggataaagctccacatgtcttccggacaagaggctttcaatatagctttcatccgaaatggtcagcccatgcagttcaaagtccaatgcttccggcaggaatccgccgtgtgccacgatcctgaaatatagatttcgataccctttacttagtgtagagaacttctcgtagaacaattcagcatccgagcgagtcaaaggacgttcgtttcggacctccttcacgatggcatgtaccattcccggcttgaagcctatccgtagtccctcttcggattctgttacctggaagcctagacggagatagcaatctgttaaagacggtaccatcctatttacttacaagtcaaaaagttcatttgattattgtcctttgctgtttaaagagggctatcatatcacccattgtcagtcgaccggtaatatcttcagttataatccggttcaaaagccgaagatcctcctcaatttggacacggaaacgacaggactcaggataattatcccggactgtccttgcagtttcatcccaggaagaagctgacaagtgaagacgggaagaaaactccatacgccgattgtgccctttgtagatacggtaataaattgtaccacgctcgggatttttcttattaggttcaaaacggacaacaacagtaggcatccttgttacttttacagctgatttatatagaggagtttcccttataatcaaaacttgggtagggtggttttttcttaaaaacgctcaccaatctgagtattttcccagcattatttatatccgcactggaaaaatggataaattcactcatactagtatatgctacccagaaataggagaaagtccaaacaataaaagttcccaaaagaaacacccatacgcaggaattttttcatttaccattccccttttcttcacactaaaatctagaatcatattgcagacggttgcggtcaaaatgcttctcatgcccgttctcttccgaagttagtggtgacaacatatagtaatccttgaatgttatacacccgtttgaaattagaaaccggacgaatctgcatcttcctcgttttccgcttataaagcagaattatcatctccttaaaaaaacattaatagtctgattttcaggtttaatctcatatctttttatattctgtacagtaatgcgttcacaatacgtccacaagcaagcccgtctccataagggttcactgccttgctcattttttcataggcgactttatcgtcaatcaaaacagatacttcatttactattctgttataatccgtacctaccagttttaccgttcctgcatccaatgcttccggacgttccgttgtgtcgcgcatcaccaataccggcttacccagtcccggagcttcctcttgtatgccaccgctatcggttaatactatagtggatttttccattaaatagacaaaactcagatattctaaaggttcaatgaagaacatgttcccaaaatcggataattcctctccaaatacgtcatgtatcggtttgcgcacatttggattcaagtgcatcggataaacgaagtccacctccgggtatttttttgtcaagtctttgatagctgtacacatatggatgaatccgtcaccgaagttttcacgacgatgtcccgtaatcagcaccagcttcttaccaccattcaaacggctcacgtcatatccggcttttgccagtatccctaccaattcacaatccaacgccttgtcgctcttaattttatccactacccaataaagcgcgtcaattaccgtattcccggtcacgatgacattccgatcgtcaataccttcccgtatcagattgctacgactcagtggcgtaggcgagaaatggtaggtcgccagtcgtccggtcaaaagtcgattcatctcctccggccatgggctatagatgttatgtgtacgtaatcctgcctctatgtgtgctaccggaatctgttggtagaaggccgacagagcagcggcagtagaagtggtcgtgtcaccgtgcaccagcactacatccggccttgcctctttcagtacatcacgcatacctgtcaatacacgggacgtcacgtcatataagtcttgtccctgcttcataatgttcaagtcataatctggacaaatatcgaatatatccaatacctggtccagcatttcccggtgttgtccggtcacacatactacagtttccacccgttctggctgtttctggaattctttcaccagcggagccatcttgattgcctccggacgggtgccgaagaccaacattactttcttcattgaattatatttttacatcagattgattttataaaatcgtaacagcgatatatctgtttgttaaaatcgaattcattttttgccatatccaggcagttcttcgatattgtgctgtattcttcgtcaggaaggttaatcaactcaataatattattgtgtaattgtttgaaatcatgtggctttgaaaccattcccaaataatatttcgatacgatctcagccccttctccacctccacaaaacagtataggtatgccaataggtatgagatcatatattttggatggcactgctcctttgattgctacggtaagtggaacaattgacgcatcgtatcttgacaactcttcggcaatttgttctttttttacatatccatgataatacacgaaacaaccgggatgtttatttatatattcttttatcttttctgcctgatttccaccaccatacaagtgaaactcagcgccaatagactgaaacggaatattctcgataattgaatatatatcttgtgccacacctaataatccggcatatacaatgcgaaagggcttgtgcttccttttgggttgagcagcaaccgcatattgctgcaaattacggtatacaaacttgttttttgtcgaaggaaattgattcacatgccggattatctcttcagactgaccgaaaataccgtctgcattgcgataaatataacgttcaatccacgcgaaaatatcatatatcttcccaccttcacgcattgctccaagctcaacagcagaaagtggccataaatcggatatgttcacaagagtcttgcgcccgaatatttttttgaaaagcgtgatggccgaaccagccactggtagtggagggctttggatgatcaccctatcgtaaccctggatcttctttatcttaaaaacaaacaaccataacatggtcgcaaatgacatcatacttaccgctcgcttaaaaggattcttggacacggttgcataagtccaatatctatacacgtttatgccattaatcttttctttttttgacaaacggcctctataaccctcgaatatttgtccttgagggtaattcggcaaacaagttaacacatccacttccgctccctgacttttcagcccttcagccatattggttatacgggaaggagcagccccaagctcgggagaatagtagaacgacacaattaaaatcttcatattttatgcctgaaatatttgatacgttaaatttctgcaaaatactatttttatcgtcttagaaggttctaggcgattgtattctactgatacaaaatcgtttataatttctatggaatttgcaccggatacagcgatattagccctgttggttcttatttcagttgacgatatggcaagaacctcaatatcgggtgcgaaatgaatatagctgatacattctgtcatattattgccgacaatcttatcatttattgtaaatacatcatcgttaatagtgaatttccgttgatgtatacatcctttaaaaccatcgtgctctgccataatttcattttcggtatcggatagtactcttactttagctcttttacccatacggaaacctccccacacctcgctagaatccttgttgccgacagttacggtgttatgagctgacgtacttcgttcgtactgccttcttgcagtcttgttgtaggtagaaatacctgtatcaacaacaaacggtctgcaatcaattcgcaattcataattaaacgtatcggcatgactatgccccggctgataggtcgcagtaatattacccacatccacaactgcctctaaatgtgttgaacaaagcttcctatagccacattctttcataggcaaaggggtccattccaacttcaatcttttggcgtatgctctcaattcggaaactgtcggtgctatcccatatgccgaatcattaagtaagggaatcgtatcgtctttccacacgatgctctccaaatgccccaacatccttaccacatacagtttcaaaagctcacacattttctcatgacctctattaatcgaggcattatagcaatccaataacctatcgagcaaaatgcagtgatacatcggtgattgctcgtaatgtgagccatcaggcaaaatctgttcatcaagctctttatacaacagacaggatgccttgtcatacatttttttatcggaaaaataaattgaagcgataaacaaagcgtaagcatcttctaaaagatggttgccaagcagttggtattccagtttccgttcgagcaatttacattgcgcataaagggaatcgttccaccgttgcaaccgattgctctccacttttttatgatgcctgccgataaacttgatccagttgatgcttcgcagtgcgataggataaggatcaagaccgatcctgtttgttggcaaatcagttataaaccgttcaacccattctgaaccttgttcaaaagtcatgtcaggttgcaacaaccaatccatataattcagattgtatgcccaaagcatcccatgactaacatcattccatgacttaaaatcccctataagatttaggaatgtaaatgtcttgggtacattgtaacaataccactttgcgataactgagaccatccgcaatgaagattgccggggaacattatattccatcaacttatgagaaaatagtctataatataattgataatagatttgttttaaccgaagatgtttaattgtattgacaataagaatattattagccatttgatttagtgcattataatttcaagtatgcgtttattcgtcttatcagattcaaactcttcttcaaatttcttcaaggcattctctgaatattgagaatagtttgttgcgttaatcgataagatagcttgttttatcgcatctacatcaccgggaattactaaacgaccattgtaaccgtcttctacgatttcaggtattccacctgcataggttgatacgcaaggaatgcctacagacatagcttcgatgataatgcccgggtagccctcgcgataagaaggtaatagcagtaaatcatattctattaaagtttttaaaacctgttcggaagagacaactccatggtatgttattccgctttcgttgaagttgatattgcgatatttatcctcttttatctcaccatatatatcaagggtataattcgaaggtaacagtttggataccgctataagatcttctatccctttttctttgttgatatgcgacatgaaaacacatctgccatgaaagtctgaggggttctttcgtattgttgaagctttacgcacattagggaaccaatgtatattgtcactctttcctattaactgttgtaggtgcgtaataccctgttgggtttcaaagaatatcaagtctgtttgtctgatagcatcaagtgcccgttgtaattgggtttgaccaattttctttatgtagaactcaaatgaacctccgaatttacgtagtacgacttttttgtgtgccaaacgagctattttgctcaataatgggaaataataaattgtaccatgatcagaaaaattgaacattacaatatcgcacccaaacagtctccacaaaaatgccgggaaaaagtatgaataattgcgccacatactacgctggcgagtgcgaagatttgaataccggttgttttgtacaaacctatattcatattcagactgagaggctagatagtcaagatagtttttcatcaacaccgtcgcacctccataattcaataagttgctctcatcgggaattgagcctacaacgagtaattttttccgtttcattacgctttaaatttagattacataatgaaactaagcggctgatcgcccgtttatgtatgaaattttaccccccccgtatggtatctgaactatttcagaaattttacttttcaacatatgttcttccttttttactatttcaagtattgtattcgtatggatttgcttgttttgaattaacgtttgtacattttgctctatatcctcagctgtgggtctgtcttcccagaatttatacggcatattaaaacagctcatcattcccgggtttttaagtccccattgcttgtaaaacaagcccaagcaaggtgtcccgaccgatagtgcaaggataatggaatgtaaacgcatacctaagagtaaatccacatttctgtatacttctatcagttcaagcacattatgggattttatcaactttactccatgctttattgcaaacgcttgtgacgtttcataatctttctctgtctgtacaaccactattacattatgcgttacccccagtttatctactactttaccgagttcgtcaagacaatatgctatctcactattaggaagatgagtgatatcacccaccgtatgaaaacgtaatgttatagcaatattcggtttatcacaattaatagagagtatagactttgcttgttgcttgttgataaaaaacgccaagtcgatagtctgaaagaaattgccagctggcataaagtgttcgagattcttatatgaaagtttctctctaaacatcacaacctgcgccttacgtagtatgggaaataataataatttacctatcttattgagagtagatgctgattgcggaaatatgattacttttttaccattcttctgtgcgacctgtaatggatacatcaatgccaataagcgagtaaaatcaataatagaattacacctgaacaaatttccaccattaaaaataatcatgtcgctatcaagtgattgtcggcgaaaccctcttttacgtattattcccattatggtaaaaagaccttccgtatagtttttcagtgtttttatcatgctatcggttctgtcaagcgtaaaaggagattcaaaaacctctatgtgattgccataacgttggttaagagtttctaaagcttggtgataatccaaattacttcgggagtatcgagaaaaaagttttacttttattccaaacgagagtagcacgtctatcgctccaagtgttatagcaaaatcaccggcattacgtgctgaataaccatatacaagactaacagttttaacaggattcatatatatcatgatattttgctgcgactttacgtggattatatatttcttcataagtagcaagagcttgtttacctattgatttgcggagaacttcattctgatatatttcttccattcgatcagccattccctccaaatccgctaatgaattggtatacccgtttcgtccatcatctatcaaatccaccatttgagggatatctgaggagaataacaccttacccaatgcaaatgtctctaccataagatttggcaacgcttcgctgtatgtagtaaaggttgtagtagtacaagctgcattgtatagggtgggattgttgacatatccttcaaaatgtatacgatttcttactccttctgccttagccaactggtcaagccgctcataatatgattgttcatagccacctacgagaatacaccctaatttaactcctctgcgatttaaaatccccactaatcgaatcgtatcctcaatgtttttgcttggaacaatacgtccgacaaagcaagtaagcaaatttgtaccaacctttgtttccaattcttttcttttggctactgtttcattctcactatgtttatccacaaaaatcacattagggactatgatatgtttcattggacgaaatcccacattttcaaagtaatgttttttttgataccgggtaagaaaagtagtaaaatcaacatgctttgcaatatacggtgtaatcacttttagcatggatctaaaacgcatattcattgttacacgatgtacagtacagataattttgaagttaagaccatagaactgtctttgcatcaccaacactaaagctgagtaaagtcctaaacaatgtactacatcaggatgatatgactttaagaattgttttagcgctttccaataagccatactcattgggttcaaggtgtccacttcgatgagctcaacgtctttatcttttattgtaccgcgatttactccaaacaccatggcatcttcttcataatattgtttcattgcctttacaagatttatggcggctctgacaccaccacctatcaccttgcgtggctctactatatatgctattttcatttctttattcctttctcgaaaagttttacatagttgcgagcacattcgtacatactgaatggaccataagtggcaagagctttttgcttcatgtctttaagctgtacatcggtgagggatagaaatctctttaccgttttgtaataagattcttcaccgataccgtcactcagaaaaccgttttcaccgttgtgtaccacatctactataccgcccacaggtgtgcataccggtatacagccaacaccaatagcctctatcaacgaaataggcatcccctcatacgaggaacaaagtgcataagcatctcccattttaagatattcaagcggattgtgcagttctccaagtaattgtattgcttcatcgttgtacgaacgcaattccgcggtcatctgtgcatcacgttcacctccgataaacaatacagtgaggtcgtatccttcccgttttaaccgcattaccacacgtgccaagagagtttgtcgtttcacagggtcgatacgtgcgagacttatcagtactcgcgtcttatttgtatgtctatactgtttaaattgttccttgacctcgtctgaaacaagcataccagcatccacattgcgcccattgaaaatcataggagcatccattccataatattttcggaagctatgtaatgattcggcggaaatggtgatgggtgtaatccacccacgatgaaaacagaacttccgcattccgctgctgataaagaagccggaggcttctttatcagcagcggaatgtactgtatgacagtacataacgccattctttcgcatgattgcgaaagcaatatacataatagcacgcaaatgcgtgtgcaccacatcaggcttttctctatggatatatctatatactctaaataacaaaccgatgtcaagtcccatccgtttgttcatcgataccacccttacattattcgatacctctttcaaatagaaatccaccttgtcaagtgagtgcaaaaccatcaatgtcacatcatgttctttcgacagctcattgcacaagtcaaccacaaaccgctctccgccgccactgctaagttgaggaattatttctaagattttcattcagattgttttttaatttttttattgtgatcctaatacgtgtaaactaacgaaacatgtcagaaaaagacgtacccttcccataccaacctcttatagaaggcatagaaaagtttataacagataggaaggattgccaaaagcatcaagattcttttctcgcgtgtcatcttgaaattagaataataataccccacaacaatacaaagaggaaaatagctcatcattatgaaacgtataaagagccataccgaagtttcttggaagaaaaacagactggcaatataagttattgcataccaatagatgaacaatgcctttatataccgtggaacatcaatttcttcaaaaactatcttcttagtcataagagccaaagatgcgtataccggcatataggttatcatttggttcagtttaccaaaaatattcgactgccgcattgtgccgctcgcatatcccgtcatcgagctccctatattcatgtctgctatatcaaaaccgatgagtccgttcataataatataatccagcagtaaagtagtcacaacggtcaggaaagggaatatgacaagactgatttttaccgttttcctattcagataaaaaggtgttaccgaaagtgcagcaatcgaaaacaacatacttttgtgaaagaagaatgaacagaaaatcaacaaacaaccgaataggaatgacaataacctattatgagagggcctgataatgaatgaaaagccaaaaaacagtatggcaattcccaaatttccgcgcattactgaaataatgttgatataaaacagcacaaatatcagcaatcctatcctcacatcaagtttgagccgttttattgtccataacgacaaaatcaccgttccgctccacactataaaccgccataccagatagtttgaagtgacattccgtatcaaccaatagtaaacgggttcaagatgcacgtttaatccggttgaacagatacgtttgaaaagcccctcatagtgatagaaatcgttgtccgcatagccgaaagtgcaaaacagtatcagcaggacaccgtatactgcataatccaagatgtctgtatatcgttttctaaattcacagccatatctatacacattcggaaacggatacagcataagaaaaaacagaagtatattgaacagtaccggaactgcctcgtaatgatatttcatcgttgtaatttattaggtaaataaaataggacacattcatactaacacaggaatttggtgtatttgcatccggctataatcacacttgatacatagcagacgacgaaagtgcccacgaaggcgaccaacggagttaactctttggtatacaaaaataccccccccccattctataatagataagtctcagaactatttcttgcatcacatatattcccatcgaattcattgcgatacttcggcatacagtgtatagttttccattgcatctgtcttccagttttataaatacagcgacatagataattgtgactaatccatagcttaccattttaagagtatggtggacaaacaggattaaaacttttactttcaagtccgatgccagttccggacgcatcccgtccattcccaaaaccaatgttaccgcaaagaataaccccatataaacagccgataaaatgcatattgttgaccaattgacagttctcagccgctcacgatttctaaagaaaattccaccaagatggaaaaaaagcagataataaagcgattgattaaaacggaacggaattcccggccaaggcagaatagcaataatcatgagtactaacatcaagttacgtcccttgagacagtgctgtatgccatattccattaaaaagcaccaaaagagcatcggaagaaaccaaagatgtccgtatcccccaataattttccaaaaatgttccagattaagaagttttgacggaccaaagaatatcaatgtcatgataatgccccaacacatacacggcacaaacagccgtttcagcttaccggctagtaataatcggaaagaaatgactttcttttggagcgaaaaggcgaatacatacccggaaatcaggacaaaagtctccagcatcccactgtatgccagttttcctccccagtaaaatccttcattgggttgggcataggaaggcatatcccaaccaccgcaatagggcgcaagagcatgatagagcacgagcagaatgattacgaacgtcctgataatatctatttccttaagtctttccatatatttttaatgtatttgaatatgggatatacaccaagcaaagaaccgaaatactcgattttactgagagtacgcatcctgctgtgacgaatgactgtaatactgttgatttccggatatgtattgtgccaaatccgacggattcgcggcatcagcatatatctgtcaagatacattcttgaaccaactttcagcgcatttatctcgtctgtatacttttcataaatacctttggagcgaagaaaggtgaaaatcagatcaagattctccttacgctgattgagtttattaatctggatctcagcactgccataacttgtaattgacgcaggattaaaaaaatagtaataaaatggtttcatcaagtatcctacattccggctattccaaaccaattggattatcgtcgccagatcctcgttcatattttgccttggaaatgttatcccatcgtaaagactacgtttgatcaaagcaccacacaagctccccatcaaccgcccgcaaagcaatgatgacatcaggaagtctttattattggtagaaaccttgcgcggggcggaagcatatgtagaaacaccatcgctacgatagaaatcataaaagaccatatcgtaatggccggatagggcaaaagtatatagttcctttatggcatgcacatccatccagtcatcgctatcgcaatgaaccgtgtaatcaccagaggccaattgaatcccttgtcgtcgaacagcgggcaggccgctgttcgacgacaacctctcaattcgtgtcagcctctttcgatgcggatatttttccagagttctctgcaagatctccaccgacttgtctggagaacaatcatccacaaagatatattcaatgtcatcaaacgtttgggcgaacaacgattcagcgcaccgctcaatatattcctctactctataaatcggtacaatgattgatactttcggattatccatgatttttagctgtcagtttttttaattgttctattccaagggcaattaaataactcaatgttatgaagataacaaaagtgattaagtttgaaattacccccccccagttttgtgtcataaaagctattgtttgttctgataaaatccctgaacaaccacagaaaaggagcgtgtatagccattatcgtgagtgaattagctcccaaagaagccaatattctgtttggagttgttatcttgttgaaaggcttgaaattcaacaaaagatatatggcgcagaaagctccggcatagaatataaacgggaaactggaaaatttcagttgcgaaatatcaaattgataatgtgccaaacggcagaacgctatggctatgatatatccggctatagcaataacggttgcttttttaattgccccctctgcttgtgtcagccctttgtcgttcatccatttgccgacagcatagaatggcaaagagaacagcccctgcccgatataaaacggcaaattgatcttggaatatgcgacagccagcccaattacaaaagaaacgataagaataacgttttgtttcttaacggttttgtccaaaaaataatatatgacacatatataaaaaagagcgaccaagaaccacaacggaccatcaaatgcggcgatatgatggatgctcagtttatcaagcggtattccctgcaaccccatgctaaaataaaatacagcgaatatcagagaatattccccaaagggaataagcaaccgttttgctcttgattgaataaatccttgtttgggatgataaaacataccggccaaaaagaaaaacaaaggcatatggaaaatgcaaatttcctttataaggattgcggtggcatgtccccaaacgacaaggattatgccgatgcctttaagtatgtctatacgaatgtccctttccattatttcaaaagtttaagttcctcttcctttcttttgcaagaaatacatccgcagcactataatctgcccaaagaacttctttgtatttttcctctttatctgtttcactgatagtacgtttctgcaaaccgatattatcgagaaaagtaatcatgcagttgtccttatctccattgacagcaaagaacggcatatgaaaaaacgaacgcatgaaacgaaccgctggtaacaaacattgcaatttgaccaaattaaggaattccaaaagccccgtaacaagctgctgtttaaaaggatacaaaccgcaacggagtgtattgtatactgttgccaccacttttattccctacattttattgtttttttaagaacatgaatttatttgttaccgtactgattacgaaccctctttctttagcatcaagcccgaatttatagataacaagtccggaaatgataagactggtcaatacgacaagtatatggctaccccagcttgaagttagaaatttatgcaaaaagaatgggaccggaatgatgcagaccgacacccaaagacacctaaacatcacttccacgacatacctcctaaccgggaaattcactttgtgtttgagatagaatattctgtaacagtgagtaatgaaattgatggcaattctgacaatcaccgcatagacgggactgcaaccgaacttgaacaatacatatataatcggaatattcataattatcatcgaagaaacggtaaactgatacttggctatattgcctattgtttcagatgacacccaaagacttccggataatgcatcaataagcaggaagatgagataaagctgaatgaactgtactgtatattgagggacacagacaagccataactcgacgacaggccgacaaatcaaaatcaacggataagcgacgaaaaagagcaggaaatacgacaattttgacgagcggaaaacaagttccagaaatctggatttatcccctgaaaaataggactggacaatctgtggctgcaccgctttctgaaagtttgtaaccaaagtattgacagcactgaacacttgcgaggctacccccattgccgcattgacagcaaccgtgaaaaaaatattcaaaagtattgatatgccttgtatggatgcgacatgggctataccgccgaaaaggctccatgaagaaaagaaaagcatttctttcagcagctttatgtcaaaatagaaccggaatctgcaagtcgtgaaattacgcttgcaataaatggcataaatgatattcaacaatatcccaacggtcataagggcaacggcgtacaacaccagacgattgtcttcagcccaaaaaaggagaaatactgttcccaattttgccattacctcaatgatgctgacataagcgaaaaaagacatcctctcatatgcaataatgctcgactcatcaggaatcctgataaaatgaagacaagcggtcactacagaaatatggtacacaatccgtgctgcatcttgtgtttccggaggaatattcaattttgtttcaaagaaatagagccccactgtttccaatacgaagccgataaataccgctattgcaaaatgtatcagaagactcatggaataaaccctcgagactctgtcatgattgccttttcccaattccacgttcagaaaacgttgggtggcctttgtcattgcggaattaataaaagacagaagtgcgataaagccgccaacaacattgtatactccaaaatcgttctcacccaacacttccaatataatcctggaagtatatagagatacgggcatcattacgaatgtccgtatataaagcattaacgtgttgcgtgctatgcgtttgtttgatgactgcatttatatatcctacattttttaatctcaattgcaacctgaatgacaatagagtgtcagcggcaaatcaattggtctgatggtatatcgaagctaacttttccacaccgtctgcaagcgtgaaccgactggatattacttttgattttctacccatcatttctcggacttcacgattattgacaagtatctcaatcctgtcagcaagctcttcaacattctctttttcaaaaagatatccgttttctccctcatgtacgatttcaggaatgcccccaactcgtgtaccaataacaggcaacgaatagtttagggcctccataatactaagagaaagtccttctgtacgggaaggctgcaagtaaatatcagaaatattcaaaatatcattaatgtcatttcgtattcccaaagacataatctttctattcaatccggcctcggcaatcaattgcctcaagctattactgtcttcagaattttcgctaattccgatgacaagcactattatatcgtttttaagtctgttggagtccatcagactctgaatacttttgacaagtatatcgaatcccttgatacgaatattgaatccgattgtagtcaacacgactaccccctttggtatgtccaatgtttttttcagatttgggttgacaatcttttttttccggactcccaagtataggacttcactctttgaagaaaaacctacgccttcaatcatttctttctttacgccacaactgacacaaaggaatctttcaaaaggaaaaaaacagaacttcagatataattttttaagtttgttggaaacaaagatttcactatggcgggttgaaataatccgaatccggggaaacagaattcgcaagaatggtgcaataagataacttccaaaatgaaaatgaacaatgtctattttctcacgtttgatgacacctatcacaaatttgaaatattgaaatgtggaaatgctttgtttacaaagtattacccccccacttattgatgtcatttacatatttttcactgattggcatcgactcgtatacaaaaataaatttatcaacacggcatgtcttgaccaattcagcgaagtaggattctactccgccgtatttagtcgatttcatacctgtcagttctaaaatattcatatattcactattttttgaatattccacaaaagtccaatatcaccttatcctctcgccattctaattctttgaacggagtgtgtgctgtaaggaataccacgatgtccgccttgtcgtaggcttctttgtaatctgttaacttgaacacatggtgctcctttacattgggttccacaaccaggatattggcattattgcaactctgcatcactttcgtggtaatatattttgcaggactctcacgcaaatcgtcgatattcggtttgaaagccaaccccatcatggcaacgcaaggtttccgatgatgtttcagttcaaattccagcatggcatttttcactttttctgcgcaccaaaaactcttgtagttgttaatttcacgggcatcggcaatcaatttactctctgctggaaaatcagcagtgataaaataagggtcaatagctatacaatgacctcccacgccacaaccaggctgcaagatgctaacccgcggatgtttgttggcaagattgataagttcccacacattgataccggccttgtcacaaatcaaggaaagttcattcgcaaaggctatttgtacatcccgactggaattctccgtcagtttgcacatttcagcagtacgacagttggttctatgaagtgttccctgcacgaattgagaataaaatccaatggccttatcggtagattcaggatttaaaccgcctatgacccggtcgttatgtatcagttcgtaaatcacattgcccggcaatacacgttcgggacaataagccacataaatcctatcttccaattcaggacgttcactgaaaatgaggcgggccatcgcttcggtggtgcctacgggtgaagtggactcgatgacataaaggtcgccttcctttaataatggcaatacggcacgtgtagcggcttccacataactaacgtccggttcatgatttcctttgaacggggtgggaactaccataaaataagcatcgctcacctccggctttatggaagctttcaacgagccggcattcaccacctcctgcaacatctcctccatacccggctcaatgatatgcagatgtcctgcattcgtcatatccactacctgggggttaatatcaactcctgtaatctgaatgccgtgcttggcggcgataacggctgtgggcaatccgatataccccaagcccataaaacaagctttcattatcaatctgttatataagttattaatcttttaaaatttctttccgagtacaattgaacagaatgtgttcaacagaattttaaagtcgaaccaccatgagcgatgtcctaaataataaaggtcatattccaaacgtcggagcatcttctccatcgtatccgtatagccgttatatagtgtggcatatgatgttacgcccggacggatttggtaaagataagtatatcgcttgtcgtgttcaagtatctggtcgatataaaacttacgctccggacgtggaccgatgaatgccatatcgccacgcagaacattgtagagttggggtaattcatccaaatggtgcgcccggatgaaacgaccggtcttagtcaatcgggaatcattttcacccccggtatgactaagctgcggtccgaacttctcggcatccagacgcatggagcggaatttgtatatgtagaacgggcgcccgaatctgccgatacgttcttgcttgaaaatgacacttcctccatcttccctgcgaatggcaatatagcaaaacaggaataacggagaaaaaatgatcaatgcaaccaatgacaggataaaatcaccgatacgctttacattgcgcgcaaatgcagacattccatcgggaatgaaactgtcccgtggcacatattggctgacatgtgtggtgacaattattgcatcatcattcgggtcgtcctttttcagcttatgcaaccacttctgataagcattaaaatttattgtatctgccatttttaactttatataggtctcagtttgtgaacctacctcaacagaaccttgcaacaatgaaacaagggattctccggatgtaaccgtacacggcatctgaagacagtctgagtaactacgaaaattcatgtagccttgttgtttatcaaaaagacgtaaaccgtatgcggaataaccgtatgcacaccatgcaccgatctgtttattccgatacaagtggatataagaaccatcattttgattttcgttttcccttataagatgaacattcataaaagtatattgtttataatttatcgtaagcacaaagcactatacatttgactaataatcaagaggtttcctgatcgcatctattctatttcacctaagacatacttgtggggcatgacgaagaagttccattcctcacacgaaggacaacagaatctttgatagaggaacaatcgtgattatcgtcaatgttgttaatgcagcttcgtatccgaccactgtctggaccaaagccatagctgttatggcatgagccgtagtgaaaccatgcataacaacattggaaataaaaatatcagtgtcttttattctaagattaaagattacaccaaatcctgttgattgtacaagtcttgttgcaatttagtcaacggacgtagatgaatgtccgtttcattctccagaaaaccaaaaatgatacgtttctgaagggaaggagttatggtcatcccatcgtattgattttccttcatcttcatatagcccttatcccatgccttgcgtttccagataatttcttccgccacttccattcttgccgacaatggcacttattgtcacccccgcagcaaagaaattcctttcaagcgacctgcactcatcaccatagccattgaactgatattgttcaccttgtttcaagatgcgcagtacgttcctgttccagcggtcatcctttcggattacaaggctcgtcaatgcaaaatttgcaatcattgatcactttgtttctgtaaggttccaatgacttccgattttactgccgaagcgaccaatgtcttgtaacagcctatggcatggatgtcacaaccggtacggtcgtacattccggctttcagcagggcttcggccttttcctgtacatgttttccgtacattccggccaacgagggcaaattgagttggaaggagacatgctcttccttcaaggcctgataatccctcttctgcatatattcataccgttccgaatgtgcaagcaacgggtaataacctttcttttggatgcgttgcaggacagagagcagttccattggtggattaaaataggaggtttccaccaacaggtaacgtttcccctcctctaggggcagcaggtcatctttttccagccgttcctcaaagagattgtccatcatgtattccgcagccaaggcaagttccagtgtgccgttataactccgtttcaattcttggaacttttcctgtaaggtcacagtttcattagggatgtcctccatgatgtgcggcgtgagccatacctttctgactccatgcttttccatcatatctagaattcggagtgattcatccaatgttcccactccgtcatccactcccggaagaagatggctgtgacagtcggtcattcctttcaggataccgctccgggcgaaggttattgtcttacgaaagggccacatgatagttgagttaaaattaaaagttcttacgaaaacgataacatgcaaaatcaatcacttgatgaccatccatttaccccccccccccatttttcctttatttccatagtaggaggagtagccgttgcgatagccatatctatagccatagcggcctccggcactttctgtaccgttcagtatcacgctgaggttcttgaaacgtttctcctggtaaatattttctagttcgggcagcatgctacggtccaataaaccgctgcggactacaaagacggtgcggtcagccagtttctcgatgatctgcgcatcggccacgatatcgataggcggacagtcaataaagatatagtcatactcgctgcgaagcacctctatcaaagtggccagcttgccgtcctccaacagttccgtcggatttgggggaacagtaccgataggaatgatatgcaggttgtcgtatttttcatccttcacgataatctccttccagtcactgacacggttgcccagataatcacttaaaccagtcttcggggaatccacgtaggaggaggtggagccgtgacgcaggtcaccgtctatcaccaatattctctttttcttgatggcaaagctcatggcaatgttcatggcaaggaacgacttgccgctgccaggattaaacgaggtaagcatgaacacgttctgaccgctgtccttgcctgccataaagtcaatattggaacgtaacacgcggaacgcttcattgataatgttacggttgccttccttcaccacgatggctttcatgacagactgtgtgtgtttatcgaatcccaatttcttcttagcactgagatattgggggatctcaccgatgaacggaatgcttaggttttccagatcctttcgcccgcgcaccttggtattcatgttttccttcatgaaaataatcaccgccggaacaagcagaccgatggcgaatgccaccaaaaggatattcatctttcggggggctgtgggaagcatgctgcctctcggagcggtaatcacacgtgtattgtaggcggtgaaagcctgtgaaagctcgttctcctcacgtttctggagcagataaagatacagttcctccttcaccttctgctggcgttccacagaaagcagatatttcgcctggttcgggttggaagccagttggctggtggtcgtggcttcctgttggcggatgttgcgtatttgggtattgagcgaaacaatcaggttgtccaccgactgaatgatggtacgctgcatgctttgcagtgagttagccatgtcttttgccagagggttcttctcgctactgttggcgatcaggcggttacgttcgagcacgatcgtgttatattcaccgatctggctctcgatattgacattagcgataccggagttggtgggtaacagctggctgagtttcttgttgttcaactctttccggatatactgtgcggtggaaagctggctgttgagtgccagcaactccttcttgttctcggcggactgggacaggtagaggctggatgccgcctgcacatccggcagcaggtgctcactcttgtaaccggcgatgttctcatctacattgcccagctcgttttcgatcacgctcagacggtcaccgatgaactgcgaagtactgacggcgatctggttcttgtcctgaatccatttctcgttgtacatttcaatcagggtgttcagaatgtcttcagccttctgaatggaggcatcgttgatactcagattgataatggtggcatcctcgtttcccaattccgcatgcaaagcggctgtataataatcggtgacggcacacacattaccttttctataacgtatggaagtgcccacgaatgaatcgttccaatattttgtgaaattgatgacaagtgtgcctatttcagtacggatggaatcgcccatctttccggagaaatcttccccaaacgctttcccgtttacttccatgtcggatatgacaaacgtttctttggatgaaatatctattgtaaaaccgacaggagtttcatccaagtggcgataggtgactgctaaaggcgaacttttgtataattccacatctttcagtcctttgcggacagtataggtctcgtttaatcccaaccgctgtaccacctcggtcatcagcgtgggcgatttcagggtgagcaactcattgttgatattggtattcgacttgaaaatacccaagtcagaaaattcactgaccgcattggtggatgttcctcccttggaatcatctttcaccaaaatggcagcggtacgggtgtaaatgttcggggtgcccagcaggtacaaggcggctgtcgccagagttacgaacagggagagggcaaaccagtgccaccggggcatgaaaatcccccacaggtcttgtatgcgtatgaagtcgtcagcaggcttgctggcggttgttttcttttctgtcatattataaaaatataaagtgattccttttctgatggttacttgaatattagcacacccaacgaagtgaggaatgaagcgacgctgatccatagcgatacggacttcacgttattctcgttgatggtgctctgaccggcacgcatcttattgggctgcacataaatcacatcgttttgcttcaaatagtagaccggagatttaaaaatgtccttactacgaagatctacccagtgggtgacacgctcaccgttttcctcgcggatgacaaagatagcatcacgtttaccggtaatggtcaagtcgcccgccatgctgatggcttcaagcaaagtgatctggtctttggttatgttgtacttgccgggggtttttacctcacctaacacggagaaatagagattcatgaactctacggtcactaccggatctttcaccaagtcctcttccatcagccgtttcttgataagggcggcaatctggcttttggtcataccggcaatatgaagcgtaccaatgaccggaaagtctatgtttccctggtcatcgagcgtgtaaccggatatttcaccattattgttgctactacgtaaatcggcagttcctgcccgatactggacacgtgtcaggttgaacaacgctgccaactgcgggtctttactggataccatgatggaaatttggtccttgggctgcacggtgatgtctcttgcacccacaatcgcttcaggctgattcacagcaatgtcttgaaagtaaagaatctccttcgaagtgtgacaggatgtaaacaacactatcgcaaagagataaatcaaaaatcgattcttcatatttatatctgtacagtttatattatttctaatttgtaatttcaattaatttttatcgtgatttttgcgaagtcccgtaaaagccagcggttttaggaaagaacttcaatcagatcggggtgcacctcagcggaaacggccatgacaccctccaataggacaaccaccctacggtttctcttgccctgcacccgcacaaacatgcccttcacgttatcgaacttgccaccgtggatacatacacgcattcctcttttcaagtctatctcttcgggcctataataaacagtgtcctcctcataatgagaagctatcttgatgaagctgtccatctggtcatccggtacggtaatatattccgcccccgtgctcttttcccacatggcgaattgcaagaaattgtatcgtttcttgaattctgtgatctgcgaatggctggcgtggacgaaaagcagactcggtataaccggcaccaacttttttgacttcactccatgataagttcttacggcataatgtttcgggataaaatattccaaaccatataccttgtctttcagcctgtcctctgccattttctcattcttgtaggcgcgcatgacgaaccatcggacctgccttttttcctccgctgtaaaaagactcgtactcatattccgaaacattttataggtgtggatataaacctagttcatgccaacctacatattggcatgtattacaatggattacgttccattttcccataatatccattgttagttccatacttttgacaaagtgtacagacctcatttccggggcttccgtcactacttctcttggcaagagaaatattagaggactgtattttatgtaattaattgatagacaagtagaaaagcgaagtggcattgtggcgtttatccaatatacgttaagcaaatacactctgtatgaatgttttggttatattttatcacctgttttctatcgtttcttcaatattttacataactttgcacattgtaatatttctcttgccaagaaaatgagccatatgctcaacaatttttattatattacaaaatgccttcaaaaatccatttttaaaaacatccggttttaaattgtcaataagaatatctccaacggtatcctgccgctatattgacagttcatggatcttttccggtacttttctttttaagagaaatatcgggaagggatagcatctgacaatcagaattatatataaattctgaaagggatctgttcaacaatcataccgacatttgaaacattttcctttggagaaaacaattttttatcatacggacgggtactttcccatattttgattatctttgcaatgtgtaatatttctcttaaaaagagaagcaggaacggcacagcctttgtccgttattctgcgtgccgcatccgttcccgttataaggatttgagtatgatgtcatttgctttgtctacctgtgaggtgtccagtgaggcgaggtagattttggtcgtgttctccgaatcatgtcccatcgcctcgctgatggttgccagcgggacatttttgcttctggcaatactcgcccaggcatggcgcgctacatacatcgtgagcggcatgccgagtccgagccgtttcccaagttctttaagtttcccgttgatgaaatgcgctgtgctcctgtactgccgcacggcatccttggccgtatccctgatgaccggaaaaaggtaggggctgtcattatggccatacctgtccaagatctcctgcatgggcttctcccatttaatggacagacgccggccggtcttccgcctgcggtaggtcagcacgccgcccttcagatcagcctttttcaggtaggcgatgtcgacgaacgacataccccgggtataaaagctcaacatgaacatgtccctagcgtattccatgcccggggaaaggcgcaggtccaggtcacgtatcatgcggaccgctttcaatgaaacagcacgttttacggtcttgtctatcccagtgtagacatgtttgaaagggctgcgctgtaccgtcagttccctgtctaccgcacggttgtagacggcacgcaggttccgcatgtaataggaggtgctgttcggacatatccccttgtccttcagccatgcctcgtattccagcatgagggtggagccgatatcctccagcgggatgtcgccgtccctgccccggaagcgcgtgaagctgttcagtacggtggtgtacctctcggcggtgcgcttcttgccgacacgctccagttcctccacgagcctctttccgaaggccatgaaattatggctgtcctcagggggcgggttgtgaaaaagttcgacaaccctgccggcgggataggtaccgccggaacgttccagtccggcaataatactttccagacggcggatgtctttttccatccgctcctttaacgcgagcaggaggcttcttctggcatcaccggataccggcagtatgatttccgacgtgcgtccgtcccattccgaagggaacagcctgtagccggtgtttatctggcgcgccacccttccgtggatgacctggaaatagagtgtcccctccctgccttccacggacgaggacctgaatttggttttgattgttgccatagtgcagtcattttgaattaggattgtccagttgctttctgatttcctgcgcctccttgaacagccgatgcgccagactgtccttgtaggccgccatttcatgattacggatgcggttcctgacagagtcctcaaaagcggtcaccagcctttccacacgccggatcttttcctcgtctcgcttaatggtgaaatgtttctcaaggaaggcgatgtcgggatcatcccccgg

SEQ ID NO: 410 - DNA, 9119 bp, unidentified
  source 1..9119: mol_type = unassigned DNA
ttacttattgttcttcttctcgttctcaagcttcttcatagctcttaccttaagtgaaagaccgaagaggttgatgaatccgtcagcatcatgatgatcatacatatcacctgtcttgaatgatgcaattgactcattgtaaagtgaatatggagatgttgttcctgccttgatgatgttacccttgtaaagtctgaacttaacttcacctgttacatattcctgagtcttctcaacgaatgcctgaagtgcttcacgaagaggtgtctcccactttccttcgtaaacaacctgtgcaaacttgtttccaacatccatcttgaatgttgttgtatctctgtcgagaactaattcctcaagctgctgatgagcttcgtaaagaattgttccaccaggagtctcatatacaccacgagacttcataccaacaacacggttctcaacgatatcaatgataccgataccatgcttggcaccaagtctgttaagctctctgataatatcagaaaccttcatagccttgccattaactgactttggaacacctttttcaaatgtcatagtaacatattctggttcatccggagcttcctcaggagtgcatccaagaactaataaatgcttgtagttaggctcgttagctggatcttcaagttcaagaccttcatggctgatatgccagatgttacggtcacggctgtagctgcagtctgtgctgaatggaagatgaataccatgctgtctgcagtattcaatctcatcttcacgagactgaagcttccagttagaatctctccaaggagcgataatcttgatatctggagctaaagccttgattgtaagctcgaatctgatctggtcattacccttaccagtagcaccgtggcagatggcaacagcaccttccttacgggcaatctcaacaagtctcttagcgataagaggtcttgccattgaagtaccaagtaaatatttattttcataaacagcgtgtgcctgaacacatggaacgatgtagttgtcgcagaattcatcagtgatatcttctatatataacttagcagcaccacatgagagagctctctgctcaagtccgtccaactcctcttcctgaccacagtctgcacatacgcagacaacatcatagttgtatgtttcctttaaccaagggatgatggcagttgtgtcaagtccgccagaataagcaagaataactttttctttcattatatattcctccgtatattattaagtttacatagtaaaacacatatgctatgcacctgcagattataataaactactttatttaaaaatgcaacaacaaattatgcatattatacatcaatatgcaacaaaaatgtataaatataaattttctttaaaatatcctttacataagaaaaaaagttgctataatgtaggttatcaatttacattttgcgttattttatgcataaatgttgaatatatgcattttgcttcgcaaaacaaggaggagttatgattaaagtaggcattatcggtgcgacaggttacgcaggtaacgagcttgtcagattattattaggacataaggatgcagagattgtatggctcggttcgagaagttacatagatcagaattattcagatgtatatagaaacatgtttaagcttgtagatgcaaaatgtatggacgacaatatggagcagcttgctaacgaggttgatgttatatttacagcaacaccacagggcttatgtgcgtcacttgttaatgacgaaattctttcaaagactaagattattgatctgagtgctgatttcagacttaaggatgttaatgtatatgaacagtggtataagcttgagcataaagcaccacagtatattgatgaagctgtttatggtttatgtgagattaacagagacaaggtaagcaaagatacaagaattattgctaatccgggctgttatacaacaacatcaattcttacactttacccaatggttaaggaaggaataatcaatccggatacaattataattgatgccaagagtggaacttcaggtgcaggacgtggagctaaggttgccaaccttttctgcgaagttaatgagagcatgaaggcttatggtgtcgggactcacagacatacacctgagattgaggaacagttaggttatgcatgtggaagagatgatttaaagcttatcttcacaccacatttggttccaatgaacagaggaattcttgtaacagcatatgccaaccttgccaaagatgttacatacgaagatgtcaaggcagcatatgacaagtactatgataaggaatatttcgtaagagtacttcctaaagatgtatgccctgaaacacgctgggttgagggaagcaattttgttgatataggatttaagattgagccaagaaccaacagacttattatgatgggagcgttagataatcttgttaagggtgcagcaggtcaggcagtacagaatatgaaccttctcttcggacttccagagaatgagggattacagcttgcaccaatgtttccataataaatgtacaataggaggatgttatgaatataattaaaggcggtgttacagcagctaaaggattcaaggctgccggatgtgaagcacagattaaatataagaacggaaagaaagatatggcacttgtatacagtgagaagccatgtgttacagcaggaacatttacaactaacaaagtatttgcagctcctgtcaaatgggacagaaacattgtatataatgaagactttgcacaggctgtagttgtaaacagcggtgttgccaacgcatgtacaggtgttgaaggagataatgcatgtgcagaagaagcaaaggcagttgcaaaggttcttaatgtaccagagaatgcagtacttatcggttcaacaggtgttatcggaatgcagcttcctgttgacagaatatgtgcaggaattgaaaagcttgctccaatgcttgatgattcatttgaagcaggaacacaggcagcagaggcaattatgactacagatacaagaagcaagcaggttgctgtagaagtagaagttgcaggtactaaggtaacaatcggtggtatgtgcaagggcgcaggaatgattcatcctaacatggcaacaatgctctgctacataacaacagactgtgatatcgacaaggcacttcttcagaagatgacaagtgcaattgttgatgattcatttaacatgatatcagttgatggagatacatcaactaatgatacagctcttgttcttgctaatggaatggctggcaataagaagattacagaagagggtgctgattataatgctttctatgaaggcttaagctatgtatttacagagctttccaagatgattgcaggtgacggcgaaggctgcacatgtcttttcgaggttcaggtaaagggtgcaacaactaaggcagaagccaagacactcgctaagtcaattgttacatcaagtcttaccaaggcagcaatattcggacatgacgctaactggggaagaattctctgtgcaatgggatattctggtgctgactttgaccctgaaaaggttgatatattctttaagagtgaagcgggtgagcttcagattgttaaagatggaactgctacagattacagcgaggagaaagcaacggaaatactttcacagaatcctgtaattgctattgcggatgttaagcagggcgatgcaagcgctacagcatggggctgtgaccttacatttgattatgtcaagataaatgctgattacagaagctaatctgacacagcattttaaagcaaatagatatctgaataaatatgaaatggagattattatgagcgcaaaagatatgacagaggaacttatgaaggcacaggtgcttgttgaggcacttccttatatccagaaatttaacagaaagataattgtagttaagtatggtggaagtgccatggtagatgaagaacttaagagaaaagtaattcaggatgtagttcttcttaaacttgttggttttaagccaatcatcgttcacggcggtggtaaggaaatcagcaaatgggttgaaaagtcaggcatgacacctgaattcaagaatggtttaagagttacagacgagccaacaatggagattgccgagatggttcttaacaaggttaataagagtcttgtttcaatgattgagcagcttggtgtcaaggcatgtggtatcagtggtaaggatggcggcatgttaaaggttgagaagaagtattctaagggtgaggatataggatatgttggtgaagtgacagatgttgacacaacacttattgaatccttgcttaaggacgattttctcccagtaatatgccctatcggatatgatgatgattttcatgcatacaatattaatgcagatgacgcagcatgtgcaattgcaagagctgtcaatgctgagaagcttgcattcttaacagatatcgaaggtgtatataaggattttgacgataaggattcacttatatctgagctttctacttcagaggcgagaactcttttagagagcggaacaatcggcggcggtatgcttcctaagcttaataactgtatagatgctattgagcatggtgtatcaagagtacatattcttgatggaagaattccacactgccttcttcttgaaatatttactaacaagggtgttggtacagctattctttcagatgatgcagaaaaattctttgactcagataaataattgcgaaccgtaagctttgaggttataatattatattggctcatgtgaaaatgtgtgctcataagaataggaaagtgagagtaatcatgaatacacagcagattatagaaacagcagaagagaagctgattcatacatacaaccgttaccagatagtacttgataagggtgacggagtaagactttacgatacagatggtaaagaatatcttgattttggagcaggtatagcagtatttgcacttggttataacaataaggaatataacgatgcattaaaggcacagattgataagcttatacacacatctaattatttctataatgaaccggctgtagaggctgcaacagcacttacaaaggcttcaggaatggacagagtattctttactaacagtggtacagaggctattgaaggtgcagttaagcttgcaaagaaatattattatgtcaagaacggaaaggctgatgcagagattattgcaatgcagcattcattccatggaagaagtatgggagcacttgcagtaactggtaataagcattatcaggaagcatttggacctatgataccgggaattaagtttgcacagtataacgaccttgacagtgtaaaggaacttgttaatgacaaaacttgtgctataatatttgagacagtacagggtgaaggaggaatttatcctgctactaaagaatttattgaaggtgtaagaaagctatgtgatgagaagggaattcttcttatacttgatgagattcagtgcggaatgggaagaacaggaagtatgttcgcattccagcagtatggcgttaagcctgatatccttacagttgccaaggctcttggctgtggagttcctgtaggtgcatttgcagcgacagaggaagttgcgaaggcattagttccaggagaccatggaacaacatacggtggtaatccacttgcatgtgcagcagcaaccaaggtgttcgaactttttgagaagcagcatgtattagataatgtcaaggaagtatctgcttactttgaagaaaagcttgatgagcttgttgagacaatagatgttgttgtcgagagacgaggaatgggacttatgcagggacttgagttatcagttaatcctaaggatgtaattgcgagagcacttgataacggacttattctgttctcagcaggaactaatgttataagatttgttccaccacttgtaatcactaaggcagatgtagatgaatgcatagctaagcttaagaaatccttctagaatcaggagtttactttatgaaattaagaagatttatcagtatgatgctgattgttaccatgctgacagtctttgcaggctgtggtaataaagatgacaggacacaggctgcgaggactcttaatcttgatggacctataacagttaatgtatggtttaataacagtgattatgagccttatcttgaatttgttgccaagcagtttaagcaggctaatgaacttgttaccatcaatcctgtatatgtcgaagcagattcatatataaattatatatatgatgaatctgttcgcaatgataatgcatgtgatttgtattttctgacatctgaagagatagagaaagcatatcttatggggcttatgtccgaaaatgatatgtatcctcaggtgtacaatgaggatgtgtttggaaaggctgcaatgacagcctgttcatataatggcaaattatatggatatccggtatcatttaatacatcatttcttgtatataataagaagtatgctgaacctgtagaaacaattgatcagattagacagattagtgataattatcaggtgactgatgagaatcaggatgtatcaatggtatttcaatgggcaccaggttcaatgtttcttaattatccggcttgtgggaaatatattaatataggcggcaataattctgaggacagttcttcggtttctgtagatggagattctataaagaaagcacttaaaaaatatgctgagttaaacagtgcatttggaacagacagaaataatacaagtcttgagacatgtgtggatttgttttcaacaggaaatctgttatatacaattcttgatgcagacagtatatctaagattgatttatcagaaatagattatggcatatgtaaatatccttcaatggggaatgatgttgaatcaaaagcaatgtcagttactactatggctgttgttaatccatacactaagaatgtagatgcatcgaaggctgtagcaagagctatttcttatgattatgcagactatatggagagtactgctaaaaaaagctgtgcaagagctgatattaaggttaagagaaatgtagaaaactataaagcaattcatgatatttattcagactctgtggtcaaagctaaatatattggtgttggtgaagtgtatatgagatatgaaattatgcttcatcaggtatatgacggtacaaatgtcgatgaagcatataattcatttgcagcatgcatagacagaatggcaaaacagacggaagcttcttcagtcaattcaggaaacagttcttcaaaataatgtataatattcctgctattaacttataattattctatagaaaacttatggaggttataagctgatggcaggttttttaattgcaataatatcaggtgcacttatgagtttacagggggcgtttaatacaaatgttacaaaagcaagcagtgtatgggttacagcaatgtttgtgcagttgacagcactggcgacttgtgcgattatgtgggtaattgacggaagacctgatatcatgaagctgtttaaggttgataataaggttacacttcttggaggtgtgataggtgcatttataacatttacagttattaaaagcataagtggtcttggaattgctaaagcggaggttacgattgtagttgcacagataattgtttcgtatctgctgggacttttcgggctgtttggaagtgagaagactacattttcatggattaagctcgtgtcgcttcttattacggttgcaggagtatgtatgttttattttcttggtaatccgtcaacggattaatatattatgaataattatgataaatgtcagaaaaatctggcaggaaggaacagaatggaagatttattcagcgtatgcggaaagatacgattaagaaaaggtgaaggaagaaccttaaaagcaggcggtgcctgggtatatgataacgaaattgaatggatgtctgacggaataattgacggacatcttgttgaggtgctcgattttgatgattatttcatgggaatcggatttattaacagaaaatccaagattacagtaagaatgcttgcaagacacactgatgttgttgatgaggcatttattgaggagagagtaagggctgcggttgagtacagatttgacacagtagatacctctgcctgccgtcttatatttggagaggcagattttctgccggggcttgttatagataagtactcagatgtgcttgttgtggaatcacttgctttaggaattgacagatttaagtcacttattgttgaaaaagtgaagaaaatccttcatgaaaaaggcattgatatccgtggagtatatgaaagaagcgatgccaaagtccgtactcttgaagggatggagagagtaaagggctttattggtgatgaatttgacactaatgttgagatagttgagaatggtgtccactacatgatagatgttgtgaatggacagaaaaccgggttctttcttgatcagaagtacaacagacttgcaatgcagaagctgtgcaaggacaagagggtattagactgtttcacccatatgggtacatttgcattaaatgcaggaattgcaggtgctaaggaagttactggacttgatatatcagaatatgctgttgaacaggcgagagccaatgccaagcttaacggacttgaggatacagtacattttaaatgtgcaaatgtattggatgagcttccaaagcttaacgaagcaggtgagaaatatgacgttgtaatacttgacccgccggcatttaccaaatcgagggaagctacaaagaacgcaatcaagggctacagggaaatcaatatgaagggacttaagcttgtcaaagacggcggctatcttgcaagctgttcatgctcacacttcatgacacaggagcttcttaccaagactattaaggaagctgctaaggctgtacataaaagactccgtcaggtcgagttcaggacacagtcacctgaccacccaatactgtgggaggcgcaggagagctattatctgaaattctttatctttcaggttgttgatgaaaaatga

SEQ ID NO: 411 - DNA, 30431 bp, unidentified
  source 1..30431: mol_type = unassigned DNA
cagtttcctgcactgtcacgcattacttcatattcaatctctttccatcctgcgatgcagcgctctaccagaacttcacctacacgtgaaagacgaagaccattctccaggatttcacgaagttcatattcattatgagcgataccgccgccgcttccaccgagtgtgtaagcaggacggagaactaccggataaccaatgatgtttgtaaatgcaagaccatcttctactgttgtaacaaccttggatgctgcgatcggctcaccgatcttctccatggtatctttaaattcctgacggtcctccgctttcttgattgtctgggcagttgtaccgatcagtcttatattgtgttctttgaggaaacctttctcatccagctccatggcaaggtttaatcccgcctggccgcccagtgtaggaaggacgctgtccggtttctctttcaggataagctgttctactacttctactgtcagaggctcgatataaactctgtcagcgatatctttatctgtcatgatggttgcagggttggagttaagaagaacaacctcaatgccttcttctttcagggaacggcatgcctgtgttcctgcatagtcaaactctgctgcctggccgatgataatcgggccggaaccaattacaagtacttttttaatgtctttatttcttggcattatttatttcctcccatcatatccataaatctgtcaaacaggtaactggaatcctgcggtcccgggcatgcttcaggatggaactgtacagtaaagatattctttccttcgtatgccataccttcgtttgtgccgtcattgacgttaacgaatgcaggttttgcaatgtttttctcttcaagtccctcagcatctactacataaccatggttctgggaagaaatgtaaacacgtcctgttgcaaggtctttgaccggatgatttccgcctctgtgtccgtatttcatcttatgagtatctccacctgttgcaagagccataagctgatgtccaagacagattgcaaagatcggaacttcagaatcatataatttttttatttcctttataatagaagtacattcctttggatctccagggccgttacttaacataatgccatccggatttgtctccagaatctcttccgcaggtgtcagtgccggataaattgtaacctcacatcctctttcattcagggaacgtgcaatgtttctcttagctcccaggtcaagaagtgctactttcggaccgtcgccttttaaaatctctttctcgcggcatgttaccttctctactaccttacctgttgtatatgcttttaactgggggataattgtatctaaatcataattttcattgacggtgatcataccgttcatggtacctttctcacgaaggattttcgttaaggctctggtatcaattccggcaatacctggaatatcatgctttgttaagaaatgctgaatcgtgtccacgcttctgaaattacttgggacacgggataattcgcggacaataaagccgtccacccatggctttgatgactcctggtcatcataacagattccgtaattcccaatgaggggataagtcatacatactgcctgtcctgcataggaagggtcggtcattacttccagataaccggtcatggaagtattaaagacgatttcgctgataacgtctctcgttgaaccaatgcttgtacctttgaacacatggccatcttctaatatcagaaatgctttcatacaatctccctttcttatctttatattgtgtctatcacttattttttcctaaatcttcaagattgtatcacagcaaagtgcttttttcaaccttataaggtactaaaaataattaagttgatattaaaaacttttttgtaatttcaggcagatccaatcacatgcattcactgctttctcacatccaaatacctctataaaatttaaatcatcctcttctctgtgcaactctacaccggataactgctccgcagtttatcagaagaagcttacacttctacgtaacaaattgtgcgttttgaggatactgtaaaaaaaattaaaaaaatttcaaaaaagctattgacttttatccatacatcggttattataaatgagcagtcgcgagagagcgattgataaataagaaatgcagaagtggcggaattggcagacgcgcaggcttcaggtgcctgtggtagcaatatcgtgtgggttcaagtcccatcttctgcattatttttttactcaaaaaaaggaaactgatacagtttcctttttttctgttcttatgatacaaaagacatcagataacggtaaatcttccatgtggtttcattatcgtaatgagttccgtctgttgtcttatatccctgctttttcagataagaataaagatctgcatatttcgcaccggcaacttcttttttcattctggcattgaaatcttcgatttcctcatttgttacataaggatctttggttacctgtcccactgccacaatatagacatccgctccctgcgctttccattttggaatctcctcattcagcagactgatataattggaaatattgtatacatcattaacaccaagccagacaaaaatatcttcatttcctttcatctgctcctgcaaggtcttcagggcagtatctctaagccatttataccccattccaacctcacatatccatgtgatgttatcgttctccacaacatctttcatcatatctgttctggaatctccgatcataatagtctttcgcattaccgcctctgccggatcactcagttcagaatatacaacatttccctgatttcgtacatatgcccgtattctgtaataataagtctttcctgaaacagtacctgtatctgtataactgaatgttgtattgccggaaactatatcgattcttttatatcctctgtcctcggattctgaccggaatatctgatatccttctgcagttttgatttttttccatttgatcagggttccgctttcttctctcactcttatccgggtgatcacaggttttccgggagctgtttttatctccagtgctttcgatgatgggctgtacagagttttgtttccctgtttcagataagaacgtatcttataagtgtagagcttatcttcagaacctgtcagtgtaaaactggtaatgttcctgttcttgatcctttccacgcatttgtattttccgtaggctttataatacagaaaaatctgatagccggaggccttctttactttattccagttcagagtcactctgtttccggctgctgttccggacaataccggtgtttccggttttgcagatgctgcggatgccgatactgttccaaacagcattaccgctatcaaccaaaataaaaagaaactctttctgatatatttcacatgacattcctcccatctataacaattcatctatagcaataccggactgtccacagtattttacggaattgccataatcaaagagccggctctgtaaaagatatctgctctcacatcgccggcttgattttatactgttctcaattatttttgtattatttgactttcacgctcttcactgcgctgtaacctgtatatacctttgcagatcctaccatcttatatgcgcgtgctctgaaataataagttttaccacttgtcagttttgtcttatttgcggtcagctttgtagttccttttacaaccgtacccttctgggatttcttggatgatccacagtaaacatcatatccgtctgcacctgcaacagccttccagcttacggttgccacaccttttttggtggacttcacagagattgccggctttgtacctgttgctgtagctttcacttctgcggaatttgaccaggatctgaggttcttattggcatcttttacctgtacagttgctgtaactctgtatgtgtagactgttcctgtagaaatcacattatctgtgtaatcttctccgaactctgcgtcagccagatcaccattatcccatgttttaacagtttcatatgcaccgttgcctgttttcttctccagtttgtaagaagcatcatctgtactggaaccaacgtttaccacgatctgatcccatgttgcagatgtgatggatgcagttgccttcagcattttgaccttggatgaaacctttgcatcacagctgaactgctgaggtacggcaatccattccggtgtaaagtcaatagaaggtgtcttactcagtgagtttccgtcaaggtataaggaaactacctgagatccttccttgctgttttccagtttcagatttgtgatcttattatttctaagatcaaggattccctgaaatccggcacagttaaatgaagtgatggcattattggaggcattgacttctgaaagactctttacataatcagtatctccgatgttcagtcctgcatttgcctgtgtggtaaatttattggagcttgcatctacgaaatccagattcttcagatatttcttggaaggcattactacctttgtcagtttattgcttccatacttcactacacgaagatttgtgcatttgctgagatccagagttcctgcaagactgttattactcagattcagatatgcaacttttgtattctttgtaatatttacagaagtaagtttgttatttgccgcaaacagatctgtcgcataggtaaaacgttcaatacctttcaggttggaaattccaagtcctgaaacatcaatcgtcttggctgctttgatctctgccgctgaaagtttcttatccttgtctgtatcaatattgtctaaaacatactggcggaactttgcatccgggaagttcgctgaactgactgctactgctgatgatgcttcagcagcatcggactgaaattcagatccgtcctctacctccggagcttcctcttctgctgagccaacagactgttcttctactgttgatgtatcatcactaaaatcagcagcctgaacgctgataccagaagtcatcatagctgcactgatcattcctgcgactaataactgatttaattttctgtttttcatctttccctctcctgttcgtaattttcataccttttgatacgatataaaattatcatattccatatcagtttgcaacatatttttaattatactgtaattatctggtaaatctgtaaaaataatttaccctgcagttacttacttctcttccattgtttctttttccactggtgtttcttccaccggctgttcctgtgctggttctgtttctgctgttttctctgtctctggttcttccggctgtaattcttctgccggtgtttcttccggctcattactcccatcttcatcttcatctgaagatacagtgtcattttccacattcttcgccggttccggagtcgggcatggcgttccgcaatacggacagaaacttacattaatatctacctcccgctcgcaggacgggcagattttctctcctttcagattcgccgcattatccttatactccctgattttcagataatgctgatcaatctcctgacataaagcacttaactcactatcaattccatcaccctgagaatgtcgtctgtaaacaatatcaccgatatcaactttgattttctcaataatgcgctcttctcctgtgattttacttcttatcttctgtgcctcgatcgtctgctctgcgcgggcacctaattctcttgttgtctttcccagttccttcgttgtttttgaaaatgtcttaactaatccatcaaaaaaatctgttcccataatatttactcccttccattattgtcctcataatgcaagaacaaaactattttaattaatgactaccctccagcaggatcggctcctgtccgcgaagaagaatcctcggaccaccgtttccttctatgtattctcttgtgatcacaacctctcctatgctgtcatctttcggaatctcatacatgatatccagcatatactcttccagtatcgcgcgaagtgccctggcacctgtatctctctccagtgctttcgcagcaattgcatgaagcgccccgtcttcaaattccagtttcacttcatccagtgcaagaagtttctgatactgtttaagaatcgcattcttcggctcctgcaggatcttcacaagcatatcctcattcaatccgtccagagtaaagatgatcggaagtcgtccgataaattccggaatcattccaaaactgcggatatcctccactgttactttctgaagcagatgaggatcattatcatatttatccttcaggtctgcataaaaaccgatagatgcctgcttgttcagcctttctttaatgatattctccagatcaggaaaagcaccgccacagataaacagaatattacgtgtattaacagttacaagcggtaccattgcgtttttgctgtttgcacctacaggaacttccacctcacttccctcaagaagcttcagcattccctgctgcactgcctcaccactgacatctctctggttggtgttcttcttcttggcaatcttatcaatctcatcaatgaaaataataccatgctcggcacgctccacatcattatctgccgctgccagaagtttggaaacaacgctctctatatcatcgccaatataaccggcttctgtaagagaagtggcatctgcaattgcaagcggcacatccagaagtttcgccagggttttaaccagataggttttaccgcatccggttggtccgatcatcagcatattagatttctcaatttcaatctcatccattgtatctgttgccacacgtttatagtgattgtaaaccgctacagacattactttcttggctttctcctgaccgatcacatactggtcaagggtttctttgatcttatggggagcaggaatatttttcagatccagaaccggtttttcctgtttctttttctttttttctttctttggctgctgcaccggattctggaagctgcccagatcgatcatgctcacattcggcatattcaacaggtcagaataattgaacttaccctcattaaactgctgattcatagaattaaagctcttctgcatacaatccgtgcagacatgtatgttattgggaagttcgatcatcggaccggccttgctctcaggtctgcggcagagaaaacagaatttttcggatttgtttctctttttctctgtatcttcgctgctgtctattatttcatcatcattatagttctcgctcataatgactcctttctatatcctcttattcgtaacagtacagtgctcctgcaggatagcaggctgctggatcattacgcttatttaactgaattatatcatacaattcccttataacaaaatgaaagttttataaacacaaaaagaatcctgcctgggttactgttcactgataatattataaaagacaccgccgcatgggcgatgtcttttgttttattcattgtccggtctggtgccgagagtcagctctatagtattttcttcatattccccattagtggctcttgcaataactgcctcaatcttctctcccgatttataatactgcagtttatccagcagatcatcaccatcactgactttctgtccgtcgaattttacgatgatgtcgcctttacagatacctgcctcctgtgccggagaatcatcctccacacttcttacaaaggcgcctgtgggcatattatacatctcaattgcctctgtggtcagattggcaagacttactcccagatatccttttttgctgctgtctactttctccctggtctcacgattcatcagttcttccagaataggctttgccttggaaataggaatggcatatcccataccttctacagcactgtctgcgtattttgcagaattgatgccgatcagctcgcctttcatattcaaaagtgcaccaccactgttacccggattgatcgccgcatccgtctggatcagccctgtactgttcgttccgtcatctgtagaaatcgtccggttcaatgcacttatccagcctgatgttacagactgaccatatccaagcgcattaccgatcgcaactacctgctgccctactgccagatcatccgaacttcctatctgagcaatcttgatctgatttaaagtgtcctcagggatatccgatttcttcaccgcaactactgccagatcattatcagcatctgtacccttaatcttggcactgaccgcatcctctacattcagatctccattatctcccgcattcacagtctctgtctctgcatttgccacatcatccccgataaagcagacactcagagttgtagctccatccaccacgtgattattcgttgcgatcagaagctcatcatcattatctccaacgataatccctgaacctgttgacgcactcttatattggtgggaactatatccgaaaaagcttggtatttcctgaacactgaccgtagtgatcgcaactacagaaggcatggaagcctgagccactgctgctactgttccattctcagagtcagacagcaccttatcggcagtgctgtcatctgatgccgtttcctgaagatccacactgtctgtagttttaatctgcaccgaagacttacctgtattcaggaatctgtctgctgcaaaatttgccgcctgaaatacaactgccgccaccaggccaaagatcacagccaatgcgattgtcgcccctgcttttttctgaaaagaattctgatttcttctgtgtccagagggaccggatggtttcaaaacagttccctgttcttcatggaactgataatgttcatatctgggctgctgaccggaatcatctgttttttcacccaggtttctttcatcattcatgtaatctgctcccttctgttcctgtattactgtttatcggaacactccccgaaataaacaatgatctgtaactgttttatttctgcacagttacagcaattcttctcctgaactctggaatcagtatatcaattaattgtgttcaaaatgtgacaattatcgtaaattggcgtgtcttaaggttatcctcttacctttattttctgttccagtaatatggactcatggtacatgcaagaacaactttccggggaagttttctgtatcttttccccagaaaatatcctgcatatttcattccgctctgccagatcagctgaggaatcagccagaagtgtcccgtccttatcagatagcccaggcttctttttaccagacggattccctctccctcagaaggtactccttcaaaaatttccggatgctctgcctgggatactcccagatcgaagtttctgtgaaactgctgttttccggaataattatgggaatgatatactctcgcatctgccgcatagacaactgaatagcctttctgaatcattgttccggcacagatcatatcttcattgaaaatcgcccgctctgtaaaaccgcctgttttctgataaatccctttatcataggccgcacacacattagaacagaaataggtcttgatcccgtacttatcaatatcagccagcgactttaccgaggactgctccggataattaaaagaacgggtataacgttccagaaagcgacagtctgccctgggtaattgtcttgcataggctgctcctgcacccggattttcactgacagcacagacaagatttccaattacttttctatcagcagggagagcatcctgtgtcataaagatcataatatctgcattcgaaagttctgctgcccttcttctggttccgccatgatcaaaatccttctgttccaggtgatgaacctcaaggatcggacatttctcccattctctgttccagtactgctctcccgtattcataaccagaatcctgcggggacggtattcctgttcttccagactgtgcagcagttctccaaattctctgccgggacgataggcaggaatgattacatcaactgtcgcagtgtcattatatttttccttatgcgtcatcctcaacactccttatctgaaaagaggaccatcctttccaacagatggtcctcttttctattatttatatttttatagcagttccctgttactgttcttcagaacttgctccggaatctgctgctgaatcatcgctgaatccatcgtcgccgccggtctcatctccaccggtgtcatcgccgccgtcgtagtctccaccaccagtgtcactgccggtgtcatcgccgccattatcataactgccgtcatcaccactgttatcataatcgccaccgccgccattatctccgccgccattatcataaccgccatcataaccaccgttatcataatcattgtcataatcataatcgccgctgttatccgtactgccggaggtattatcgccggaccatacaaaagtgtcatttgcatttgtggtatcagtgtcctgtgtcgtagtcttggctgcatcatccagcttaccttctccgccgacgatctcaagtatcttattactgcgggccactacctcagaagacggagtataatcctgatcatcatacaggaacttgtgaagttcaactacattgttctcaagatcagtaggaacaataatacttcccttgatattagagaatttaaacttctgcgggaatcccgtactgtctgtaaatttatatccgatcagagtcggaataagtcccagaatatcctgctttgaaagagatgttgtaaccatcgggaatacatcatccataatcttaaagatagaagaaagacctgctatcttcgccttatcaaagagcattccaagtactcgtctctgacgctctgtacgtcccatatccagacttgcagtataacggatacggcaataggatgtcgcctgtacgccgttcagatgataagttcctacaattgcttcctgatcttccggctttggctccggtttctcgagcggagtgtagtcttttcctgtcagcttggatgtttccacgcaatagttattcatatgttcaatttccgcataagataacggaatatcaagaccgccaagatcatctatcacttctacaagtgcggaaaaatcagccgtcgcataatcggaaatatccagatccaggtttgtatttaacatggtgatcgcctgttccggaccacccagcgcataggctgcatttgccttcgtataggtatcatctccaacattgagaagtgtatctctgtatacggaaaccatacgcacttcttttgtatcgttgtttacactcacaatgatcatggtatcactgttctgtgcagaatactgggagccttcccctctggtatcaataccaaacagcacataggtcttgtatcctgtcatctttggtgcttcctggtttacgactattttttcctttttcagttccggctgctcgatcttatccagcctggaagaaatctgtccatacacatacagcccgccaataaacagcagcagtacaatgatctcaagcacaaacagtacttttttcttttttcctggtttagccatgcctttttccccttatcttaatatgcatttttgtttataaatcccttgaaaaatgtaaggaatataatcttgatatccagccctatgctccagttttcaatgtaataaaggtcatattcgattctttttcttatggatgtgtctccgcggtaaccattcacctgagcccagccggtaagtcccgggcgaacctgatgtttcaccatatatctcgggatttcttctctgaatttctctacaaaaaacggccgctccggtcgtggtcccacaagactcatgttacccttcagtatgttgaaaagctgtggcagttcatcaatactggtgtgacgcataaactttccgatgggtgttactcttgggtcattctttactgtccatgccttcttctcttccgattccggctgtacttccatggaacggaacttatacatccgaaaagtctggttatgaagtccaaccctctcctgtttatagatcagtggtcccggtgatgtcagcttaatgatagcacacattaacagcatcagcggtgaggttactatgattccaacaatagatcctgcaatgtccatcgcccgcttgaccagtgcattgaatgtattgttcaacggtacataacggatattgataaccggaagtcccagtatatcttctgtgtatggttttgtcggaatgatcttattataatccgggataaacttggtgtgtactccggatttttcacacagtgctacaatctcttccaggcggtaatattcacttaagcccagagtgatcgctatttcatccagccggttctccggaagtattatattcagattggcaatccttccaagaactttgattcccttgtactctgttcctgccggaacattgtcatccagtattccgcggatcacatatccccactgaggattggcaagaactctgtcaatgtattcctctgctgcgcggctgtatcccacacagatcatctgtttctgattcagtcccttctctctcatatctctcagaagagcgaaaatcaacattcgggcacaccactgaagcacaatattgattacataaaacataatataagtagaacgggaaaaatcgctctcatctatcatgtaaaatgtaaacatcagaataaggagcccaagcgagttggcctttacaatattagccaatacaagccgacgcccctgcatccgcatgggagtatacaatgtgaaagcctgatacaacaacagataaaccggtacaataaaaaccagcatcagcatatactgctgaaagcttctggttctgactgctgttgctgccataggaccaacaaaacggatcagccatgccagaaaatatgacagtaccagtacaattgcatcaatgatcatatggagacgactgaaattcttttcattgtcctttagcaatcttttgtcacctcatttttttatcgtttctatattataatagttgttttataaaagcaataaaaatttatctttctttcttatcatccgcacaaacgcctgaagatattcacccacaattcaacttgaatcctaaaatagtttgacagattttgaaatttaaaaggtattttatgattttttttgctgatctggaatccattcttaattcccgcaatatactctcttccgaatcctttcagcgtaaaaaacagaattttgattccaaatcctgcgacaagaaacggaagattgataataatctgtaacaccggcatatttttgtatatcagataaatattatttctggaagaataccggatcttgaactgattatatctggatccgctggtaccgcttcccacatggtataccatggcatcaggtgcataccagttttcatatccgtagatcctggcccggtatcccacgtccatgtcctccagatatgcaaaatgttcttcgtcaaaatatcccagttcatcaaagatcttctttctgtaaatagcagctcctgcgcaggaagcaaaaatcttctcttccttttcataggtatggatatctttccccttacctctcgcataagcccatccaagagcgcagtaatagtttcctgcatcatccagcctgtccctgtcatgaaactgaatcattctggcagcacaggagaaagctttgggatgccttttgatggctgacagcatttcttctataaaattctccgttacttcaatatcattgtttaaaagcagtacataaggtgagcgtgatgctctgatcccttcattgaccgctttacagaatccgaaattctccggcagttcgatcagatggacccatggataccttgcagcaacaaaagcacagcttccgtcattggatccattatccacaagaattacatcaaaattgcttacagtctgacactccagacctgcaagtacgccatccagataagccatcccattaaaattcggaatgatcactgatacttcctgcatgatttcctccctgtcttctcttttttctgtcctgcttctgtctccattcccgggattggcttcagagaataattccatttggtaagagacaggtttttgttataacagggatctccgtttttgagaatgtctatccagtgacatcgcatatattcaatctccgtctgaaaacggcgcactttctccttgctgtcctcagctcctctggtctttgattccatatgataaagcttcgcatagggatcatatacgatcagatagccgttttttcttactttcaggcaaagatccacatcattaaatgccacagccagttcttctgtaaatcctcctgcctgctcaaaaacctctttcttcatcaacagacaggcggcagtcactgcactcatatcctgaagaagggatgccttatgcagatagccagtacggtccgcaggcatatctacgaacatatgccccgcaataccgcccattccgatcacacatcctgcatgctggatcgtattatccggataaatgagctttgctccgacaccgcccacttccggacgctgacacactccaagcatttcttccagccagtccggattgatggattttacatcattattcaggaaaagcagatattctccctttgcatgcgccgcagcaaagttattgatggcagaataattaaattcttttccccatctcaaaagatggatcttccggtttctggaaagctctttataatatcggaaaatctcatcagtggtactgttattctccacgattatgatttcaaaattctgataaccggtattcttctccagcatttccagacaggtctgaagagtctctttctcgtctttgtttggtatgataacagacaccagaggttttctctgcaccggatatttcacccggtaaaagcccagatcctgtgtatggcttacctcgccttttgtacctgttctctcaagatgagcttctattgctctcttgccggcttcaaatgcgtacattttactggcaggattatctgcagtggaggctttgtgtgttctccagtgatacaggatttccgaaacatgtaaaacctctccggcattctccgtacagcggaagataaaatcgtaatcctgagctccgtcgaattcttttcggaaacctccggccttttctacaatactctttcgcactacaaaaaagtggcagatataattattggaacgcaggagatccagattaaaatccggtttcagatgtggctgaaaatgctcgtccagttctgttgtaaccttatcctcgtctgtataaagcgcatctgcttgcggatgatcctgcagtattttcacgatctcatataatgcattaggtgccagcaggtcatcatggtcaagaagccccacaaattcaccttttgccattgcaaacgcgcggtttgtgttctctgcaatgccaaggttctctttgagattgcagaatctcacccgggaatctccggctgaatattctgccagtactttctgcatctcctcattgtccggacttgcatttacgatacacagctcccagtttgaataagtctgaacgatcagtgattctatcatctgtctcaaaaattctacaggtgtctgataagccggaactgcaatgctgatcagcggtgaataatcaaatttctgtttcctctgtgtttccagtgtttcctccgtcggaatgtaagcccggtaccatggaccatatggtacttcttccggttcaaaacgttcatgcagcctgatccagaattcctttggtccataatgcttcatgtagcggaaccctttccggatcgtatagggggaaagcttcctgaacattttcgtccactggatttttcctcctgcagatggttttttactcatatgataacctcgatttttactatgattttttattttaacattgtatgatattttttgcaagaaaggagagaaatgtgttatactgttattgtttttatggttactgttcacttacaatgaacagtaacttttcaatatttttatacacaggagtattatataccatgatgataaagaaaaaaagaatcactgcagccctgatggctctgggacttggtgctgtcaccatgttttcacagtttccggtatctgctgctgaagaaacagctcagaatacagacgccgccgcacagacagcagatccgtctgtcgtagtcaccaacggtatcgacggatggccccaggcttccgatatttcgtctgccgcagcaattgtgatggaaacttccactaacacagtcctgtattccaaaaatgcagatcagcccctttaccctgcaagcgcagtcaagatcatgacctgcctggttgctcttgagaacagtagtctggatgaacaggtaaccatgactgcaaccggtgtttccggtgttactgacggaggagccaatatttcctcacagttagatgaggttttcaccatggaagaatgtttatatgccatcatggttgcctctgccaatgatatcgcactgcaggtagctgaacatgtgggaggttctgtggatgcttttgtacagacaatgaatacccgggcacaggagcttggctgcaccaatactgtctttaccaatcctaccggtcttcctgatgagaaccagcatatcaccgcccatgatatggctctgatcatggaagcagctatggcaaatgacactttccgcaccattgcagcaactacttcctatacacttccggcaacaaatgtttccggcggtgaacgtgtacttacaaacaattttaccatgataaacagcaccagcgacggttattataaaccctgtatcggcggtaaggaagggtacacagaagcttccggaagtaccctggtatgtgaagcttccaaaaataacatgaagctggtatgcattgtattaaatggcgcatccggtgttaccgataatgaagcgattgcgcttctcaattatggttttgacaattttgcaccccttaccatcgcagacgatgattttaaccgtctttccggtggtacagtcattgcgccaaacggtgccacagaagataatctgaccacagaagatacttcttctgacggacagatcacacgccagtattactttggaggaactcctgtaggaactgcgattctggaagacgcagagcagcagacaaatgatgccgcagtaaccggtcagaagaatatggaggcagcacaggcatattctgcttcccatacaactgctccttattatatcatcggggcgatcggggcagcattcctgctgtttttcctgttcctgatggtcaaagtgatcaaatcctgaagtctacttctgaataccagacagtaaccatttctttgatagataaaatagataaatttaagggacttccgcaaaagcttttcatgcggcagtccctttatttcttttaaggcaagattaaaaatgcccagcaggcaaatggcgaaatcaccagcagtacagtcagtactctgtatatcagactccgcaccttttcatttttcactgtttttgtcagaatattattccagcccagcgtaacaaagtacatcagaggatataatgcaggcataagatatcttccctgtggctgattatcactgtaataaacataatacagaaacagaaataccggaatcataatcagaaataccatcatcaaatggaaaataccttctttattccactctcgggatatcacctttgttttaatcttccatctgtcatttccaactgctttccgctgtgcaacatacattttttttctcagatcaaatgtctcttttacaaaaaatacactgatgatcccaacagcaaagaacagcatatacagtttgctgaccgtatatggcatataaatttccatctgtccaaaagtaccgatgaaacttacacacactgtcagaatccagttatgataccagccgggatcctgataaaggataatatctttccagttccatcccagctttgcaggcgtcggatacagtgaaggtctgtaatccttctgagcatatttttccgcacattccgcacaggatttccttcccaggaaatctccgttatacaaaactgcgttacggatgaaccaccagccgcagagaactaaagtaactgctgcgatcactgctcctctgctgaaaaggaaacgaactctctgtgaaaaagcttcttctctgcagagtaataccgtaaaacagaagaagaaaaaactgcagagtatccaaccgtatgcattataataagacaatgcacatacggccattcccactgcaaggagtatacagtttttccatgtccagtcttctctcagataagaggcccatgcatacaagatcatggctgctgccagcagtgccagtgagtctgtattcacataagttcccataaagattgcctgcggcataaatcctgccagtgctgcaaacagccatctaacttctctggaatatttttctttcggaaacagtttgcccgaagcttttacaacaaaatacactgcacctgtgacaaacagtacatctgccatacgtgcaattttgaacatggagtatcccggatctgcaaaaagccgggatattctcataaataatgcagacaccatataagatacaaccggataatatgcataggaaattccccacactttattcctgacagccggatcatctccccccggaagagctccatgatgtttataaatgtaatctgcaacataatatctcatctgttcatccggccctgaattaaaaggctgtgtcatcgcccaggttgtcagcaggataaacgccagaaatacaaaaatgaaaatttctgttttttcattgatctctttctttttctttaacatatcttctttcacattcattttatagcaatttcatcttcagattcttttcagagaaaagtcctggctcttcagagtgagattggggttataataaggatctccgttcttcaggatctccggccattttttttcaaaggtggcaatttctttattaaatcgtgccactttttccggagtatcctcaagacctctggatttggattcataatggtataattccgcatatggattatacacgatcagatatcccgcctttctcagcttcatgcagaaatcaatatcattaaatgcaaccgccagttcctctgaaagtcctcccactgcatcaaatgcagatttcttcaccatcatgcaggcagctgtaaccgcactgtaatcctgtgcacagataattctgtgacaatatccggtggtacctctcttctgctggacaaaacagtgtcctgcaattccgccaaaaccgatcacaacacctgcatgctggatcgtatcatcctcataataaagtcttgcccccactgcgcctacatctttacgcatgcaataacccaggagttcttccagacagtccggattaatgatctctgtatcattgttaagcagaagcagatactcaccctttgcaaaagatgcaccatagttattaatggcagaatagttaaagactccgtcccagtataccatgcggaccttcggattctctgcctccagttttttgtaatattcaaaagtagcagaatctgtactgttattctctacaataatgtactcataatttttgtacgtagatttctgttcaatggattccatacatctcttcagatcatcaatatggtctttattcggaataataatagaaatcagtggatcatgatctctgataaacttcgttctgtacagccccagatattcacccttaaaaacctctgcgtggattcctgttctctcatagtgagcctgtactgcacgtcttccggcttcaaaggcataaagcttgctctcgggattctctgctgtggagtcctcatggcaacgccagtgatacaggatttttggaatatgacagatttcttcatcctttactgcttccacacagcgtaacacaaaatcataatcctgtgcaccgtcaaactcacttcgcagcccgccaactttttcaattacttttcgtgataccacaaacagatggcagatataattgaccgtacacagcaaatccggattatagtccggtttaaaatgcggctgaaagaatttatgtccatccatagacatcttatcttcatctgtgtagatcaccagtgtctgcggtttctcatttattgctttcacacattcaaataatgcattcggcgtcagctcatcatcatggtctgcaaaggcaatgaaatcacctgttgcaatttcaatggcactgttggtattctctgaaatctgaagcggctcctcatgagaaacgtatttaattctgttatccttcgctgtcagttcttttaacaattccgtcagcggtgactgtgcgccgcttccgtcagagaaacaaagttcccagtttgaataagtctgttcctgaaatgattctgtcagtcttctgagatatttctccggtgtcttatacagcggtactacaaaagaaatcttgggtctgtatccaaaggatgttttcttctgtttctccagttcgttcctgtccggcagatgatgtctgatccatttctgataggatggcggtccctgacgcacatttttaacctttgtcactaccttctcagcaagagccgccgcaccctgagatttccagtagcggattcctttttctacatatttgtctaatttctttgccagaatatcagcttttctcagaggaaccacatgtacagttttcttctcgcctgcataaaacactacatacaggcattttcccgaaacgttggtgatctcagaaaagaatcctgtctttcccggatcctgtgcttcttcaaacagctggttgacatccaccctgtctgttctctggatttcagcggcaaccggctttttatccgcatcaaagatacggacagtcacagacttcggtgcaatggcccaccctctgatccgtacagttccctgttctgcactctcttcttcaaaatatacctgcggtttatctctttttttatccagttcaccggcagtgatggaaaaccagacatgttttttatccggaaacttctcatagatcacaagcttatgatacccctccagattttccggtatctgaacagttgccgtaatctgtattccctgcattttctccggatctttaaaacgttccagtgcacttacattttcattttctttcacagacaccttcagtttgtgctgatccagatatgcctccatcaccgcatctttcggccagtgtccctgcacaatatactgtgtcctgtctgataaatgaaatctttctcttactacttcaaatatttctttaggcatgttaatctccgttcttctcctgttttctcagagaacagtctgtgttgtttaatgtcagattgggattataatagggatctcctttcaggagctctctttcccattttctccggaaacagtttacttctctggaaaaacgcagctgtttctccggtgtatcttccattcctctggatttggattcataatgatacagttctgcatacggtgtgaatacaattttcactccatattttctcactttcatacagaggtcaatatcattaaatgcaaccttcagctcctcgtcaaatcctccaactgctttaaaaacagaagtctttaccatcatgcaggcggcagtgactgcacttatctcctgcacacagcgcagacgtcccatatatccttccgcatcccgtggaagtttacataatacatgtgcggcaactccaccaagaccaactaccactcctgcatgctgaatggtatcatccggataatacagtttcgcaccgaccattcccacgtctttttgctgacaaagctgaagcatttcttcaagccagttctctgtaatgatttccacatcattgttaagaaacagcagatattctccctgcgcctctcttactgcaaagttattgatcgcagaataattgaattcttttttccatgtaaggatccttacatttgggtatctgtttttcagtgtctcatagtatacaaaggtttctttttccacactgttgttctcaacaataatgatctcgtaattcttccatgttgtcttctcttctatggatgaaatacacagttccagatcattaatgtgatctttacttggaatgatcacagaaatcatcggttcgccggaaatagtcagatggcttctgtaccatcccttcttgtctgcaagttccgctgttgcagaaacctctgccctgcggtaatgctcctccagtgcctttctgcctgcttcccagtttttcttctcctgttcttctgtgatcaggttctctgctttcatggaatgacagaggatctttggaatatgcacaatattctctgcctgctcactgcatcttaagagcatatcataatcctgtgcaccatcatattccggatcaaactttccggcctgttccagaatttccttccggattgcccagaactgtccgatataattattttcccttaatctgaacagattgaaatccggcttgaattccggctcagaataatgttttccgtctgcgctgatctcatcttcatctgtatagatcatatccgcttttttctctgtgatcgctttgaccatctgaaaaagtgcatcaggttcaggtatgatctcctgaccggcaaacagaacatactctcccattgcaagtttcagagatgcattaagatttcccgaaatgccgttgttttccgtaaccttcttgtaggaaaggcgggtctcttttttatattttttccgcagaaactctcctgtttcctctccctcacatgcatctgcaagacacagctgccagttaccataggtctgttctgtataagcatcgatcacactttttaacctttgttcatctgtatccgtcaccaccatcacaatactgatcagcggtgaataagaaaaaacagcatttctctgtctttttaattcctttcggaatgcgacatgatctttcagccagtcttcataatcctgatctccgtccttaagctgggaatttctcacataacggataaatcttccaataccgtttttctttatatattcctgattcttctgcctgttcttcagagacagcagtttcatctgctgatacagtccggtattttcccgttttattttttttacatttacagtataaattttctgtacatcttttcccctgaaacagatgcagatattctgatcgtttgtattctccagattgacagtaatactgaatcccagatttcttttctcttcttcggaaatcccctttgcctcttccacgtccggacgtctttgtctggtgatcgtacattccagaaccttcccatctgtaccctgtacaaatatctcatccggctccagctggtttacaacccagcctctgactgtcaggatactctcctgtgtgatctgttcctcatcaatatgatattcaataagactttcctcacaaaagtccttcacttctgcagctgtggcttcccagatgatttctttttcatctcccgctctcagcgcaagctgcagtttctcatgttcttctgcaagttttataatttccggtatctttactgtgaatccgacatttcccacttcttttatatcttttgtttcttttaaatctttggcaacatccgctctttcacaacgtgaaggttcaggaacggagagttcctttcccgagccataaagaatgaaatcacattctgactgatctctggttatcgcccatccggtaatggccagagtatgatcttctttgtcactgtatatttttttatctacactccaaagtatatttcccataactaaacccttttgatggcacgatacactttccatgccttactgccttccacctgatcgaccagagctttcttctgcgcaagctcctgactcatctgctccattgcccttttctgctctgcgtatactttccagaatttcttttctgtggtttgccggtccaggatctccatttcaatctttatggactttctgttctcaggaacagaatctactatgatctgcggatcgtcaccgccgaaatagaattctccggaggacacttcacagccatctgtgtgaaactttacctgactttcatcttcccatgtcagctttacaattttaagtcccttggacatttcgcccgggtcaaggcgaagcattgtggtattctccggaagttcaaactccgtctgaattttcccgtttctgaacagatatctcacagaatcagcctcattaaagctctttccgttatcccagaaaatctgaagcatttccagagattcctgtttcttttctctgtaataatcttctacttccacccggcccggagagatctgggcatacatatttctcattgctgtatgctcacccagaatatactgctggaaattatgttccatctccacataaacttctatatcttcaggcaggattcctgctttctcatagaaatcccgttctttaagtattccccgtttgtcattcagttccagataataaaagatcatcctgtaaaccagaaactgtgaaggtacaggaaatgtaaaggtccactcatagtcaatcacagatactttattctcagagaggataatatttgcaggaacaaaatcaatattggatatttctgtacatttcagatcagaacgcaggtttacatttccaaatacccttacaaattccggtgttttctcaaagggtttcttctcgtgaatattctttactttctttatataagagaagaataatttctccagttcctctgttctgccttcttccagaagatgatccagcttatcttccagggtgatacctgtcagatattccagctgcgcacagtcacctttgatccggcagcggtttacttcaatttcctcttctttatacattccggtcagttcttcgcagatagttcccagattccgtacatgagctgccgctttcttctgcgacggtactttcttcacagtcagctgcccatctgttgcttcactgatttccgtataaatggagagcttttgatctctctcattggaaaacttcacataaaccggtgctgtctgtggctgttcttttccgatcacaagaagaaaggaattggcaaactgcgggtaaagatcattgctcaaaagtgtattatacacctgagattcctgaaacaggtccagacggagtctgtcaaaattgtagtccctcatatgcagctctccgcttgcagggagatgtctgtctgaatgaatagtcattggaaatttgtaatccggatatggataataccagtcggcttttaagtttcctgcctccttcaaaattccattaaattcttttcttgaaaaagttttaaccccttttgttttggggtatccctggattccttcgaataaagttccaaaatggtcctctgtacatccggcccagtatttcagtcccagtctgttctcaatggccagaatgatctttccatccggcttcagatgctttgatatgatcctgagaaagtccacatagggattctcactccggatataggattctccatactcaaatacaccgatcaaagtgatatagtcgtatttctcagtaaggtttttctcgatctcctgaaaatttcccacaaggatcttaagattatcctgatcctgatgtctgtatgcattgatcttacttcttttcatagaaagctcgatgcaggtaacttccttcgccctttcacagagagctcctgtcacagcaccacatccggaaccaatctccagaaccttctcttctcctgtaaagggaatccagctcagaatattctccctgatatgagaaaaatgataaagaattggccagctctttctctcactgatcactctgttaaattcttccggtgcaaaatctctggaaattgcaagcatttcatcctctatcgcaccatcactgtatagatcttttcccggatagcacgtggtatccagaattactttcccgattttttcttccatatatagtcctcgcgctgattattttttcgcactgatatttgtcatcataactttctcagacctgttcttcgcaccgtacttccacctttgaatccatatcatagaatccaactgtatttttactggaaataactgttatgttacatgcgtcataaagtctgtggaataccgtaaaatctccgtttttataccctgtacatccaaatgacaggagatactcaccgccctgaaggttcatgttctgtgtaaatgttacagtacatatatccccttttccggagtgttctatctttgcattttcatacatggtattggtacctgtgatttccgtaccctgaatatttttaaatgtgtatgccatgatcggctcctgaatctcttcattaaaccggactttcatacgaattttgaagcagcttcccttttcaacagtattggaacatcttcctttatcatcaatgactctgaaatctgtgatctcagcaatacgacttccatattccagcatattgggatttacctgaaaatctcccagtccttcactgtcctctgccacaatctgctctgtactgtcagattcattctgttttacaggattctgtcctaccagaagctgtttgtacaggtcgaccatctgctttggtgaaccttcatccatctttacccctttgttcaaaagaataactctgtcacaatacttggaaacgcttccaagatcatgacttacaaacaggatcgtctttccctgtttcttaaattcctcaaacttgtgataacattttgcctgaaagaacacgtcgcccacagacaacgcctcatctaccaccaggatctccggatcaatattgatcgcaacagcaaaagccagacgcacgaacataccgctggaataagtctttacaggctggtggataaagtctccaatgtccgcaaattccagaatatcattcagtctggcgtcaatctcttcttttgaaaaaccgatcatggttccattcaggtatacattctcaagacctgaatattccatgttaaatccggctcccagttccagcagcgcggaaattcgtccgtctacctttacttcccctgctgtgggagtcaggacaccggtgatgatctttaagatcgtggatttaccggaaccgttggttccgataattcccacgcattctccttcataaatatcaaaatttacatcatgaagtgcataatgctctttataaagtttctttctggtaagccccagcgcttctttcagtctgtccgaaggcttatcatataatttatacattttggtgagatccttcacctgaattactttcttgttctccacgtgatttcctttctgttatgttcctgtgtttttcatcttcctctgacttatttcacgcttaccagtacagcgaaaattaagtttctgctatattaatattcgctgtactagtgtgccgacaagttgattcttgaaacaatcttgcaggataaatttttttatttcaaggcggaggaaggaggcgtagcggtggctacggcgaccgacgacaacgcggaaataagaaatttagacgcaagattgttctagaaatcaacttgttggtacactagttacaatacatctgcaaaatgaatgcgcagacgtttaaatacccagcttccgaacaggaaacacagaattgtaaatatccagaaatagaccgtccatcctgcatgttcccagaaccaggttttcatcaggaatgtatctctgtatccggaaacaatataatacatcggattcagtttcaggatcttcatgatcacaggatgtcccatcaggggtgaagcctcaacgatccacatgatcggagtcagccagactcctacttgaagcacaatgttgatgatctgggtcagatctctgaaaaaaataacgattgcacttgtggcataggataagcccaataccagaatgaacacacatacactgtaataaataatctgcagataatagaaatcaggaaatttcccatacgctgcatacaggatgatcgtaaacaacacaaagaatgcatgcacaaacatggcagaaatgatcttgactaccggaagcacactgatattaaaaacgactttttttaccagataattgtattccagcagagaatttgtcccccccatcagcgcatcctggaaaaagaaccatggcacaatacctgctaccagataaagaacaaaaggaactcccagatcccctgttccggaacgaaaacctacagagaatacaaaccagtataccaggatcgtgatcacaggctggataaacgcccacacaattcccagataagaacctgcatatcttgttttgaaatcattctttgcaagctttgcaacaagccgtctgttcttataaatatccatcggtaaagaaaaaattgtattcaatcgctcattctcctatttacggtactctttaaagcttccccatttggtatctttgtcagaaaagcttaattccattccttccggaatcggccattcaactccgatatccggatcgttccagatcaggccgccctcatcatttggatgatagaaatcagagcatttgtaaacgaattccgcatgctcggaaagtacaagaaaaccatgtgcaaatcctttcggaatgaagaactgtttcttgttttcagcagaaagtacgactccaaaccattttccatatgtttctgagccttcacgaagatctaccgccacatcaaatacctcaccatttacaacacgtaccagtttatcctgtgggtaattgatctggaaatggagtccgcgaagtacacccttgtgtgagcttgactgattatcctgtacaaattcgacatcaattcctgcttctttgaaatcattgtaattgtaggtttccatgaaatatcctctggcatctccgaaaactgtaggttctaccacttttaatcccttaattccaccacattctgtaactttgatttttcccattttattttcctcttttctttagctttctctgtgtttctgttatatctgttcgcataaatccatatgctatgcagacttagccataatatcttttttccttttttgcaagtgcaatgctcagaatgataataagaagaagcattgccgctcctatgatcagaagtatttttcgcagttccggcatccccgcagaagttttttcttctccgacagtatctgctttctcattttgatccgcctgatccgtatttcctccagatgtatcagaaagggcatccactgcaggttccggtgtaggtgtagcttccggaacttcaacgcttcccaaaagataatcattataatagtaatcatctactgtatttccattctgtgaattctcctgaacagtcaggttatccacagtcactccgtttggaactgatacttctccaccatttacctgtgcttttgtgaaattttgataaccatagttgaacagtgctgtggaatccgtactggcaactgcaaggtctgccgccttcattgtcactgtaatataagtagttccattcttctctgctgctgtcacaagagtgtttccggcctcactggtatatcctgtcttgccgccaatacagccatcataatgataactgctctccggggcaagcatcggatgatgcgtatgcagtacccttgactcactgttcatgttcgtaggtttgatcgtataatctgtagcgccgatgatcctgcggaattttttattcttcagaccttcccgcatgatcaacgccatgtcatgtgcagtagaatagtggtcaggatccggaagaccactggcgtttacaaaatgtgtatttgtgcatccgatctgagccgcacgttcattcatcatatctacaaaatgctgctctgtgccgcctacatgttctgcaatctgggctgcgacctcgtttgcagagcggatcacaagtgcataaaggcatgctctcatgctcatcacttctcccacctgcattccaatattgccggaatcccaactgatatcacgtgttcctgtttccgtaaatacaacatcttctttcagggaacagttctccaccgccagaagcagtgtcatgattttggtaatacttgccggataacggatttcatctccgcccttgctgtacagaagagttccgctgtctgcatccatcagtacccctgtctcagatgtgatctcaggacctgcaggccagcctgcaatctcattagttgaaatggatacgggtgtaacctctgaagcagcagcctgcgcagttccttccgcagcagcgcagatctgaacagcagtcatcg

SEQ ID NO: 412 - DNA, 12277 bp, unidentified
  source 1..12277: mol_type = unassigned DNA
tcagcggaacaatgcctccccgttcaccggttccccgttgtgggtcagagcaaagtatacgttgcttccttcggtgctgtagtatttcgtgggcgctgccacactgccgatggtgtcgccgggattcacataggaattctctttcactgtgatctccgtcagctgtccataagtggcctcatagccgtcacccagatccagggtcagcgccttgccgatctcctcattttcgaagatcgaagtcacttttccctgcgcacaggcggtcactgccgtaccttcttccgcggaaaaaatggtggcgggattgtatttatactgatccagtgtagcaaaataagtgctcttgtccatagagtaatgcatcagaatatcactctgcaccggttgctgtaatccgtcgctttctgcaaagtgcagtgtcttctcaacgaccacatccccacctgctgtctgctttcccccggtctcttccttttgtcggtcggcatcggaattctgctgctctttctgtgcggcctccagcagggtctcctgatccgtcaaccccggaatctctacgttgccggagcctacctcctggggcatatagtccagatcatcctcggtgacaggagttcccgcgatctcatttcccgctgtattatttgccgtcagtccggggatgttctcgtcctccttcagaagatgttcgtcgttattctccgtgatctcctgtaatttgtcatccgcattgttgggaagcgcagtgaagtccaaggtataaccatcatccctggactccacattctgccccttcatatagacccctgtcatggtcaatgctgccagtacaaaggctgaagaggctaacattataatacgttctttgttaataccgctctttttatttcttctcatatcctatccgcatccttcctgttccctgagtcaactgcctgctatacaatcgtttcaaccactttccctggtttatcctatagtcttgcccgattcatgggttttattcagaatgtcttcgatatgaaatttgcatttatttggaactattcagagccatgtaaatagcgtcgaatgtttgcattcgtaagaacatttgatgctatttatagggcgaagtaactgaatagttatatttattctatgcctgtgcggcataggcagccatatccacgtgctgtaccgtacccacatttccgttttcgtataagaaaataccggtcttgcggaccacagcattggtcgcattggcattggtagtgccgtcctgagccttacggtctccctgcagggtaaaatccgtagaaacgttttgcagacagatagcaccgacacccttgtcagaaagtttgtacagtacgtcgttgccgttttcatccttgcaccagatttttaattttgaccagatggaatcgttctcatcgatccagccgttgccatcctcatcatactgcgccagatctgcaaagccatccccattccgggtgccgaacagctcactgccgtcgttgatagtgccgtcaccgttcttgtccagtgccagatagccgctgccattcagcacggagatctcttcttccttgccatcggcatccagatcaaaataaaaggtctgatccgacacttctgccacatcagtatccaggttgatcaccagcggatcatggagcgtgaattctgctacattgagttgctctttgtagtattcctcgcatctgcggctcatatttacatttacattaaaattgatctctctgccatccttggtccgtacgcttcccacggtggaaaaactggtatcctcctgttctatgttccaggtctcgctcacatagttcaatattttcacacgggacgtgaccagattgaacacgtctgacgcaggtgttgcggttccctgtgtgctgccggaattcgtctgggtattatttacgctattccctgtattccagctgtttccggtctgattaccgctgctccatccgttttcctgcatccagtcccgcaaagtgctgttcctggacgggaataataaatcaaaaatataacgcaccgtatattcccggatggtagacaatgtctgttcactggcactgcttcgcatatcccatctggcagaagataccagaaaacgactctgccagtctttggctgtcatcgtggtgttctctgcagtgttctcctgttcctccgtgttctgtgtggtatcctcaccattcggtgtcttctgtcccttagtggatacatctgtcagacctgcctgataatccgttatctcaaatcgtctgacgcttgtcttagaagcgtgatagcttctggcggaatccattcctatgcttgcggaatcaattctcaaatctgtaattttctcctttccccgacctcaccacgaaccaacagggcgcgcttcctgtaacgcttaacagttcaccgccgcatgtattcataaaagcgcctgctccgcagtcgacgccgctaagcggctcatcttttatttcatacatgcggcgctccgctcatgcaatatcatatgttctgctttgtgtgccagcacccacgcagaacatatgatattgcatggctgaactgttaaactaaaaaagatggtaaagaaacagaatacatataatatgcctctgtctggttaccatccgtggtgtcattatcaaactgtaaaaaataagtagcaggaagtgactggccttgtcacctctctactacttatatcgtccgctatggacattttatttagtgttaatttactgctgtttgggctgagtgggagcgccaggggttccgggtgcgggaggcaccggtctgccggctgctttcagctttgctgcgatcatgctggctaccatttctctggtcaccacgatgttgccaccgaagggattgatcacgaatcccagcgccgggctgatattgccctgtgcatctttgcgcagcagcattcccgcataatcgtcaaagttcatggcgaaagtctgctgattctcctcatctctccacctttttagctctgtccagtcagtgaacgccatgaagaacttccgaccgtcctcggtggacagcatcgggaactgtactttggcatctcttgcgatggtcacccggccgttttcatcgggcacaggcaccggatcgatcacgaccggagacaggaactttgctttctgcagttcatccaggaacatctgtctgtgttccggggtgtcctctgcttttaataattcaatggatcccaccatcatggggttggataccggtttgttaaattccatattttttctccttacttctcattgtaactattcagcctctcttcgcgaaacgcatctgcgatggttcgtcacatgtctctgaatagttacactcggttatagttgatcaggcatcccttcaggatgatctgacgttcttcgtcggtcagctctcccagcttcagggtgaattccttcatgccttctccggttgttaccacatatgccttaatttcctcggccttgtcttccacggctttcttaataccaggaatgaacaggtaatccagattcttgaaaggcaggtctccgggctggatcaggaaaggaagcatgccccagttgatcaggttggaacgataacgcttggtggcatactcattggcaatatttgcccagccgcctaataccttctggcaggaagcagcctgctcacgggcagaaccgtctccgggcttcactgcgaaaatagtggaaccgaatccggtgttctcacgacttgcatcgggatactgtttctttacttcacccataacatccttcagtaccggaactgcctgacagggatgtccgccgttcatacgctctttctctgccttctggatctccttggcacgtcctacatactgcggatccttacggcttaaagtgaactctgccagtcccagaggattggagcggtaggaagaggtctcaccggatggaatcagctcatcggtagtagttacgggatcgtggatctcggatactacctgcagtaccagattctcaggcagggcacccatagcgggccagtccttgatattggggccgaactggatctctacgctctcgtctgccacaccgtgggaatcgaagacacggttcttgtaaatattgctatcgaaatgatatttgtattttccgaaatctccatcgaagtccgttgcggaagtcagcacacccttgttggctgcggtggctgcgatggaacgggcatccatcagagctacggaagcgatctggccgttctgcagcttggagccttcacggttcgggaaatttctggtagagtgacggatactgaatgcgttattggcaggtgtgtcaccggcaccgaagcagggaccacagaacgcagtcttcatcactgcaccggtctctaagatggtagccgcacagccgttgcggatcagctccatgtatacgggcatggatgcgggatatacgcttaaagtaaactcatccgcaccgatgtatctgcccttcagaatgtcggcagccgcacagatattctcgaatccgccgccggcacagcctgcgatgataccctgatctacaatgaacttgccgttctttactttatttttcagagtgaagtctaccgcaccgtccagacttactttcgcacgcttttccgtctcatccagaatatccatcaggttcgcattcagctcttcgatggtgtaagtattgctgggatggaacggcatggcgatcataggacggatcttgtccagatccacctcgatcaatccatcatagtatgccacctggccgggattcagttccttatagtcttcggtacgtccgtggatctcatagaactcacggatctggtcatcggtcttccagatggaggacagacaggtggtctctgtggtcattacgtcaatgccgatacggaaatcagcactcagggaagccacgccgggacctacgaattccattactttattttttacatagccattcttgaatactgcgccaatgatagccagtgccacgtcctgaggacctacacccttcacgggagcaccctttaagtatacggctaccacgccgggcatgttgatatcataggtctggttcaacagctgttttaccagctcgggaccaccctcgcccatagccatggtacccagtgcaccgtaacgggtatgggaatcggaacccaggatcatcttgccaccgccggctaacatctctctggcaaactgatggataactgcctgatgagggggtacatagactccgccgtattttttcgcacaggtcagaccaaacatgtggtcatcctcgttgatggtgccgcctacggcacacagggagttatgacagttggtcagtacatagggcatggggaacttctgcagtccggatgctctcgcggtctggataatacctacaaaggtaatatcatggctggtaagcttgtcgaaacggatcttcagcttgtccatattgccggaggtattatgctcctgcagaataccatatgccatggtgtttttcgctgcttcttctttggagatcgtaatgccggtcttcgcctgtatctgactggctgcttccggggtatccgctacgatgtccgtaccgtttaccaggtaagcgccgccctgtgttaactgaatcatgctcgtcctcctgttattccacttcttatgcgtaatgtgcatctaaatgtgcacttctttcattatactggattgttttctcagatgcaatgatcttataagatgtttttgccactgtaccacgctaaattttatttttctccgggaaccattcctcttttgttccggtgttgctataatatcctcagaaattatgccattttccgaaaatctatacgaaaacgacagttgtcggccgaattccggcggcagcggaaaggaaccttatgaatgtagtaatagctatcgattccttcaaaggaagtatgacctccatgcaggcaggtttgagcgccgccacggggatcaaacgtgtttataaagatgcacatattaccgtccgtcctctggcagacggcggggagggcaccgtcgatgctctggtaaacggctgtgacggccgtatgacacaggtgcaggtcacaggcccttccgggcaccccgttgtctgtccttacggcatcgtcgacgagacccataccgcaatcattgaaatgtccggtgccgccgggattacccaggtcagcggagaggaaaagaatcctctgaacaccaccacttacggtgtaggcgaagtcatcaaagatgcaatccagaacggctgccggcattttattgtcggtatcggtggcagtgccaccaatgacggcggtgtcggaatgctgcaggcacttggctttggctttctggataaaaacggaaatcagatccgcttcggagccaaaggactggaggatctggaatccatcactacggatcatgtgcttcccgaactcaaggaatgtactttccgcatagcctgcgatgtctccaacccgctctgcggagagcagggatgttccgccatctacggaccgcaaaagggcgctacttccactatgatcctgcagatggacaaatggctggcttattatgccgctctggccagagaacagtttcctcatgccgatgccaaatatcccggtgccggtgctgccggcggtatgggatttgcttttcttaccttctgcaatgccacactggaatccggtattaagatcattctggaagaaacccatctggaaaaatatatccgggatgcagatgtcgtgatcaccggggaaggccgccttgacggtcagacggttatgggaaaagctcccatcggtgttgccaagattgccaaaaaatatgaaaaaccggtacttgctttttccggctgcgtggccaaagaggccgttgcctgcaacgcagagggcattgatgcctttttcccgattctgcggaacgtggtatccctggatgaggctatgcataccgacaatgccatgaccaatatggcggataccgcagagcaggtattccgggcgcttcagatttttcaccgttaagaatcacaaaaggacatgacccaccggccatgtccctttgtatgtttcaatattgttttattattcttcatatccattcggattgttcttctgccatctccaggagtcttcgcacatctctttgatgccgttctcagccttccagccaagttccttctctgccagagaagcatcggaatagcaggtggcgatatcgcctgcacggcggggtttgatcacgtaaggaatcttcactccggtagctgcttcgaagttcttcacgatgtccagaacactgtagcccacaccagttcccagattgtagatcttcagtcctgcattctcctcaatcttcttcagagcctttacgtggccctttgccagatcaacgacatggatgtagtcacgtacaccggttccgtcgggggtatcgtaatcatcaccgaagacacccagctctttcagcttgccgactgctacctgtgtgatataaggcatcaggttgttggggataccgttgggattctcgccaatggtaccgctcttgtgagctccgatagggttgaagtaacgaagcaggatcacattccattcgggatctgccttctggatatccgtcaggatctgctccagcatagatttcgtccagccgtaagggttggtgcactgtcccttggggcattcctctgtgatgggaacaaatgcgggattaccgtatacggtagcgctggaagagaagatgatgctcttcacaccatgttttctcatgacatctaccagagtcagggtaccggcaatattgttctcataatattcccagggcttctgtacggactcaccgactgccttcagtcctgcaaaatgaatgactgcgtcaatctgttccttgctgaagatctcttccagagcttcacggtccagaatgtctgccttatagaaaggaaccttcttgcctgtgatggcttctactctggggatcactttctcacttgcattgcagagattatccaatacgactacatcatagcctgcctgctgtaattccactacggtatgactgccgatgaatccggcaccacctgttaccaaaattctcatacactctctcctatccgccgtgcataggacaatactatttgttcactatggcggctgcacaatctctcatctgtcagagccggatgaaattttttcttcgtttcttacagtatcagattactgtaattctatcgattcctcaataaccttatgttgtgaaaagctgtcgaaatgtttacagcaccacaccattctcggtgagaagttctctggcactttccacagagtccacaccggtcttgttcttgatcggcgcgaattcctttcttctgactacttcgaagggcagacagctgtccatctgatgaatcatatccagcaccagactctcgaatttataaccattgggagtatccggcttcaccggttctccgttctcatccagatacgggatcttcttctctacgatgtgcagtggcattttctcttccatgatcttctccagatcctgcactttgaagaggtaattcaggataactccgtaattatatgcaggatcgcctttttcatccttcgcattcatcagttcatcagtcagctcgtagtactccacgatggaaggtctgccgtcctccaagcacataactcctactttttcatccggtgcattcttacggaccaccttggagcctacgacacagcctctctggatcgtagcaccaataaagcagggatcagcgatccgctgcagtacattgtctaccgcaaacacattcagccactcaatgccttcgttatgtacgatatccagcatgccgttatttttcatggaaatgaaccagccgccgttaccgttgggagaggtggacagcttgcccttctcctccagataaatcttgccttcataatcggttgccgcagccatctcctgtttgaagaagtggacataatccgcgttgtatccgaagaaatcatgctcttttaaaaatgcgatcgttgcgtcattgttcttatcgctggtcatcacaaacaggtggatccagctgtctgcctgatgcacgacttccatcaggttattgatcaggcattcaaagatgtacagttcacgggtcagacccacattgtacatgcccttgggattatcggaacccagtctggtacccatgcctccggcaagaagaacagctgctaccttgccctgtcggatcgcttcgataccggttgcggtaaattcctccctgtttgcttcgatttcgtctaactgcatggcagccaacggtgtgatcactcctttttttgccagatcttctttatgcttgcaagcttccagaatgctcatatccgtagtttcgatctgattcagaatcccctgcttctcttcctcgttgagctccccgtaatacttcagaacatgttcctgaccatactttgcaagcttctccttagcctgttccagtgtcatactcatattcctacctccgttttattttctccgactattccaccccgggtaacagtcaattttctctattatacttgatatttcctgtgattgcaaaccttactcccgggatcgttcccgcccgtaagtcctgccgttaagattctgtaaacgtgttgcaaagattttgtaaatatcccgacaaaatggtgttaagggtcgctcaaaactattcacccgggggtatctgtttactataatacggtatgtgaagtttttaaggacttcatcgaatgttgtacagaatgacagaaagttgaggaattcattatgaatattggaattttaatcattgcaatcgtaggcggtgttaccggacttttatccacagcatatctggcagtcagtttccctgctgtgctcctgtggaagctctatcgcagagtagttcacagaattcctctcacccaatagtaatcagtcagctaccaacactttccctctaaaaaggacccggaagcttttgcccgggtcccttgtcgtatgtatgtattctattttattcctgcaccgggttccaattttcgtccatcaaggtcgcagttactgtaattccctccggtgcattttctgcgcagatcacaagatagaacattccttcttccgaatccacggcatattctgacggatcctccggcaaaaagacagaaaatccctccgggtactgctgcatctccagaaatcccttttccagcagtgcagttttgtaggcttcttttactgcatcccggtccccacaggagtacacctttattgaagtaaaagttccatcttcgctgtctgtctccgtacaatctgaaatcacagcatcgggatagataatatcctgctgcaccgctttcagatattccgttgacatccggacactctgtaagatctcaaaagtatcttttccatcctcggaatgcgccatgagtaccagactcaaaagcaaaatgagcagataacttcccagtgctcccgccagtattttcgcaaaaggattctctggctgccccagatttgtataagaagtgatgatccagccaaaatttcggtagtccactgcggtattacagtattcgcagactccgccgcccaaaatgtccacactgcctccgcagttggggcatttgtattcccggagtgccctgctgtgctgcgttaccacatcctgtctgccttccagttccagccggatctcctcataacggttccagatcttctttcctgtatccagtgtcaatcgggtcctcacttccacgctgattctgtaagactctccccgtgtctccgcctccagaaaacgcacaccgcaaatgcaacagtccaccacattctgataccgtaccaccaccgtatccagatcacaggatgcgaaaaagcgtacctgctctgccgtatccgccagatggatcattcgcagctggtattccagattctgaagaaaattacccgtggagaattccgggattgcggcctttactttcgattcgtcttgaattctcggctttctgcgagtctccatcacgatcaacattacaataaatataatgagcatgtaaaacaacgaccggaaaaataccggagccagaccaattcccagcatcatggctgcggctgcctttaccgcattgtatccgttcctgcccaacgccaacagcaaaaacataatgccgcccgcacagatggccagtaccgcaagagaaatcgctgtaattcccaccacagcaccggctttcataaagttggaaatacttttctgtcttgcgtcctcctccagagaaaatccggatacctttgtttcaaaatcactgacgagaaactttgccccgcaggcatcgcagccatcgatatagctggtcagttttccctcatgtccacagttagggcagataaccatatctccctgcacatccgctttcaaaaagctcgccactgcaatctccggtgtctttaggaacgcaatcttttttcccttgcggtaataagtccgtctcatttttaccggctgggtacggcggcagctataatcataaccatccttccagggaccatcatagtccgccagtcgtgccggctcctgcatctccatatccaccgtcagttcccgctgctgcagtctttttctgctcaggcgcagactttgccagaaaggctgggttgtctgctccatcaggttctgttccgcttccccgttgccctgatagaatgcttttaattccccgtagaagtcttctgtccgtctctcgatctctttccgtgcatcattcagaaactctgttgccatttcgtttttctctcctcataagtgattctgccgcgcaaaggtcctgatatcttttgtatcttatgtcccaactgctttgtcccatatagctatgtatccattatataagttggtacccggtatttcaagacactttcccgtatagaatgatttgtctcatcgaatatctagtgctggtgcagatacttctctctggtagccagtccgccgcggatatgacgctcggatttattcacatccaataccttccgcgcctgctttgccaacgccggattcacctgggccagccgctccgtcacgtccttatgtaccgtgcttttgctgatgccgaaggccttggcagtctgccgcaccgtggcgttgtggtcgatgatatagcctgctatccctatagctcgttcttcaatatagtctttcaa

SEQ ID NO: 413 - DNA, 19261 bp, unidentified
  source 1..19261: mol_type = unassigned DNA
gcatcgatgaatttgataaggattggcagtgcgttttcgcccttgtgacgctcgcccagatactccgggtgtgctctcagcacctctgccagttcctgtccatcaaatgtgccacccaccacgtagctggggccatcgggatgcgtggagcactcccatgtctctgccagcggggtcaagtcgatgtttttttcaaattcatcatttaaacgactgccgccccaaagataatccttgccggacggtcggagcaaaagaggcttattcttgttttgcataattgcctcctgcggtggctcaatattccagttcaaacttctgcttgtcgtggacgtcgatggcttcgcccaactgtacttcgatcagtttcagctccgtctcggcaatcacggtgtggcggcagcctgcggacatggtgatcacatcgcctgccttcacgttctgttccatgccgtccacaatggtcttgcccttgcccgcaatgaccgtccagacctcatcacggtgctgatggctgtggtagttcatctgatggcctgcattcagggtcactttgatggtcatggacgccttatcgatgtcaataaccttaaagctgccccaagatttttcagcaaacatgacccgatggtccagcgtgttgacatagggcttgatgtagctggactgctccttatccgaaaccagaatgccctccgggctggcagagaccaccacatccttcaggcccatgcagaggatcggcacatccagctcattgaccacgtgaacgttctcgcactgctcattaaacagcgcctcaccaaccgcatggctgtccattgcctcggtcagggtgttccaagtgccgaggtctttccaagtgcctgcaaagcgcatgacctcgatctccggctcgtgctccaccacggcatagtcgaagctgatcttgttcagggtgtcgtatttattgaacagatcatcgtagtctacaaaatcaatgagttcatgggcgcggttcagcacatagcccagcttgaaggcgaacacgccgccgttccagagcgcaccctttgcaatgtagtcctttgccacttcctgcgtcggcttttccttgaacatggacaccttgctgacctgctctttgccgatggggatgatataaccgtatttctcgctggggtaggtcggctcaatgcccatcagaaccaaatttgcgctgctgacggcggcacggtcgcccagtgctttcaacgcctcaaagtagtcgttttccacataggggtctaccgggcagacaacaacggattcttcctcgccgacgccctgcacgtccttcaggtaggccgctgccagagcgatagccggaaaagtatcccggcggcaaggctcgacgctgatgcccacttcctcgcccagctgattgtggatagccgagacctgagacttggaggtagcaatggtgaccgttgcatcggtatcgaccgccttgatctgacggtagacacgctgcaccatggattccagtttgccgtcttcgcggtggaaaatcttgatgaactgcttggaacggatatcgttggaaagcggccacagacgctggccggaaccaccggacaataataccagattcataatacttctcctatcatttaacaaaaaaggccgtggccctgcacggacacacgaccttttcaaatcgtttattttagcgttctgcacgcatcgggttgttcaggaagtcctcgtaggacaggcgcaggccgtcttccagctcggtcttgtaggtccagcccagattggtagccttagacacatccagcagcttgcggggagtgccgttgggcttggtggtatcccacttgatctcgccggtgtagcccacgaccttggcaaccagttcggtcagctccttgatggtcagttccttgccggtaccggcgttgacggtctcattaccggagtagttgttcatcaggaagacgcacaggttggcaagatcgtccacatacaggaactcacgcagcggagaaccatcgccccagcaggtaacgctaggcaggttctgctccttggcctcatggaaacggcggatcagtgccggaaccacatggctgtgggtggggtgatagttgtcgttggggccatagaggttggtgggcatgacgctgatgtagtcggtgccgtactgacggttcaggaactcgcagtacttcagaccggaaatctttgccagcgcataagcctcgttggtcttttccagctcgctggtcagcaggcaatcttccttcatgggctgaggagccatgcgggggtagatgcaggaggagccgaggaactccagcttcttacagccgttcttccatgcagagtggatggcattcatctccaacgtcatgttgtcatacatgaagtcggccagtgcttcctgattggccacgatgccgccgaccttggcagcagcaaggaacacatactccggcttttcctgtgcgaagaactcttccacagcatcctgacgggtcaggtccagctctttgtgggtgcgggtgatgatattggtgtaaccctgacgctgcagttcacgaacgattgcagagcccaccatgccgcgatgacctgcgacataaatcttagcattcttttccatcataataagatcgccttttcctcctattatttattcacgcctttttcaagatactccgctaggttcgtcttgatgtgttcctcagcgcgctcgacggcaactttcttcatgtcgtggtcgaccatgatcttgacaagctgctcaaacgtggtcttggtcgggttccagcccaactcgcgtttggccttgctggggtcaccccagaggttgacgacgtccgtcgggcggtagaagtcggggctgacctcgatgacagtcttgcccgtggccttgtcgatgcccttctcgctcatcccctcgccgacaaattccagctcaatgcctacatcgtggaaggccagctggcagaactcccggacggagtgctgctcgccggtggcgatgacgaagtcctctggtttgtcgttctgcaaaatcagccacatgcactcgacatagtccctagcatagccccagtcgcgcagactggacaggttgcccaggtacagtttatcctgcttgccctgcgcaatgcgggcagcggccagcgtgatcttgcgggtaacgaaagtctcaccgcggcgctcggactcgtggttgaagagaatgccggagcagcagaacatattgtaggcttcgcggtattcctttacaatccagaagccgtactgcttggcaacagcgtaggggctataggggtggaacggagtgttctcattctgagggacttcctcgaccttgccatacagctcagacgtggaagcctggtaaatgcggcaggtgtcttttagtccgcagagccgcacggcttccaacacacgtaacacgccagtagcatcaacgtcggcggtaaactccggcacatcaaaactgacctgcacatggctctgggcggcgaggttgtagatctcgtcgggccgcacggtgctgacgactgagagaatgctcatggaatcacttaaatcgccgtagtgaaggtggaagtgctcatggccttctaggtgggcgatgcgctcgcggtaatcaacagaggagcggcgtatgacaccatggacatcgtagccttttttcagcagaaactctgctaggtaagagccatcttgacctgtaataccggtaatcagcgcaactttagacatatattaacctcaactttcctgttgttctctacagttctctgcctagattagattaattgtaataccgcttattattttaacgaacatgacatcaaaactgaattcactatcttgccttttgatttaaatttcttacacaatattgcccaattttgaaagtaaccgctcaaccacagccgtcaaacaaaaacaaacccggctccagcaaatttcaaattttctttttgcaaatgtcaggcagtttatccgaccacggcagcagattatttaagaacgcgcggtcattcggatcatgctcccggccataaagatgttctgtaatctcgtccagtaaaaaacggaaatactcatacggcttcaaattgttggccttggccgtttctgcaatgctgtagagaatcacactggattgtgcacctctgggggtattgagcgtcatccaattcttgcgcttatgcgctgtagaacataagcgcaattatgctgtgaatagaattatgtgctgtagtgccgtgtaatcctttgaattcattacgcggcactgttttacagaacatgtaattagtgtatctgcccagtgataactgatattatgtatctatcaaatactaggtagatacatgaaacatgaaaccattaatcaattctatgaacatctgaaaaatcagaaccatgaaagcaccacaattgctggttatatttgaacgatttgtaaccttgaggaaccacctaatacgaatgatccgtttacactatttgtttatgttgtgaccaatctataaagcttaaaaggcagtcattaagtcacgcaaattttgtatacgcacaagcttctctcggctcttttttctttatgagaaccggtatcagagattttcgtaaaaggtgtacagcaaaagatcagtatgatcctttaatggcacaatacggaagttactatagggagtttctacatctttccgagtctgtaacgctagcagcggtacgcgaaaccaaaaagtttctgacatctatagtttctgatatacacgatatagcgttggaaactcaagctgtacgcacgtcaatgcgacttgaatagaggaaatttagtatctaccatttttcacgaaactctgagggcgtaacgccttcaatttgtttgaatactctgctgaaataatgtggagcaccaaggccgcactgatatcctatatcttctaatttcttatccgtaaaacggagcagctgcttggcttttgtaattcggagattctgaatatacgtattgatactcacgccgtactgttccttaaatatacgggctagataaaacttgctgatgaagaacctatctgccaatgcatccagcgagactttttcagtataatgtgtatccagataatcacgaattggatcaaggttcttccctttcaatacaccatctgaatgctctgtcggatgccatgactcattcataagaagaactaataactcatttaaaccgctgttgattcgcatatcccggatatagtcatctgataaagctagattaaaaagggacttatgtagctctgcaaacgccgtaaaattctccggatggaatattgggcgtccaccgcgttcatggtatttctgataaatatgctgcatggttacaccagaaaagtgaatccatgacaatgaccaaagatctgcgtctgtgcaatgcgaatacggctgctggcagtcaataaatacacaatcgccttgtgacagtttgtacttcttaccttgatactcaagctcaccggaacccgagttcacacaaaagaacaagtatgaaagcaagtgtgtgcgagaggaaacgtgaggctgttcagcctgcaaattgcctatttcttgaagatagagaagcgcggacttcgcaaaagctgttggagtataaaggacacgatttgaagtaacaattggggaggtgtcctgttgatcatgtaaaaaaaagtcattcattaccgaacaccttccccttatcttttcttattttcgcttaccatagaacagataattcgtagccggtatgctcttcagcacaacgattataattcccgtaagcaccactgtacagactaaagataatgtgaatgtcgtaaatccagaaaccgtaaaaaacgcatcattcgcacccttggagaataaatggttcgtatacatatgcgtcacataaatttcaagtgtatacattccaatccattcggcctttaccctctgaagctgaggagcttgtttctttgccacatagtaaataacatagtttcctgtggctccagcaatgaaacgcaacataatccccattaagttatcgtctattagatacagattcacattgaaggtaatcgccgcgaatatgcaaatgcagataaatgccatcgtgtcataaaagttagttttctgcttttcccagacaggttgtgcccatcttataagccatcccagtccatagaataagccgtaataaagaataaacttgattccgaggaaatctacggacgtcaactttgccatggcaagcagaattccataacatgcccctaccgtcattgcaacagccaccaactgttttacaaagccattgactttaccgcgaattaaattacacaatcccataagtagagatagaacgaataccacccagataaaccacattcctccgtccactctccatgctaggctgctcagacccgtcaacacgttgtgctcgtaatttcccaacaacaagacactaatcaaaacgaaccatgtaaggaaaggaagcagatatctctctgcgcttttccgataactaaccatcagtttccttctattctccacttctctaaaggagaaatatccggataccagcataaatcccggcatctgaactgcccagattagattttgcaaaatgttatgattccagtctgaaactgagtattcaaaaatgtgtccaaggacaacaagcacaatcaacacacctttataacaatcaagtgttttattgcgcttctgaccgactataatatcatagtagttttgcttgcttgcttgcttgcttgcttgcttgcttgcttgcttgcttgcagattatcgcccatggttttcctcctgtcaagaataatcatagcaactctatccgtctgacatatgcaaaaggtctactttttaagtatcttcttcaatttataaagcaaccctattttcttaaaacatacaccatacgctttttcattgtaggtttcgcatttttataagttcttcaatcgagcaattatcaatttccgaatacagtcggtttctatttttatgcttcggagcattgtcctgtaatcgggaatagaatctgatgtattcctcatctatacactgaatcacggaaaaagtttgtagatcgttaaaaaacttcttgtcagcttcagtgttcacgtaaatcagtgatagatccttgtcatctgagagatttgatcgatacgatttaatgccctaagcatcagcaataattaaatcactaattcggcttttcttttcgaaatcacattcatagcagcagtttctcaaatctacatttctaataaatgatcaatcatataaatcatttcctttgttttatgtaatccaatgcctctccaatgcttttcgatttcaagcagaatagtgtcgcgccataaactgtaacaacaacaaaaccttctataataagggaaatcaatgtgctaaaattcacaacttctttaactaataaaagtgctccaaccgataaaatcaaggctgtaattcccttttttatttccgagaagcagcttttgactgaaaaaccaggcaaataatttttaacatctcttatcagaagtattgttgcaatcatcatcgcaatactcgtcgcaagcgatacgccagaaatgccgataaatttagaaagtaaaaaacttaacgtaatattgcatacaattgatatcattccattaatcattggtgtttttgagtcttgaaaagcataaaaaaccttaaccaaattagctctagctgcttgaaagacaaatcccaacgaatatccaataacgacactatacgtcagtgtaatttcatttgttccaaaattaccacgtccatagaacagttcaacaatttgatctcccgcaattaaacacattcccgtgataggcaacagaatcaacgtaagataaacaagtattttttcaagactctttctcactttaccagtctgtccctgcgcaacccatgtactgcagtgagaaaataagaccactgaaattgatgtaacaataactccaactaccatatcatgaatcgatgcaccataatttaaaacagaggcacttccatttcccaggcctgtcgaaatttggttgtctacaatctgatttacttcatacatagcattacctagcagtaatggaatagtaagctccagtaatttttttacttcgacctgatagtcaatctttccaataacaaatttaagtttttttcttgtagctgcagttaccaagacacactctgcaattccagaaaggataaaagcatagagcataccgttcataccaaatcgagaataaaaaaagactgctgctaagattaaaaatacgttttgaaaaaaagctattgcttttcctggcaaaaatattttatctgtttcgagaactgtattgacaatcaaataataacaatacaagataagttcggcagacataattctaatgtcgtaagccaaatcgctaatctgctctccctgatacgatggcgcaagaaatcttgccacaaatggcgcaaacaccgaaaacaaaagtgctaatacagccgagattggaagaaaagttcttagaaccgcattaatcaggccattcgccctctcccgtccctcattaactaagagttgggtgtgaatagtcaaaagtgaaatagacagtgctgagaatatcgttccacacaatgaagtcatcgtccccgttgcgacaaaaaaagcatctgtttctattgtcgcgccacagtatgccgcaagaactgactgtttgatcaaaccaagaaacttgattaaaacagtaaataatgaaaccatcactgttgaaaccagtatacttttcttgtttttcataaatttgctccattaagctttctgttcttcttgataaatatggcaatcagccataaataggataaatattagaaaacgcatatatgtcgatgataatgtaaaaataagcactcccgttgcaacaagtgcaatgcccatggcaatatcttttttaaaggctctttttaacgctacgataaaaaaatacaaataaaacaacaaaccaataatgccattttcaaagagaatatccatgaaagtgttatgtgccactctatcgaaccctgaataagaaggtgctgccccctgtcccataccgcatataagccctaatgggtgactaaataatgcattcataagatttccccaaattcttgttctccctccaagacttcctgcgtccgaggccccagtaaaacgatatagagtattagctggaatcatttttaccgcaacggatagcaaaaacatgaacccaactatgccaacaattccatagagtggttttcttcgtatttcgtatctcagcatccatactgtgtacaccagtacgacaaatgcaatacacagcaacccactacgcgatccagactgagccacaaaataaattgaaagaaccatctcgactaggagaagtgcccttataaatatgttgtttttccttaaaaggaactcactcaccatcgcaacaggaaggataaaccatcccgatagatagtttggatctgcacccgttgtactagaaattatccaaaacctattatcttgatatgtaccaaacgtgaagcataaaatcaaaagaacgactccctgtattacaaatgctttctttagccgttcatagtcctgttccgagtacgaaaactgaagaactaagaacaaaaatatatacattacagccgtattaaatagatttagaaatggtgcagcattaacgctccaatagcaagttagaaacgcataacccaaaaacagaagcaatgcactggtttcatcaattactattttttttctatatagaacacacaatcctgcaacaagaagtccaacagtatatagcaacttctcaacaccaataacatgttctaaaggagacagaacaataagcagcatcaacatagttgatacaagcggattgtttttccttgcttcatccctcaagttaatttaacctccaatgacatcatgaaaaacatctagatatctgctcactgttacacctatgtcatattcatttgaaattttcattaccatatcatgcatttcatttttcaggcacaaatttgcggcatagtggctaaaggcatgtttccatgcatccgcattatttgtttgaactaagtagccccatttgcacaccctataaagttccccagaattcagctgattatcatgaaatacctgtctaaatgcactaatatcagacaacatcattggacatccaagcgctaatgcctctaattggaaaatcgacaatccctcccaaagagaaggcattacgaccatgtccgccttagcaattcgacgcaaaacttccactctttctaagttgcccagtaattgaatacttttgttacttccaatgatatgctccagttcttctttatcctcgccatcacccacaatgtagtactttgcttttaaaccaatacatctttggaagcctgtaattgaaacgggcagatttttttgccttgacaaacgtcctacagaataaaaagtagtttcagaatctcgctcttgctgatttgtatttgtagcaaagcgtcgaattgcttccatatcaatcccattgggaatagaatagacatcattttttctaccaaatcgatgaatatactcatcgtatgctgaatcagagcaacaaataactttttttatcagaggactcgttatcttggcttgtaggtaatagcggctatactgcgaatgatatgtttctataacatttattcttttgttatttatggaagcaaagacccccaccaatgttgcaagcttaagatgaacattacatataattttctctccatcagcatacgagttcaatatacctcttagtttttctgctaccagtagaaaatgcaaaagaacatccttttgatttcttgtattcaagcattttgcacttgcacccatagtaatcaactcttttgtcatttcatcgttgtcgttttctcccttattaatgattccaataagcatcaatctttgattggctttaagaaacgctttgcataactcatatacaaagcttccaacacctcccgccttgctcaattccaaatcatttactacaacagcaattttcacattatcccccctgtatctgaatgctttataactgtatccaatcgtcaggtaaaaatccctttgaatcataaaacactggcgagataaccattttatccttattaggattaagcatagccgcccaccaactatatgtactgtacgcaataatattatttttgcagtgcatcatactcgtaaagtcaccaatcgcatcgttcttatcggagttgtcaacaaacttcattctgtccaaacccgcgaattgtactttacaccagtctatgtcatcactaaacacataaaaaactgtattgggtttatttctagacacttcttcaatcgcttttttataataagctaaatcagccaagtgccccttcgaatgcaactgatctgaacgtctgacatgaatagccgtgctatcagtcgatgaaacttcattaactaatagctgcgtcttttcgctaatcttttgagggacaaattcttttcgcaaatcatcaatgctctctttcaaatagatagccgcatagttatcatagtagccatttagatagatattgggacgctgcataaggtttagatagtcatatttactatctgagcctaccacagcccattcaccaaggtagaagcgtgacacatttaaatactcaaatggttttctaacaaaacggtgtccaaagacgcgaactttcaacggcaacttcttgtgttcaattatcgaggctgatggaattgtaaacttatcaagttcatacttacgatgagtcaaccacggtacgttgccttctccatcaaaccactcaatatcaagtttcagttcatctccataacgtttagctaatgtatagccaaacgcatattgaaacaattggttaccaagaccacctttcaaacgcgtgacaatcatttaatttcctctttctctactttttcgacgattttcttgaacgcatctaactggttttgatagtagaaatgcgtaaggaaaaagctccgacatttttcattcattacttttcctgttgcctctatattcttgatagcatctgtgattgtattgcactcgaaatcatcaataaatacacctgtattccccggttccacaaattcttcaaagctccccaatcttgttgcaataactggtgttccctgcatgaatgcattcggcagcacaccgctttgtgttgatcgacgatagccattccacgttgcaagacttcgacgataagcagcactcatctcttcttctgttaaaggccgcccttgttgaattaataattgcccttcatcctgcatttttttgtaaataggatctgcaatcatatccgaaatatcacttcgcgtcgcaatttgaaatttttgctttgaaccactttcatacgcttctctaatatatttaataaatatatctgagccatgtggctctgcgtaggttccaatcatggaaaaatattccctacaagtacacgctttttcatcgtaatcatccagaaaaagcaacggtagaaaagccgctttttggaacgctcctttcatatatctcttgcaattttcctctgcgtactttgaacataatacaactcttgttgctttagcgcaaagccacacatttaaaatgcaggcgacagcttgttttataaagtagctaccatctttcatcaattcctttatccccatataaggttcatgcagaatatagaaaattttgcagttatgttgtgcgcaccacttaaataattcgacattctcaaatccagtattttgtactatagcaatgtcaggatgatagttttctacatttaccatatcggttgtataattatattcatccctatcaaaaaatctttcatactgggaattaaaataaagctcggtttgatatccacattcttcgcacattttataccaagctttcatatgaccaataaaaccaggactaaaatgtttagaaactattagaatattcatctctttacctccgcgtttaaccatttactatcacctcggcatagccttcttgtttgctgtgattgtaaattctattttctcagcactttctcaaacataaacttccgcagccagttcggagccaacgccgatccactacgaatcacacagctctttatgtactgcccttcgccaataaagccttggctcttcataaacctaaacagccttacctgtgtcttggcgtacttccaaccggctcttcttaaatacatatcaaagccagctctcatatggagcagcggctcttgaatgttgtacccctgatatcctgccatcagcatccggagccagaggtaataatcctccagcaaataaaaatcctgataggagccaaccgcctcgactgcggatttcttatacatcacgcaggggtgattgaacggattccgcttctttgcaaactctacgatttccgcattcgtctccggcggcacacgtttcgtatcaacggtattcggatcagttgtgaactcctccacgatgccagagcaaatgctcacttccgaatgtgtgttaaacacagcgatctgtttttcacatcgatctggataagcgatgtcatcgctgtccatccgtgcgaccagttcatttttgcaatgcttgattccctcatttagcgcattgccaagtccaccattctttgcgaggcgaacgacattcagggatttacccatttcttgttgttttgcagcgattacgctatccagtggtttgttcaacggtccatcacataccaatacaaaatcatttgtggagagcgtctgcgtttgtatgctctctattgcctgcttcagatactccggcttctccttgtgataaaccgacataagaacggagtatcctctgtattccacaacactcatagtccctctccgcatatcaaagattacagctcagactcatctcaaagagtctgagccatcctttattattttcgaataacgattagctttcttagtttttcaccagcacaaaatataccttctcttaacgtatctataattattccaagtagaaaaatgaccattgttccatacattaaataaaagatgcaataatttttatcgatatatttgctcaaatcaaaaacatctgagaacagatatttcattaccgtcggatacatatgaatcaagtacactccgaatgttgcattcgcaatataattaatccacctatcatacttaatcttccaactcactccccaaataaaaagcccgatggaaaccaacatagaaaccggtctaaagtttcctcgaatgtagtagcaagaatatgttgcagcagcattcaatcttattcccagaacgtccaatacaataatgctcaaaatcgcaagcaagtatgggataatgattacgccaacacattgctttttataattcgaatatgtaaatttctttctttttatataaactacagctgcatatagcatcaaaaatgcacagaagttatttgatcctaagtcaacatacggaattaatgttgatacactccagacaccaaacattactacaatacttttttttaagttgtcatcatctaatgttttcagacctttatgataaaagggccacattaaaagaaaaactatgtatgttgttggataccaccacaaaccaaataaagttggaaatatagacttcagcactaatgttaagcttaccccccctattgaaaattaaggaaaggcaaaggagacttatactataaaacaaaactattcgctccaatctgacacaggaagagaatgaatattttagattgatagaatcttctgcctttgaactcaaaaaccacgctgaaatcaagaagaataaattgtttccaataaacgcattattccccaatatctgcaaaagtagcttgttggccgtcagtccaactatctctgtgtcaacgttgaatgcattctttgatactaaatgatgcgccactatcatcagcatcgccaaaatctttaacagctgaaaattactttgtttctttaccataatgcctccctgcatataactatgttacacactgccactatgtcttgtaccgctgcggtggggctccactacgctcaaactcgcaccatttttgacgctacggtaaccgctgtctttagtcctgatgacactatcattcgctacagtagcccctgcctttattcccgattccactcgttcatgctacggtagttcccttgcttattaccccacacgaatgagcatgagatactcacatccgccttgttatctccaagaccgggatgaaattgcaggtgatgttatcatcgtcaagtcccgaaaccgctatgtgaaagtcaccgcagtctcggcacatcccctcacggtgcaatcagacataaacccacgagctaccgtcgcatccataaaagtgcattttgggggcgtaaaaacctcgaaatggcctcgttttgccctctctcacgcccatgctctcggcattttgcactatcgagagtgctatatcgcccctatgcaggtcaatttgccgactttttagcttaacgctactgtaagagctgcatttatgcccgactccgctttggaatttctcccaatttttagcagcttaaaatgtacaaaagcgtcgatttttagtggttttctccactcattgcagtggtttgaccctccgaaattccctcggtgctttcaggcataaacaggatcttcacggttgccagcataattttcagatcctcgatcaggctaggatgggcaatatacatcaaatccatctgcagcttatcgtatggggtggtgttgtatttgccgtacacctgcgcataaccggtcagaccagcctttgcctgcagacgcaacgcaaattccggcatctcctcacaatactgtgcggcgatctccgggcgctccggacgagggccaacaacggacaggtcacccttcagaatgttcagcaactgaggcagttcgtccagacggcaagcacggataatgtggccgaccttcgtgatgcggtcatccttgtcgccggtagaaagacgtgccacgccgtccttttcggcgtccacacgcatggagcggaacttcagaatctcgaactgcttgccatccttggtcaggcgcacctgcttgtagaaggcgggaccaccatcggacttgactgcaatggccgtaatcaggaacaacggactcaggatgatcagtgccaccagcgagatcacaatgtccatcgcgcgcttaacgaacaggaactccgggcttgccatgtaacgaccgacacgcagcatcggcagatggaacatatgcatcggccatgcgccgctcatgataacgtcgccaacgcggggaatgacgaacatattgatgcccttccctacgcagtgcttcaggataatgttgcgctcatggctgtgaacaccactgacaaaaacagtctccatgccgtccaaaatgctcaggtctgccaagcactccgacacgctcagggtaacctgcacgtcgtatttctggctcagaccatactcgttgatgagcttttccataccgtgtcgcacatcgtagaccaccgcggtcttttgcggcgggaaggtcttgtagtaccatttatgtgcgcaggatgcccagatcgcggccatcaccagctgtcccacgattgccgcaatacccggcaacaggttgcagagctttgcggacatcaggcagatcacgatgtacaaaataccatcggttgccatagcgccaaggatctggccgtacaccagttctgagacccgctgcatcgacatccagaacgcatcgtagattttaccaagtacaatgtacaggataaaaaacagacctaaaatcgcaaaatgcccctcccatgccagatttgcataggtctggttcgagtagtacaggaaccagcaagccgcaaacggcagctcgatcatcagaacattcaggatcttcacgaccctcaacatcacatcatgctgaatctttgacataatcctctccaataactcctttagattttctttttacgactcacgtaacttctccgacccaaattgcagcaagtgctttggatcgcgctatcaactacacaaaccgatatcttcccccgttttgtggttagctgaaacattcagtttttcgctttccctatgaggtccttgtgccaactccaaccggcgcggcctcgaatccgctttctcccaccgcatcccgatagcatccagcttggcaatacgttcctctgtcagaacagcgcagcttttttcaggattctgacgagtatatctctgccgcttgacccaatttccaaggttgtatccgttcggtgacacataatcagccgggacgttcaggtcgccgtgggcatcaaaatagcgcttcgcttcctgatacccctcgttccactggcggtcattgcggttgccccagtacattccgattctggtgagtcgctcgacctgctcgtccgtcagctttccttttgggtacgcccattgctggcttgcgacccattgtcccagccgttcaccagtcgctgtcacataggaacgcgggatattcaggttgccgttttcctcgtaataggccgcagccagcgcatatgccttttcccacttggcatcaaaaacactccacaccatgccaatctcatcaagctgtgcgatgcgttcttccttcaagcgaccattcagcttttgctgccgggtcttaagaatccactgtcccaagggatagccgtccgggtctacatactttctggccaccatcagatttccataggtgtcgtggtatttctttgcgacctcaaatccgtgctgccacgcgatttccttccggttgccccagaccatcccgatgctgtccagccgtgcgatttgctgctcggtcagattgccttggatctgtccctcgcgcacccggcgctgggtcaccagccacaccccaagactcagaccgctgggcgtgttatacagtttcgggacgttcaggttgccatgctctgtataatagatgctagcctcggagaaatagcgctcccaactggaagaaaggcttgcttgcagctgctcaaaaagcacccggcagtcgtgcacctgctcgatgacctcaaaccgttcggtcacgatcttgtcgccctcgccgttggcatagagccggtgaacagcctcctgcatctcgctttgcaggccggaaatactggtcagaccatcgaaattgttgaccacatccaagatcagcggggctgcggtgtccccggcggtcagggcacgtccgatctgctgcttgtaaatgatgggcgaaatcgttggtcggaacaggatcacgccggaaatgccctccacatggacgccctcgttgagcatatcgatgcagaacaatagcttcagacggtcgcttgtgtccgttttgaagttcgcaaaggttttgtccgtgttcgggtcatccgagtaggcttcgtataccacaacgtccgggttgaccccagcaaaccactccggcacatgggataccatctcgtccatgtgctctttgttggcgcagaacacgatgtattttccagatttgtttgtaatatgatgggcaaagaccctgtccaagccgtctgcctgctccagtgcgcggcgcaacgcgtccagatatttctgattcacatcctgaatgcccggtgtccgctggttgtccactcgtgcctgatattttgcaagcgctttctggtactggtagaccgtggtcacatatttcggggcaggcaaaatacccctgacgactgcttcgccaaggttcatatcgctggcaatatgtccatcgaaaagttcttcggccatatcgcggttattatccagatatcggatgtttgttgccgtcaaccccaggagctttgcatccgggcataactttaataaagccaccgtactttcgccccaacattccgcaccggcacggtggaattcatcgagtataatataggcaggcttctgtgccgctatttcgtccagctgtgcctgcgtgcagcacatcagtttggcgtaggtataaaagtgaacgtttgccagcggaaaatccgggtcgtttcttttcaggctctccagctgggtcttgaagatgtattcactgggagaaagccagattacgaccttct

SEQ ID NO: 414 - DNA, 16860 bp, unidentified
  source 1..16860: mol_type = unassigned DNA
  misc_difference 12143: note = a, c, g, or t
  misc_difference 12144: note = a, c, g, or t
  misc_difference 12145: note = a, c, g, or t
  misc_difference 12146: note = a, c, g, or t
  misc_difference 12147: note = a, c, g, or t
  misc_difference 12148: note = a, c, g, or t
  misc_difference 12149: note = a, c, g, or t
  misc_difference 12150: note = a, c, g, or t
  misc_difference 12151: note = a, c, g, or t
  misc_difference 12152: note = a, c, g, or t
caaaagcccctgccttcatgaatatagtaaagatgttttaatcgtctatggaattgtcagaggctccgtttccggcggcccggacagcaatgccgttgacttccacgctgccatccagttcgatgacgaggcactgtctgccgtcgatcattttagtgtttatcagatctgtgcgctcgggattgaccttgatgaccacatccggggtctttacttcaaagctgcggggattgtagacattggtcatcatcagggaagtatcttctccggccgtcgcatcaaagcactggtcgaagacctccatgcggtcattggccacgccgctgctggcgaaaatggtctttacttcatttttatccaggaccacgggttcgggatcttccttatgttcctgggcaatctcattcattttctcgtgaatgttcttcaccgtttcgatatcgcaggtattgcccagtgtctcctctaccagtgtctggaaggtctccttctgaccaccggcggacagaggaagcggacaaccgagcatcaggtctacgaagttctcctttaattcttccgcatccttggaataatacagagtgctgtgcaggtccgtgctgcggtcattgaatgcggggaacaggaaggctgcatccggcatacctaccacccagtcgcggatacggttctggaaggtattttccacagcgttatagctcaatcccggcttggacagatccacggggcagatgcaggtgaggatgtagtcatagacttcgtcggaagcatcctccatttcgatgccgtctctggtacgacccggtacatcgtaggcgtcatggatcagcagaatcagataatttcctacatattcataggattcgatgatgcggtcatagaactgctcaagcaatgcatcatccttcagacggctgtcccgcagacgcaggagaaattcctgagtgccgccctccgtttcactctttaacgggaattccagattcagcagattcttgccgatggtgccggacagactcttacgcagaatctcgaaatacttgaacatttcctcctccggcagtgccagaaaggcctgctttaattctgtctttttatttttttctccatccacatagcatccgcagatccgggtgatggagcagtttttcggggtgaacagctttttgatctcgctgatttcctgttttgtcatgagagtaccttctttcgatttgatgatatcagtatagtataaaaaacgtgatgggacaagtggaaccaggttatagaatttttagaaatccttcattttgctataattgttttctgacagataaggtgttatcataacattatcaagagaagccaatcaccacaggcgacatatagtgatggcccggagacgattttaccgcccccgcgctggcagaaagaaagaggcgcgtgtttatggaacaacatgatttaagtaagattcaaaaattacaggagaaaggaaaatccgacaagatcatcaaatatctgagttcttccgatgacacggtggtggtagccgcactggaagcgttgagccggatcaaggatgaagacagtgtcaacagcattgcccacatgatcgacaatccggatacgaagatccgtgtcgaagcagcaaaagcgttaggaagcatcggcaccgaatatgccaagacctatctgctgcacagactgaatgcagaacaggatgagaccgtgaagacagccatcaaggaagcacttcacaccctggcagagcatcattaatttgctttactcgtagtttttctacttatacattttccctcttattggcgtccgggtcattccgggcgcctttttttaccttttttattctgcgaaatttggaaaaatcttgcgatgggttctgcttgaagctacgacgcatatctatttataatagaacggtacgtgaaaaaagtagttttgtagtcatggaggtagtttaatggaaaaattaaacattacaactacaaaggataatgaaaaagtatacaaaatcctgggggatctgatgaatgccaacaaggaattccaaattatgatcacggttccttctacgaaaaacgccaaagacagcacagtaaaagcgacagaaaaaaaggaacagacccgggaagtcatccatgacctggaaaaggatgtcacggatatgatccatgagatcggagtgccggcacatatcaaagggtatcagtatctgcgggaagctatcatgatgtcggtagaggatccggcaatgatcagttctatcacaaagatcctgtatccgaccatcgccaagcggttccagaccacacccagccgcgtggagcgcgctattcgccatgccattgaggttgcctggagcagagggcgcatggagaccctggatgccatgttcggttacacgatcgacacgggcaaaggcaaacctaccaattcggaatttatcgcactgatcgctgacaggatccggctttcctacagaagctgaggtggaaccggcagactctaaaagatttgtaaattatcgatgccctcttttctatgaatcgtaaacatggtataatcaatctatattttgaatacaagccgtagcatatgtggagggtttacatgaaaaaaattctttttgccgcatcggaaggcgtaccttttatcaagaccggaggacttgcggatgtcgtaggatctttgccgaagtatattgacaaggagtattttgatgtaagagtgtttatcccgaagtatacctgtatgaagcaggagatgaaggataagctcaggtatgtgacacatttctacatggatttcaactggcagaatgtgtatgtaggtgttctggaggcagaggaagccggggtgcattattatttcattgataatgagagttatttcggtggtttcaagccttatggggatgatcccagatatgagatcgagaagtacgcatatttctgcaaggcagtgctgtcggcattaccgcttttgaatttccagccggatctgatccattgccatgactggcagaccggtctgatcccggtatacctgaaggagcgtttccatggtggagatttctaccgcaacatgaagtctgtgatcaccatacataacctgaaattccagggaaaatgggatgtgaagacggtacagagcattaccggactgccggagtattattttacctctgacaagctggaggcttataaggatgcgaacctgttaaagggcggtatcgtatttgcagatgcagtgaccaccgtaagtgatacctatgcggaggagatcaagactccgttttacggtgagggcctggacggattgctgcgtgcgagaagccatgatctgcgcggtattgtcaacggcatcgactatggagagttcaatccggagacggacaaaaatatcgtaaaagcctataatgcagtgaatttccgcaaggaaaaggtgaagaataagcgtgccctgcaggaagagcttggacttcgcgtagatgataagaaaatgatgatcggtctggtatccagactgacagaccagaagggtctggatctgatcgcttatgtcatggatgaactgtgtcaggatgatatccagttcgtggtactgggcaccggtgaggaacgttacgaaaatatgttccgtcatttcgactggaagtatggagacaaggtgtctgccaatatttattattcagatgcactgtcccataaaatctatgcggcttgtgacgcttacctgatgccgtctctgttcgaaccctgcggcctgagtcagttgatcgcactgcgttacggtaccgtacccatcgtcagagagaccggcggactgaaggataccgtacagccctataatgagtatgagagcaccggtacaggcttcagctttacgaattacaatgcacatgagatgctgaatacgatccgttatgcggagcatatttattacgacaggaagagagagtggaataagatcgtggatcgtgccatggccaccgactactcctggaaggtatccgccggaaaataccaggagatgtatgactggctgatcggataaagaactggaataaggtaagattacatatggcagataagaacagttccaagaacaattttatcatgcaggcgggaattctggcggcagccggaatcatcagcagaatcatagggctcctttacaggggccctttacagagtgtcatcgggaatctgggacttggttattaccagtcagcgtataactattatacgatcattctgttgatctcctcttatagtattccttcggcgatttccaaagctatcgcacagaagctgggagagaaggaataccgtaacgcccacagactgttccacggagccatgatctatgtactggtggttggcggtatagccagcctttttctgtttttcggagcgggattattcgtgtccggagcagcggtcacagtactgcgcacctttgcaccgacgatcttcgtctatggtatcctgggagttttacgagggtattttcaggcacataagagcatggcgcagacctccgtatcgcagatcctggagcagatcgccaatgcggtagtcagcgtaggcgcggcataccttctgatccaaatgtttatgggaacgatggaggttccggcggatcaggcagggcaggtgatgagagcaacctacggtgctgtgggaagtgcattgggaacaggtgtcggcgtattagtggctctgctttttatggcgggagtctatgctctgaatcgtggaatgatcctgcgcagagtgcagcgtgacaggcatgaacatgtggattcctacggacagatattcaagacgatcacactggtggtgacaccgtttattttgagtacggctgtatataacttaagcagtacggtcaacaacagtatctacacaaaatggtatccgtcccttcgcaatctggatacggtatctatttatgaaaaatatggtattttctccggacagtccttgacaatgtccaatattcccatagcctttgcatctgctatggcttctgccatgattccttccgtagcacagctgatggcagcccgggatgtgaagggagccagagagaagatcggtctggcggtgaagacgaccatggtgatctccattccctgtgcggtaggacttttcgtgctggcgaagccggtgatcagtctgctgttcacgaataagacggcagaggaattgaatctggcggcagctcttttaatgacattgtcactgtcggttatcttttatgcactgtcgactctgaacagttcgatcttacaggggcttggcaaagtaaataccccgatcatcaatgcggggatctcgctggtggtgcagacggtggcagcagtgctgcttctgatgttcacaagactggatctgtacagcattgccatcgctaatacgctgtattccggtatgatgtgtgtgctgaaccagtgggcggtaagaagagcggtaggctaccggcaggagatcgtaaagactttcgtcattccggcgttcgcctccgcgtttatgggagcggcagcctgggcaatctacgagggtctgtatatggtgacgaagtccatgcggatctctgtcattcctgcgatcgtaattgctgctgtagtctattttgtcatgctgatattgatgcggggcatcacggagcaggagcttcgaagcttcccgaagggatatctgttagtgaaggtagcgaagaagtgccgcttattgagataatgagaagcgatgacagctacgatgttctaggtgaagaaacagtgaagagaataagtacagaaaggagtctgcctcatgacaatgttattgtcggaggcagatttttgcgtacatggggcgtagatataaggagcatgctgattaagccccggggagatcgagagagcggggcgcagagaggaaaagaagctgattaagccccggggagatcgagagagcggggcgcagagaggaaaagaaactaaataagccccggggagattgagagagcggggcgcagagaaccaaagaagctgattaagccccggggagatcgagagggcggggcgcagagaggaaaagaaactaaataagcccccggggcatgaaaccacgggggcacaaagtcaaggtatatcatggaatagaagtgaaaaactttcaaatgtatcaattatctctggcagaacggatccccaccattcttgaataatgtgatcatttcttgaccgacactgatagtggagggcagatccgggacatcctctctggagaaccaggcagcctcgccaagctccgattcttgcaaagtaatagaaggatccccctccagcttcgcgaagaagccgatcatggcggaatcgctgaaggaccagggctgggatttgtaatagaccagatcgctgacctttaaaccgacttcttccatgatttcccggcgggcagcacccttgaaggtctcaccgacttccacgaagccggccaccagtgcccagtgacgataggaaccgccggcgtaacgggtcagcaggatcttgtcccgctcggtatccacgatggcaataatgacggctggagagatcttgggatattcgatctgaccgcactccggacagatgcaggcccgttccgtagtgctgggaactgtgggatgcccgcagcggccgcagaatttccggtccagacggaaacgattgatctgggtggcagtgattccagcaaatgccagatattccggctcaaaattacggaacacaccggaagcgtagaggtcttcttccgggagcatgagagcaccggcatcctccgtcgtcttgcggaagaatgctcggtcatcaatggaaaagagatattcacagtccagaaaaaaacgttccataggctgacggattcccaagagtccatggacttcttcaaaagtaggaagatatacttgaggatgttcagagatgccggcaccggcggaagtatccgttacatcactgttttctgtatgggagggcagatagaccttttctccgtcaaataacagcagataatcggaaggtttaggatcctggcttcggaattccgggtaatatttatgcggttcgatcttatggatcatcatagagtatttctccttttatggctatttttcagaaagtgttcataagaatatagtagtccactgtgggggaactgtcaaacgcaacagttcagccgcaccgttcacgggagtcgcgttaacacgcttttatgtcacttcgtgactacctttgctcatagattggcgcttagctcctgcacatatttgcccgcaaaatcatgcaagcatgatttctgcgcccagatatgttcagaactgaactgttgtggaaattatttgagattccgggatatttgtgttaaaatattttgtgactgttctgaggtgttcatttctcgaatgcccctgtgaacagttacggaatttatcagaaaatacagcatgagagtacaaaagtgagtatctcatgtggaaacgagggatagtatgttacagatgatcttgccggagggaagcagttctctccttgctttttttggaatcctttttgctttcggagcgacagtactggcgacggcaaaattaagcccgtatctgccgaaggacgccggaagagaatttgcccatgatggaaaattgtccgcgggaaagccaagaggcgccggaatcatttttgtgctggcatttgtggcatctgttttactgtttgcacccttaagcgcagagctggtgatctatctgctgctgatcgtggtatgcatgatgaccggttttctggatgacgcctccaagactccctggggtgaatacaaaaaagggtttctggatctgtgcgtggcggcactggtagccatcaccttcctgaaatacaactccaacgtggtggaactggcactgttccatgtaaagttcacgctgcctcccgtagtattcgcaatcctcacggtgatcctggtatggacctccgtgaacgtgaccaattgctccgatggtgtggacggactctccggaaccctgtcgatcattacgatcatgtccatctatatcgtggaccgtatgaaggacgtcaatgagacctattctttcctgatcctgctgtttgccgtatgcattctgggttatctgtggtacaatgcaacacccagtaagctgatgatgggagatgcgggttcccgggccatgggactgttcatcagcatcgctattttaaagagcggctgtccgtttttgtttattccgttggctctggtgctgattctggacggaggtttgggactgcttaaggtttccctgctccgcttcctgaagattcatattttgaaaaatgtgcgtactcccttgcatgatcatgtgcgtaaggtgtgggactggtccaatacacagaccgtattccgttttgccattattcagatcattctgtctctggcggtaatctacgcaatgcagttgtagaatgctgggcacaccgggacagcatagagactgcgaccggtcatcctctacaagaaaagaaggctggctgccggaaggaaaaaagtcggccgtcagaagaaaagaaaggcgtctgctgaaggaaaagaaggtcggtcgccgaagaaaaagaaggacggctgttggtagaaaatcagcatgtgccgagccgggagaaaaactgtcaataaatgatataagtaattgaacagataggaatggagaaattatgtacgatgaattaacacccagtgatatcaggaaaatggaagatgagatcgagtatcgtaagctggtggtgcgtcccaaggcactggaggacgtgaaggaagccagagcccacggagatctcagtgagaattttgaatattatgcagcgaaaaaatacaagaatcagaacgagagccggatccgttatctggagagaatgatcaagaccgcaaaggtgatctccgagaactccgccgtggatgaggtgggcatcaacaacactgttaccgtggaattcatcgacgacggcacccaggaggattacaagatcgtgaccaccgttcgcgggaactcactggaaggtctgatcagcaacgaatctcctctgggcaaggcactgcttggtaaaaaagtgggcgatatggtccatgtgcaggtcaatgccaatgtgggctatgacgtagagatcaaggcactgaaaaacactgaggatgacggggacaagatccgcagcttctaatgctttgcggaccccacaagctatagaaagaaagggtaactattcagagcctcataacaattacagaatattcttgcggatcccggtattcaatgaatattttgcgatagttacagggcttggaacagatacaaaaaaaggaattataaaaatgaaaaaatatctgctgtttgatctggacggtacactgacagatcccaaaattggaattacgacctgcgtgcagtatgcgctgcactccttcggtattgaggaaccggatctggacaagctggagccttttatcggaccgcccttacgggacagctttatggaattctacagttttaccgctgagcaggcggaggaggccgtggcaaaatacagagagcgttttcagaatacgggtatttttgaaaatgaagtttatgccggtattccggagatgctgaagaacctgcaatccaagggctattttctggcactggcttccagcaaaccccagatctatgtggaacgcatactggagcattttgatctgaaaaaatattttgccgtggtggtaggcagtgagctggacggcaccagagagacgaaggatcaggtggtgcaggagaccctgcatcagctgttcaaggagaatcccatagagccggatcaggtctacatgatcggcgacagaaagttcgatgtggaaggagccagagcgttgggcgtggagagcgtgggcgtgacttatggctacggaagcaaggaagagttaaaggaagcaaaagcggactacatcgtacaatccgtggaagaattggaaaaatttctgcttcgcggcagcgaggaactggtgaacagcaatcccgacaataaaaagaaaaatcccatgtaccagaggatctggaccatggtgtattcgtttctgatgtttatattggtgcgcaatgcagtgcagtatgcgctgctggcactgttgtatcagctggcacagtccggtgcttccggtggactggtagatctgctgatcctgagggatgagaccggtgcatataacggctattccggagatgtgtccagtatcatagcggcactgggcttcatcggcggagcactggcggtatggtccacggcaaagcttctgatcacgaagaacaaagaggatatgcatttaagccatctaaaaaaagaaggtaaggcaaaatatgccctgctggtggcaaccactatcggtgccgttatcggtttcaacctcctgtttgaacttctgggagtgaccaacaaatccgaagcctataccgaagttgcagcccagcaatattccgcacactttatcgtaggaatccttgtattcggcttcatctcccccatagcagaggagcttctgttccgcggagttatctacggatatctccgcagattcatggatatcaaactcgccatagccctgtctgcactgatcttcggtgtgtaccacatgaactacgtgcagggcatctacggctttctcattggctgcctcatggcttacgcttatgagtatttcggagaattcaaaatggcagtgttcgttcatgtggcatccaatgtcctcgcctactgcctgtcctacaccgccatcgccgtcaccggcttcgtcagttggcctgtatgcgtgattttcctggcagtggcagttgtatccctcgggatgctccacaaacagaaaaatatattttaggcaataaaaaagtacatttgtcaccatccaaatacttgataagatatacaaagatggacaacgtaacccagcagccgaaaacagggtaaggataagcaggccgtaagcagacgtcggcacttagtgaccgtactttggtcacttacgtgccgctacgctctgcgacagagtgcgaacgtgccgcgttccttgccctgttctcgactgcggagatattatatcttaaaaggagcaacatatgaaattcagcattatcgtagtatgcctgaaccccggcaccaaactgaatcagacccttgacagtatcctggcccagacctgcccagacttcgaagtcatcgtcaaggacggtggcagccgtgacggatccatagagtccatgcgcactgacgggcggatccatctctaccaggaaccggatcacagcatctacgaggctatgaaccaggcggtctctcatgtgaccggagattacattctgttcttaaactgcggtgacctcttctatgacaacgaagttctgacccgcaccgcacaattcatggaacagcaccctatgaaactacaaggcatctattacggagatacctacagcgcgaaaacggacacgaagatatcatccccgccccgaatcaccggctttgtctgttaccgcaacattccctgccatcagtcctgcttctatgccgcagacctgtgccgacagaagccctacgaaccaaaatacaagatccgcgcagattatgaacattttctgtggtgctattaccgggcgaaggctcccatgcagtatctggggcttaccgtatcttcctacgaaggcggcggctactccgagacaaaggagaacctgaaacgcagtgccgcagagcataaggagatcacggcaaaatacatgaaacccgtagaactgttccgctaccgcgctgtgatggcactgaccctagcacctctccggaccgcaatggcagaaagcagacatttctctgcaatctatcagggactgacaagcaaagtgtatggtcggagacaggaaaaatagggaaaatccccaaagagttgtgctaaaagcatggcttaaaaaagaaaattaacacaattaacagacaacagccgcgtgaacaactgaattgacaaattatctgacaattcaaggaaaaatctatatttacaaatgagaaaaataggtgtatagtacagaaaaggtcgcaatgnnnnnnnnnncttccgatctgctcgaaagagtctcattgcgaccttttttagttgcaggaaagtgctgaaagcacagtcttgcgaatgaggttctgaataggaacagacagattaagaagagagaaatagaaaaccggaaaggagaactatatgtttgatgtaaaacaggagctgcccaaggcaccgttatatcgggaagaatttgagcatgataactgcggtatcggagcctgtgtcaatattcacggagagaagagccgcgcgaccgtagagaatgcgctgaagatcgtagagaatctggagcacagagccggtaaggatgcggaaggcaagaccggtgacggtgtcggtattctgacccagattccccacaaattttttgccagagtgaccagggctctgggcatggacatcggcggagagagagaatacggtgtcggcatgttcttcttcccgcaggaagagctgcgccgcaatcaagccaagaagatgttcgagatcattgcggaaaaagaaggaatggaattcctcggctggcgtgaagtgcctaccttccccaatgtgctgggacataaggccgtagagtgcatgccctatatcatgcagggattcgtgaaaaagcctgccgatgtggaaaaaggacttccctttgaccgcagactttatattgcaagacgtgtcttcgagcagtcttccgatgatacctatgtagtttctctttccagcagaacgatcgtatataaaggaatgttcctggtaggtcagctgcgtaccttcttcgcagatttgcagagtgaagattacgaatccgccattgccatggtacactcccgtttctccaccaataccaatcccagctgggaacgtgcccatccgaaccgtctgatggtacacaacggtgagattaacactatccgcggcaatgccgacaagatgctggccagggaggagaacatggaatccgagcatctgaaaggccagctgcacaaagtactgcctgccatcagcaagaccggttccgactccgctatgctggacaacacgctggaattcctggtaatgagcggcatggaactgcctctggcggtcatgatcgctatccccgagccctgggcgaacaacaaggccatgtcccagaccaagagagatttctaccagtattacgctaccatgatggagccctgggacggccccgcatccatcctgttctccgacggagatatcatgggtgcggtactggacagaaacggcctgcgtccttcccgttatctgatcactgacgatgataccctgatcctgtcttccgaggtaggtgtccttcctgttgatcccacgaagatcaagttaaaggaaagacttcgtcccggcaagatgctcttggtcgataccgtacagggcagagtcattgacgatgaggagatcaaggaaaaatatgcttccagacagccctacggtgaatggctggacaacaacctgacagaattgaagagtattcacatcccgaaccagcgtgtccctgagtacacctacgaagagcgtcagcggatgcagaaagctttcggttatacctacgatgagatgaaacagagcattctgcctatggcaaagaacggcagtgaagcgattgccgccatgggtgtggatacgccacttcccgtcttaagcaagacgaaccacccgctgtttcattatttcaagcagctgtttgcacaggtaaccaacccgcccatcgatgcgatccgtgaggagatcgtgacttccaccaccgtatacatcggtaccgagggcaacattctggaggagaccccgaagaactgtaatgttctgaaggtcaacaacccgatcttgaccaacacggatctgttgaagatcaagaacatgaaggtagacggattcaaagtagaagtcgtacctatcgtatattacaagaacaccagcttagagcgtgccattgacagactgttcgtggaagtggacagagcttacagagacggcgtgaacatcctgatcctgtccgacagaggcgtggatgagaaccatgtgcccattccttccctgctggccgtatccgccctgaaccagtatctggtacgcaccaagaagagaaccagagtcgcactgatcctggaatccggcgaacccagagaggtacaccattttgctacgctgttaggttacggtgcctgcgccatcaacccttatctggcacaggataccatcaaggaactgatcgagagcaatatgctggataaggattactatgcagcagtggatgattacaacaatgctgtcctccacggcatcgtcaagatcgcatccaagatgggtatcagcaccatccagtcctatcagggttcccagatcttcgaggctatcggtattgcaccggaagtgatcagtaagtatttctccaacaccgtatgtcgtgtgggaggtattaccttaaaagatattgagcagcaggtagacgacctgcactctcaggcatttgatcctctgggactgaaaaacgatctgaccttaaacagccccggacatcacaagatgcgcagcggcggtgacgagcatctgtacaatcccgctaccatccatatgttacaggaatccaccagacgcggtgattaccagatgttcaagcagtacactgccatggtaaacgacgaagattccatcaagaatctcagaggactgatggacttcaattatccgaaaaagggtgtgcctattgaggaagtagagccggtagagtccattgtgaccagattcaagaccggtgccatgtcctacggttccatttccaaagaagcccatgagaccatggccatcgccatgaaccatctgcacggcaagagcaattccggtgaaggcggtgaggacctggatcgtctgaccgtcggaccggacggactgaaccgttgttccgcaatcaagcaggtagccagtggacgttttggtgttaccagccgttacctggtaagcgcacaggagattcagatcaagatggcacagggagcaaaacccggtgagggcggacatctgcccggaggaaaggtatatccctggatcgccaagaccagacactccacacccggtgtgtccctgatctctccgccccctcatcacgacatttattccattgaggatctggcgcagctgatctatgatctgaaaaatgccaacacccaggcaagaatctctgtaaaactggtatccgaagccggtgtgggaacggtcgcagccggtgtagccaaggcgggagcccaggtcatcctggtatccggctatgacggcggtaccggtgcggcaccgagaaactccatccacaatgccggacttccctgggagctgggactggcagagacccatcagaccctgatcatgaacggcctgcgtaataaagtccgcatcgagaccgacggtaagctgatgagcggcagagacgtagccatcgcagccattttaggtgccgaggagttcggttttgccaccgcacctcttgtgaccatgggctgtgtcatgatgagagtatgtaatctggatacctgcccggtaggcgtggctacccagaacccggagttgcggaaaaacttccgcggtaagccggaatatgtggaaaactttatgaaatttatcgcacaggagctgcgggaatatatggcagcactgggtgtgcgtactgtagatgaactggtgggcagaaccgatctgctgaagagaaaagagcatctgaccgatcgtcaggaggaagtggatctgacccagatcttaagcaacccttacgaaagcagcaagcagaaggtgaccttcgatcccaagcagatctatgacttccagctggagaagacgctggatgagaaggtgctgttaaagcaactgggcaaagctattgatgcgggacagaagcgcagcattgaagtggatgtcagcaacaccgaccgtgccttcggtacgatcctcggaagtgagatcaccagaaaactgggcgatgatgtggaagaggatacctaccatgtactgtgcaagggtgccggtggacagtccttcggagccttcattcccaagggtctgaccctggaactggtaggtgacagcaacgactacttcggcaagggcttatccggtggtaagctggtggtatatcctccccagggtagcaagttcaaggcggaggaaaacatcatcatcggtaacgtggcactgtacggtgcaacctccggtaagacatttatcaacggtgtggcaggcgagcgtttctgcgtgcgtaactccggtgccatcgcagttgtcgagggtgtaggagatcatggctgtgaatacatgaccggcggtcgtgtggtagtcttaggacccaccggtaaaaactttgcagccggtatgagcggcggtatcgcttatgtactggatgaaggcaacgatctgtacaagcgtctgaataaggaaatggtatcctccagcgagatcacatccaaatatgatgtgctggagttgaaatccatgatccaggagcatgtggcactgaccaattccgccaagggtaaggaagtgctggacaactttggagagtatctgcccaagttcaagaagatcatccctcatgattatgagagagtcttaaagaccatcgtccagatggaggaaaaaggactgagcgcagagcaggcacagatcgaagcattctatgccaacaccagaaagtaggaggccagtgtgaaaagta

SEQ ID NO: 415 - DNA, 13080 bp, unidentified
  source 1..13080: mol_type = unassigned DNA
ttattccaccgtaacactcttcgccagattcctgggcttatctacatccagtccctttgcgacactgacataatatcccagcagttgcagcggtatcaccgcaaggctggccatgaaatgctcgtccaccttcggcacatagacagcgaagttcacctgatcttcgatttcgtaattgccataggtagtcatgcccataaggtatgcacctcggctcttgcactccagcatattgcttatggtcttctcgtataactcgttctgcgtcaggacaccgatcaccagcgttccctgttcgatcagactgatggttccgtgcttcagttccccggccgcatatgcttcggaatgaatgtagctgatttccttcagtttgaggcttccttccagacaaacggcatagtctataccacgtcctacgaagaatacatcagacgcattggcatactttgcggcaaaccattgcaggcgctccttgtcttccagaattttctgtatcttctccggaatcgtcagcagttcggcaatataataaccatactgctcttctgtgatcttaccacgaactttggcaaactgcactgccaggcaatacattgctgcaagctgcgcactataggccttcgtggttgccaccgaaatctccgggcctgccagtgtgtaaaatactttatccgcttctctggcaatactactgcctaccacattgacaatggccatagtggtaatgcccttttcttttgcaagtcttaatgcagccaaagtatccgctgtctcaccggactggctgaccacgatcatcagtgccttcgggttcagggacattttccggtatctgaattctgatgcaagttccacacgcaccgaaatatctgccatgtcttccagaacatactgtgccgccatgcctacatgccatgcagaaccacaggctacaatataaatctgttcaaagcccttgatctcatcttcggtaattcccactgcttcgaaatctagcctgccatctttgatcacagaattcagtgtatcctgaactgctttcggctgctcatggatctctttcatcatgaaatgttcaaaaccggccttttctgccgcttctgcatcccatttgatttccgtagtctgcttctcgatttcatccccgtccaggttataaaaatgagcttctcccggagtcagctttgcgaactcaaggttgcctatataatacacatttctggtatatttcagaattgccggaacatcggatgccacataggtctccccatccgcaataccgatgatcatcgggctgtccttacgggctacccagatctcaccgggatagtcacggaacatcagctccaacgcataggatccgcgaatgcgcaccatggttttcgcaatggcatcaatgggaccgagtttatacttcttgtagtaataatccaccagcttgatcgctacctctgtatcggtctggctgtaaaatgtataaccatgcttcagcagtttttctttcagttccgtgtaattttcaatgataccattatgtacgcctaccacttccgattctaccgcaccggaaccggatctgctgcagttgccggagacatggggatgggcattgatctgactgggttcgccatgggttgcccaacgggtatgtccaataccacaggttcctttcaacgcatttccattgtccgttttctcgaccagattcgaaagacggcccttcgcctttactacctgtgccagggcatcgccatcgcggactgcaagtcccgcagagtcataccctctatattccaattttgacagtccgtccagaaggatcggtgctgcctgtctatttcctgtaaatcctacaattccacacatatgctaatacttccttatcattctaccgtgattccaccaagtacgggaatctccagtcgtttcagtaactctaattctgcaacaatctcattatacaaggtcgatcctgccttttctaccagaaccgctccctgggctgcacttactttctccatagcttcggcatcatacagcacgttattcagtattgtaacgctaaggtcttccttttccagagcagccttaagtccttcacataccttgtccgctccggcccccagattgcatcccatcagacagatactgttctgtccgttcttggcagctgctatctttatcgctgcgaatgccagctccatggactgctctgcagtaaattcgcgcttgccgtaatgtcgtaaaccgttaacccatctatccaggaacagctttttcttggaatcttttaccaccacgccaatctgaggaataccatatagatcctgcaatccatcgtttacacgaattcgactgttaaaaatataccccatacacaggaccgcagcatatataaaggcgaacaggacagctcccagcaccacatatttcttgcttaccgcaggattttccggaaccagctgctcctcttccacaatgctctgttctgcgtctgtcgtatcttccaaaccgttttccttcatcagaagcgtataatactgtttttggtcttctgaaaatgctgcttttgtagcggcaatggttgtttccaggccataaatcgaatttctgtaagctgtctgttgattcatcacatccatgttcattatgttgccagacacttcagaaagcaacaccaattcatgacttcccaaccgggtgttcaaattttcctgttgctgttctatataagtctttaccgcttctgcaattttcccgcaagactctgcatcgactcctcggattattattttcagactatcgcttcctccaatagtcaagggctccccattggtaagcgtcaaaccggaatccacgctgacagagaccagttcccctacatatgcagcttccagtccggtctgttgttctatccagtcgtacaatccgacactgtaaagggtatttctatagattgttcccaggcgctgagatcccttttcatctttttcctgaatattgtaaaccagttcctcctgtgcaacgttcataggatctaactgcatatagatagaatcctgcacatattgcttcttcaacgcacattcttttgcatcatcaacagtcgtcaataccaccgccagctgactgtcatccagactttctcttaattgtgccaactgttcttccatagccatctcaccctcagatgcatcttctgcctcctgtggctgcatattctgtgcattctgataagatctcgtatagctgaatgcccccataagaatcgctcccaaaactactgctatcagcaatcctctccaatgtgacaaaatatctgctatcatatccagtaaatcaatttcccgttctttcattttttctttgccctcctgtattccatgattcgcttctgtcattccatactaataattcattttcctacaccggttcaaaaaatgtatccggatgtcccggatcaaatatttcattacaggtcataacggttatcagattttccgtttcggacagatttataatactatgggaccatcccggtatcatatacactgcctctatccggtctcctgacacttcaaattcgatcttctctccggtgttgatattccgctcctgtatcagtccgtgtccggatactacaatgaactgttcccacttactattgtgccaatgctggcctttggtaattcccggcctactgatattaatggatacctgtccacaattcaccgtgtgaatcagttctgtaaaggagcctctcgaatcctcattcatcttcaactgatatttgaatttttccgtcggtaaataagtaagatacagggaaaacaatttctttgcaaaagaaccctccggcatttccggcatgagtaacgacaccgactgttgcttaaattcctgtagcagatccacgatctcgcctaaagtaaccttatgtgttgccggtacacagcaataccgtccatcgtctttcagtacagtatcaacaccgtcaaactcgcaacgctgctccttaccttccatgaggtcaaacataccttctatcagatcgtctatgtacagtaattccagttctgttgccctgtcgtttactgtaaattcttcatcgttcgcaacagcccaacagaaggtactgaccgcagaattatacttcggtctgctatgtcccatcagattaggaaaacgatacacggcaactttggcaccggtctctctcgcatattgaaagaaaagctcttctcccgccttctttgaacgaccatattcggaatctccaaatcttccagccaatgttgcctgaatggaagacgacagcatgattgtcgctttattctcatactttttaagcgtatccagaagcttcgatgtaaatccaaagttcccccgcataaagtcttccgggttctccgggcggtttactccagccagatggaatacaaaatcagctgacttgcaataagcatccaattccgcttctgtcgactgtatatcatattcatagatttcatcgacatgaatgttcggtctggttctgttcttattttctttgatatttttcaggttattgacgagggcagttcctaccatccccttagcacctgtaactaatatattcatcagttatctccgtactctctcttttcgttactgctcttttctccataccatcttgttcacgacatttacatagccctgtatgatccgcactaccttcatagatacattctcatccgtataatccgggcacggctttcctaaaatacccttctgtttcatatcaattgccatacccgttgcctgcagaagttcctgtgtcgtaattccagctaatataaagttcccggattccagtgcctccggtcgctctgtagaagtccgaatgcatactgctgcaataggatgtccgatcgacagataaaagctgctttcctccggcaatgtaccggaatcagatacgatcgccaatgcattcatctgaagtttattgtaatcattaaatcctaacggttcatttacccttacacggggatctaatttaaatccactggactcaagcttcttcctggatcttggatgacaggaatagagaatcggcatatcatacttttctgccaatgcattaattgcctcaaacagagatgtaaaattcttatccgtatcaatattttcttctcggtgggctgataatagaatatatttattcggctgcagtcctaatctatccagcacatctgacgcttcaattttgtcaaggtttccatgcagcacttctgccatgggggaaccggtcacatatgttctctccttgggcattcccatctcatgcagatactttcgggccggctcagaatacggcagattcacgtccgagatcacatccacaattctacgatttgtctcttccggaagacactcatccttgcatctgtttcctgcttccatgtggaaaataggaatatgaagccttttcgctgaaatggctgacaggcagctattcgtatctccaagtaccaacaaagcatccggcttgatttctgccatcagttcataactccttgcaacgacgtttccacatgtctgtcccagattatctcctacgacattcatccagacatccggtccgcctagttcaaagtcagaccaaaaaatatcattcaaattcttatcgtagttttgcccggtatgcgctacgcaacaatcaaaatattctctacagcgcttaatggttgctgccagacgaatgatctccggtcttgttccaactataattaacagtttgattgatccattatccttccatttaaaatcaaacatcccttaatcctccgccaatctttcctgaatataggctagttttgcaatggttgcttttgtctcttctaaagttaataatttagtattattggaattaaattctgtaagtgtatttctctttgcatcgccgtctttaaaatacttgtcgtaattcaaaccacgattatccgcaggtactctatagaaccctccaagatcaattgccttggcacactcctcgttagtgagcaatgtctcatacattttctctccatggcgaatgccaatcactttaatatcttcctttttgccaccaaataattcacacactgcttctgcctgcgtctgaatggtacaggccggagccttcatgatcagcaaatctccgttctctcccttctcaaatgcaaaaagtacgagatctaccgcttcctccaggctcataatgaaacgcgtcatagacggttctgttacagtgatcggattgccggatttaatctgatcaatccacagaggaattaccgatccgcgcgaacacatcacattaccataacgggtacagcatatcttcgtctttccggaatttctggattttgccactgctaccttttcctcaatcgcttttgtaatacccatggcattaatgggatatgctgctttatccgtagaaaggcatattactgattctacacctgcttcaattgctgcggtcaggacattgtctgttccgacaacatttgtcttcactgcttccataggaaagaattcacaagacggcacttgtttcaaggcagctgcatgaaaaatataatccacccccggcattgcagcccgtacagagttcagatccctgacatctccaatataaaatttaatcttgtcagcaacctccggcatctttacctgatattcatgacgcatatcatcctgttttttttcatcacgagaaaatatacggatttctccaatgtctgtttgaaggaatcggttcagaactgcatttccaaaagaaccggttccaccggtgatcattaatgtttttcctttaaataaagacatattttttctcctctcataactacttttctgccaagttaaaccattctacatagtcaaaatcatcataatattttttgtaagaaattttacttttataggccatgcatggtccaacacacccatcattttcaaatcctctaatatatactgctgattttatattgggatgtggtttgttaacaaatattactttattcttatatggcaaattatcaaactctactatatcctgctcagtgcacccatctctatctgtaaatagaataaacagtttatcatagtccattcgcttcgcccgttcattccattttgcttttgcctcttcttctgtcttataatgttgaaagtaaatcttaatatccttcaataagccaacagggtactctattccttcttctgttgtaaacttcaaatcataccccatatattctctcagtgatgataataactttatgaaatccttaggtcttagccaaagattaacaaaaggacttttaaattgtaacctcaaatcatgaagtatcattgccccgttacacttgctggcaatcaggcaaatatccttattaacaagacgtttcctttgcttagataaaaacattatatttctatattcatttctcagttgcctaagtacatccatcttgtgcttcctttctttgatatcactctctttacaaatactacgagtatttaatccttttgaaatatatctctggtatataccttatcttttacatcttccagcgttgcatcatatcgatttgcaattatcacgttactttcttttttaaacttttccaaatcggttacgattctgcttccgaaaaatgttgtctctgcattcagcgttggttcataaataatgactgttgcacctttcgccttaacacgtttcataattccctgaatagagctttgccggaagttatccgaatttgtcttcatcgtcagtctatagacacctataactatatttttttccttttttgaatcatatacattttcgttttcataatcataatacccagccatctgtaatacacgatctgcaataaaatcctttctggtacgattactttccacaatagcttctatcagattctccggtacatcctgataattagcaagcaactgttttgtgtccttaggaagacagtacccaccatatccaaaagagggattattatagtaatcaccgattctcggatcaaggcatactcctttaataatctgttgcgtatccaacccctttagctccgcataagtgtccaattcattaaaataactgactctcagtgccagataggtattagcaaacagcttcactgcttccgcttctgtaaatcccataaacagtgtatcgatattttccttaattgcaccttcctttaacatatctgcaaaaatatgtgctgctctgtgtaaattgtcatcgttcatatctgtcccgacaatgattctggatgggtacaaattatcatataatgccttgctttcccttaagaactccgggctaaacaatatattgctgtattgaaactttttacgaatggcttctgtatatcctactgggatagtacttttaatcactatgactgcctgtggattgcattctattaccatttttattacttcttccaccgcagaagtgtcaaaaaaatttttcctgctatcataatttgttggggttgcaactataacataatctgcatctccatatgcgcttttgccatccagtgttgctgtgagtcgtaatttttcctccctcagatacttttccacataatcatcatggattgttgcttgtttgttgtttattttctgcactctttccggcacaatatctactgccataacttcatgatgccgcgctaatagtatagcaatagaaagcccaacataccctgttcctgctactgcaatttttaaatcactgtatgctctcatccgcaaccccattctctctctgtttatggaacaccatcttcttgctcagaatataattcaatacaattactatcacactcaatgcgcatttactaaaaaagaacgattgtttcatcacttctaccaacaaaattacaccaaaatagtctaccagaaatgtaatccatctggcaaaaacaaaacggacaatttctgttataaatttatgaaatgatccgaatggtgttttaaatacaaagattttattggtgaagtagcaaaacacctttaccaccaccaacgtaatagcattcgatattttatagtcaattccgctccataccgcaaactgagccagtccaatattcagaattgtactgagtacaccccaaaatatgtagctatataattcttttttgttcacttgcttatcccttctttgcaagtaccatcgtccatgggaatggagtttttaccgatacaattttcatatcattattaacaaccattctgcaaaatttctttttggtccaatgttggatatgccccggtgtatttccaagatccttccattactttcctcttgccatgttgcatattcgccaaataggttccttgggaacacttaaaagtataaatccattttcattacacagttcttttatatttttcaatgcttgttccggatcttctaggtgttccaacacttctgaacatatcacaagatcatatcttcccttgttcaaaatgtgtttttcagcttctcccggctttcgaacctccattgtatagatatttccagtataaaagttaataccatgaatcttttcactggcctctgctattaccttttccgatatatcaaacgcatcaatctcagcattctgatacatatcttttataaatgaggttatttcgccttctccgcatccggtttcacatatctgacaaaattcctttcctgctatatccaacaactcgctgatggcatccttgaaccctttcatcatccattttacgatcggattggtcgaatgatatttatcatagtagttaccctccggttgaactacctcagtgctttttgtactcatctctgccatatgcctcctggatacttaatcctatattctcttttccttcataatcaatttttctcacatgatactgaatatcttccaatatcattctgttcttagccagtatatctgccataaatcctattataaatgtgatgaatcccataagcaataaagtacttgacagaataagagactgcacatgcccacttgcgttaacggttatcagtaaatataaatatcttatcccaagtatcaatcctgctataaaaggaatcgcccctacaaaagtaaagaactttaaaggcttatacataatgtaggctctaactattgtaaccatagactttctgacatatcccatcatactatgaaaaagtctggatggtcgtaattccccatttgtgcgaataggaacatgttccatgggaattctttctcttccggcctgcactattgtttccagtgtatatgtatactcattcgtcacatttattctcattgcggcttcacgactatacgctctgaatccactgggtgcatctggtatatccgtatccgacgctgccctgaccacccaacttccaaaatgttgaagcttttttttcattggagaaaagtgttctgtctcatcaatagggcggtctcctataacaatgtccgctcggccttctataatgggtctaaccagtttttctatatcttgtccgctgtactgattatccgcatccgtatttacaatgatatctgccccatttctcagacaggcatccaatcctgccataaatcctttagccaatcctttattctttttaaaattcacaacatagtgaactccccacttttttgcgacctcagtggtatgatctgtactaccatcattaatgatcagatattctattgtatctattccttctatagctttaggcaaatcgttcaacgcaatttccaatgtttcctcttcattgtaacaaggaatttgaattattaacttcatacttttccctttctattatatttctgagatacatcttcatcacttgactataattctatatgagttaatgtcagatctgaaaatctgtacaatactgcctttgatgtatcccctatccaatctcgttctatgtgatatacacaggctccatcctcatattgataaggcattatcatttgattaactaataatactatgttcgacggttcctctttgcatttaattacaatttcattttcggttttagtaacttctatatttctatttgttctgtttagcaaaaaaacattatcgtcaaaccgaacatacaaaacattcgaaaaatcacttttaacaacattatcacttatcttgtcatatttttccttatcaatcatactatttttcagtgtgaaaaagttaaccctctctggatttatacttatcggtgactgagaaaaaccactctgtaaaaaccagaattcgccatccaaatttcctcggtatagaaagccaaaactctgtaatgaaccaagatagttttccatatctgtagaatacacacttacttgttcattgccgtactcattaataagctcctttgtggcttttatatagctatgattatctgcataaaattcacttgcatccagagaacagtatacattaactcctgcaaaaagcaaccaacatatcactgtaattttcttcccaaatacttgtgacactactatcaaaatacaggttacgattacaaatatataacccaacttcagaaatgcaagattctccagacctcgaagtgatgcaagccaatcctctgccggtttccaggcaaaatttccatacaatatagcatagcaaaatacagtacaggctacaagcataaaaatacggaaaaatctgtcgattgctttttcttcctttttatatttctcggtaattgcataaattataatttcaattagcacaatataggttacatatcttcccaaaagcttaagcattccatctgcattataatccacaagagatgagtgccttgctgctacgaaaatcaataataatgaaataatcctcaaaaatatgatattttctctaatacttttgggaatatccttccatcttattttcagattttctccaacaataatacccgcttgtaaaaaaggataggccgtgtaacaaataatccatttcatttgtggtaacattttataactggtattctctggcccggagccagaactaaatcccaatgacaattttacaatttccaaatctattttacagccagacttcacacagtaggtcaataccacaccaccaagtaccaatcctacagaaatcccccaacatattatacacagtaatgcttcctttataacctttttgtttttcaataatggtacactacaactaaaccaaaatgcaaaccataaaggaatcaatataattgccaaatattttgtttcaaataaagcaactgctaaagcacccgcaatcgcactacttgacaatttattttttaacgcaattgtatcactaatcattatattgcgtcggctaatatagtacaaaatggttattaataatagcggtgagaataggttctctgccataatccaatccgaatacaggaaataactcggtgaaaaagctatcaacgtaagtaccaatcctctgtcttctctattttcaacaacagaagccagcattttgaagattactgccaacaatattgttttcaataaaatattttcaaagagcatcacattgcgtctccaaaataaaaggacaatgacaatataaagggatagacaaacggataatgaaaactgcttacagcttctccttgaaatatatccatggctatttgtttatatgtatattcatcgctgacgctcacacaagttccctttgcatagacataaatcagttgcagaaaaaaatatataataatacagctttcatatggtattcgtttctgttttctcatttatattcctcttgttccctattctctttaatacgtaaagctacaatctcaagcacactacatattaatgcaaaaaatacaaccggaattgccgacatcataattctattacaggaatcaccatatccatttctcaaaggatgcttccttccaaggcataatatcagatttatgagcacatatcctgtagagaaaatgagccagaaattaattcttttatttaagacaatcattatata

SEQ ID NO: 416 - DNA, 30148 bp, unidentified
  source 1..30148: mol_type = unassigned DNA
tcagttaaaaagtccgctcatactgtcaagctgaacctgagtgttggcactcattacaccgttcataaaaagcacctcgtcaattccgttggttttgcagtaatcaacaagattctgtttgaaatatctgaaatcgataacatgaacttcttcgtagttattggtgagatacggaacaaaagcgttgccgtagctttcctttacaacggcaatcttcttgcctgccgccgcattttccgaagctgatttcagaaccgtgagggcattatcacccataataaacacaccgtaggtgtttgaaccgccctctgcggcttcatagtagggactgtcatagcttgcgtaagaaccgtctgcctgtgtgatatccattgttacattataagggaacttccaataacttaccgtatcgctgtcaagaccgtctgccgagttggtaaacgagcctgtaaagccgtcaattttctgttcctcgcaatcatcaagcgaaagaacgggcaaatcgtttgtatcggcaaatgctgtgtaagcatagtaagcgccgaggcctgtccaatggtggtcgctcttaaagtagatgtaatctgtattatgttccgcaagacggttgtagcagttaatcggagttaccttatcggaaagagccgcataagctgccttgatgttgtcagcctgtgaggttgacggagcgtcactgtctttgagtctttgcggaagtcccatttcggtatggttaggaacaatcatatcataaacctttacggaactgccgaacttgtctgcaaagccgttgattgtctgagcatagttctgcgctcttgcatcatcactgctgaacaattcgtagcctattttgttccacacataaatgccgtacgaaagagttccgtttgtattgtcgtcctttatgctcggtgtcataaagtatgtaggagaaagctcgtctgctttgttagctgtcgaagattttgcggtttcgtcgggagatgccgttgtacccactgttcccgtgggaacgcttgcaagggcatcttcctttgaacagcccttaaaaattgaagttataataaaaataataacaaacagaattatcaatgcgctcgcaacgataataattctgtttctggttcttcttttgtttcttctttttacaggtcttctgacgggacgctgtgatgacggtcttgcggcatagcttgcaggacggcgctgttgctgtctgcgacgatattcacgggaatcaatgctgtcatcgaaattatcaagatcaaaataatcgtaatcgttccttctgctcatagtgttactctcccaaactgaagatttttaaattcaatttgaattcaatgaattatataagtgtattaattactcgcagtgtactcctgtttgaatcaaagcaagccttgctctgaccgtaaggacattatcacttagattatacaacagaaactcatcaaaaacaatacaaaaagcacaaaaaatacaatttccgtgaattaacatttacaaatgcaaaataataaattacacattttttgaataaaatcgcagtaaaaacagtcaaatttcttgaacatatatgcaattcgtgatagaattacagggtatggaattttaaaaaatccttatcatcttaaaaggagatatttttatggaatacaggttttccgacagggtttcaagcctgaagccgagtgctatcagagaaattttcaaatatgccgccgatccgagcgttgtatcgctttcggcaggaaacccgtcgcccgatgcatttccctcaaaggagattgcggaaatctcggcaaaggtttttgcagaagatccgatttcggttttacagtacagcgtttcggagggttacactccgctgagaaagcaccttacggaatatatgaaaaaggagcataacacaggctgtgacaatgacgacattctcatcacaacaggcgcacagcagattatggatttatgctcaaaggctcttgtaaacgagggcgatgttgtaatctgcgaggcaccgtcattcatcggctcgctcaacacattcagaagctacaacgcaaagctcgtgggcgttccggttgagcctgacggtatgagcacagaaaaacttgaagaggctttaaaagccaatccgaacgcaaagctcatttacacaattccgaattttcaaaatccttcgggtgttacaatgagccttgaaaagcgtaagaaagtttatgagcttgccaaaaaatacggtgttctcatcattgaggacaacccgtacggcgacctgcgttacagcggtgaatatgttccgaacataaaaagctttgatacggacggaattgtaatctatgccggttcattctcaaaggtaatttcaccgggtatgcgtgttgcttacacaattgcaccaaagccgatttttcaaaagcttgttgtgtgcaagcagggcaacgatgtacatacaaacatctgggcacaatatgtatgcgatgagttcatcacaaagtatgacttcaacgctcaccttgcaaagcttcgtgaaatctacacaaagaaagcgaacttctgcatggagcttcttgacaaatactgcgcaccgaaaatcacatatcataaaattgacggcggtcttttcatttggtgtgacttgcccgaggatattgatatgccgaatttctgcaaagaactcgttctcaaaaaggtttgcgtagttccgggcaacgcatttttaactaacgaaaacgaaacctgtcacagtttcagaataaacttttcaacaccgactgacgaacagcttgaaagaggaatcaaaatcctcggcgagtatgcaaacagtctttaatcacggaggggaataatggaaaatcagacaaaaaaagaggttgtattcagcgcaatacagcccagcggaacaattacactcggaaactatctcggtgcggttcgcaactgggttacaatgcagaacgaatacaactgcatttacgctcttgcagatttgcacacaatcacggtaagacagactcctgccgttatgcgtaagaatataattgatgcttatgcttcaattatggcttgcggtattgatgttgaaaaaagccttttcttcattcagagtcatgttcacactcacgcagagcttgcatgggcgctcagctgttacacacagttcggcgagctttcaagaatgacgcagttcaaggacaaatctgcaaagcacgccgacaacatcaacgcaggtcttttcacatatcccgtactcatggctgccgacattctactctatcaggctgacaaagtgcctgtcggtgcagaccagaaacagcacattgaaattacaagaaacattgcagagcgttttaacggtatttacggcaatgtgttcaagattccggacggtttcattccaaagaacggtgcaagagttatgagtcttcaggacccgacaagaaagatgagcaagtccgatgaaaatgtcaacggctgtgtacatcttcttgatgcccccgaggttataatgaagaagttcaagagagccgttacggacagcgaggcaaaggttcgctatgcggagggcaaagacggtgtaaataaccttatggcaatttacagcgcagttacaggtctttcatatgagcagattgaaaaggattttgacggcaagggctacggcgacttcaagacagctgtaggcgaggcagttgttgaagaacttcgtccgattcgtgaacgctacgaaaagcttgtggcagacaaggcatatcttgaaagctgttacagaaaagcagatgaaattgcccttaaaatcagcagccgcacaatgggcaaggttatgaagaaaatcggttttatttaaacccgaacaggaattttctctatgacaaaagcagaaagcaaagtcattgactttataaaaaaacacattcttttatttttactcgttgcggtaacgattattgcaattttcctcagagtctgcggaatggattttcaaagcgatgatttcaacagctttttaaattcgtggtggagtataatcaagctaaatgattttacggggcttgcaactcaggtgggtaactacaacattccgtatcaagtcataatctaccttatgactcttttgccgctaaacgctctgtatgcgtacaaaatcgtatcaataatattcgattttgtacttgcaatttcaaccgcaatgcttgtttactcgtttgcaaagaataaccgacggctcaaagcgatactcacctactcagccgtacttctttcggcaacggtgatttttaactcatcgttttgggcgcagtgcgattcaatttacacctcgtttataatccttgcaatcctgtttttgcacaaagacaagccgattgcatcgtttgtgttcatcggcattgcgtttgcattcaagctgcaaaccgtattcatcattcctgttctgctttattactggatttcgacaaagaaaatttcgattctgcatttctttataatccctgcggttgatgtgataatgtgcctgcctgcaattattatgggtagaccgtttatcgatatcatcacaatctacgctgaacagaccgactacggaaagcttattcagatgaactgtccgaacttttacgcactcatatgtgacggaaacgatataacatattattatctgttcaagcagttttcggtctttctgacaattgccgtactcggaattatgatgtgcattatcatctataaaaaggttgatttgaagaaccttgaaacttttcttctgacaacagcgtggactgtgttcacctgtatcatgttcctttcgtcaatgcacgaacgctacggttatctgcttgacattattttaattgtctgtgcggcagtaagtgcaaagcatttgtggattccgattgcgtcaatgcttataagcctgagaggctattgctactatctgttctcctacgagcttataaaccttaaattaacggcaatcatctacaccgcactttatgtttatataacattcctgctcgtaaaaacaattttcagagcaaaatcatctgataatgtttttgcaaaaacaatttaaaattaaacatattttaaataacaaacaaccgccaaaatccattatatcgggttttggcggttgttatttttatttattcaatgatttttaatttttgcaaatacaacagcaacaagaaatgtgacaaattctgtaattgggaacgcaagccatatgcctgtcatttgaacagcgctgtttaaaagccaaattacggggactaacagcacgccctgtcgcaacagttgaactacaacgccgggcataatactgtctgttgcctgttcataggttgcaatcattgcagaaaagccgctgaacacaaatccgagtgacataattctcattgccggcactccaaaagcacacatttcttccgatgccgaaaacaaaaacaatatctctttcgggaaaatcagcaccaagagcataccgacaatcatcataacagtcgcgataattgttccgctcttatttgcttgtttaaggcgaccgtactcttttgctctgtaattaaaccgcattataggcaaacagccttgaatcagtccgttcaccgtcataaaaatcaactgctgaaccttgaaatatgctccgaaaaatgcaaccgccgtgtccgaatatcgcaccaaaaacatatttgcaaaattcacggtgaatgctcccaacgcattcataacaaacgagggcaatccgtaggaaaatatcagctttatcatctgcggttcaaggcagtttttaaacaccggcttaaccttttgttttgtaagaaacagctgtatcaacgcaatgattgttgaaacaacatagcctaaaaccgtggcaactgcagctccgaccacacccattttcggaaacggacctatgccgaaaatgagcaaagggtcaaacacaaaattgaatacaacacctgcaatttgaaaccacatcggagcaatcatattgcctgttgcctgaagtattttttgaattacaatatgcaccatatttggtatctgcataaaaacgcagacgctcatatacgcaattccgtattcaaaaatctctttgttttgcgtaaaagccgaataatagggatttattatgaaaagcgaaaggaaatttatcagcactccgacaactaccgaaattaccactccgagagccgctgcagaatttgccttttgctgatttttctgtcccaaataacctgcaatcaaaacattaacacccacacctatccacacggacaacgcattcataagcgttgtaatcgggaatgcaagcgatactgccgcaagtgcctgttcatttatccccgcaacaaacatactgtcaacaaggttgtatgaatactgaaaaaacattgaaatcagcggcggtgccgacatttgaattataagtttgttgacaggttcataagccattttgttttccgttttaacgcccatattaacaccccttgcgtaaaataaaaatcgccatacacccataatgagtgtatggcgaaaataagaatcacatcttagaaaaatccataccaatttatatttatcatatcagtaagctaattatatcatacctgtaaaaaatattcaagattatcaccaaaaatttactttttgctttcaagccacatatcaagggctttttcatagacatcaatgcttgtgattccgagattcataatgaatgtgtgatattcctttgcgtcaaagcttgagccaagctcgctttcggctgtttcacgcatatcaatcatcttgaggtagcctacggtataggggagaaaataacccggatttgaacgggcaaggtcatacgcctcttttgttgcggctgtaacgctctcgctgtcagccgaaccgagtgccgttgacatatactctttgactttttcataatcccagccgttgtagttcacaccgacatcgaccatggaatagagaatatagccgagaatatcatttgcgtagataagcttcttaatgccctcgcttgtatcaaggtaatcaagcgtacattttgaagcatactgcgcccagccctcggtagcgccgataaagcttaaaatcttgcggacattcgggatatccttgtttgcatttgatgcggtaaactgataaagatgaccaggatagccttcatgggcaagagttgtgtacatctgagtcatacccttatttgcaaagtcggggttgattttgatgatattaacgcttgtatcgtcaattcgtccctgaacatagtacgctcccacattgtcgctctttgcggaatcgctcatataatctgccgtgtaagaggttgtaacgggagtcggaaagtcctcctcgatattctcaatcaaaaattcaagcacctcatcggcgtccttaaagtcgggtttgtagtcctgaaatttgctcaagtcatcctgcgaaacattgctcatgctcattccaacctttgtaaagctgtttgtaaggtatgacttaagctcctcgggagtcatactgctgcttgttttgtctttgacaattgccgaataatactttttgccgattttgccgtaaccgcaaagaccttcttcgtttttgcctgattttttgagactttcaagtgctgaatttgctgatttcaaagcaggaatgtagtattcttcaaaatactttttgttggtttcgacaacagtctttttctcggaatcgctaagaccgagtgactttattctcgactcaaactcgtcaacaagcacggacttgtcattcttaatatgcttttcgcactcgtcaattgactgctgtgcgatatcttcagccataaagtaaccgtcctcagcctgtttccttgtgaactcaatgcactcatccatatagcgttttgtgtccttcaaaacagcaaggtaaaggtcggtatcatccttttcatagaaagtaaactcggacagggtggtaaagagatttgcaacaattcccgactgcggtgcaaatatactctgcaattctgttgtaccctcatatgaaagctgaatttcaaagtagctttcaagggtgtcatatgtctgcttttgagaagaagtaagtcccgaacggtcaaactcctccaaatccgtttttgcctctttcagttcatcaaaggattcttttgtatcttcatcggacacatgaccgagggtatagtcctcctcgtcatatttcagaccgtagtccgacggatttgaaatgtcaaaatgtgcggtaagagcgtcatcctcaagttcttccgaaaacaaatcgtcacaatatttatcgaactgaatttgtgcatccgttttggttggttctgtgtcagaatcaaagtcacaggcacagacagaaaacgccataacggcacataacataacagcaagcgcacccttgagtgactttttatttataattttcttcattttgtcctccgtaaagattgttgtttaccaaagtataacatattatcgtgctgttattcaatgattatttttaatttttcccttttccgcagtaaccgtagcaacgctcaacaggcattgccgttcttttttaacaattgttgaaaactatgtggaaaatgtgtataataatcagccctgctcaattgtatttttgtaaattgtaaccatttgtaattatttgtaattttctctgtaggggcgttcattggacgcccgccttgatgaaatattatgtccatacacatatgttttgatataacataaattgtgtattcaaatttgcacgaattgggaacggcggctcaccgtaattttcaatttataaatgctttatcgcttcgcttaaatccgtacacaaaaaatctatcatcggtttaatttcgtctgtcggctctgacaaatcgggaaccataaccgtggtcatacctgcggcatgtgcagattttatgccgttaatgctgtcctcaaacgcaacgcagtccaccggctcaagcccgagcttctttgcggcaatcaaaaaaacctcgggatcgggcttgccgtttttaacatcatcaccgcacacgaatgcgtcaaatttatcatagagattgattttcttcataatcttcaaagccgtttgtgacgaggttgaagttgcaagcgaaattttacaaccgactgattttaaataatcaaaaatttcgtacaagcctttttttacaggcacaccgttcttttcgatacgcttaaaatagcggattctcgactccgccttgtaagcaggatagtcaaaatcatcgccgtaaaccgacttgtaatattcgtaggaatcctcactgcgaagtccgattgtctttttgaaaatgtcgagattaaactctttgccgtcctcatcaagcatttcctgccagattgaataaacaagcctttcgctgtcaatcataagcccgtccatatcaaaaactgcgcccttaaacataaaaccgccccttttttcgcttttaagtctgtatataatagcatattttacaaaaaaagacaaatcagttgtaattgcgacaaagttatgatacaatcatttgaatggtctgtgaaaaatataaatttgagggtaaggaagttttatggcaacatcaatttatgcaaaacctattaaggcaaaaacgattctgaagttcactctgccaaccgttcttatgatggtttttatgtcactttacacggttgttgacggaatcgttgttgcgaactgtgtcggaagtgacgcattgtctgcaatcaatattgtatatccgttcacgctcgtatttatggctgtgggcttaatgttttcaacaggctcaaatgctataatcgcaaagaaaatgggagaaggcaaacaggaggaagcaaaccgacttatgtccggtgttgcaatcacggcaacggtcatttctgttatcattgctgtgctgttcacaatttttgccgaacctatgtacatgatgttcggctcaaacgaaaaaattctcccctactgcattgactacggcagcgttatgattccgtacggctttgtaatgtgctggcaaatgctcaaccaatcgtaccttgtaacagcagacaagccacatatcatgcttgttttctcgatactgtcgggttgcacaaacattgtgcttgacattctttttatggcagtgtgggattttggaataatcggcgcaggactcggcaccattataggaatggctgtgggtgcaattccgcttttgctctttttcaacaagaagcaaactctgcactttggtaagcctgaattcaaggtcagtgaaatcctctttgcaatggcaaacggctcgtcagaggctgtgacaaatctttcaacagccgtgacaacagcgctgttcaacattcagatgatgcactttgcaggcgcaaaaggcgttgcggctataagtgctattttgtacattcactttattttcactgcggtttcgtttggattcacttcgggagtttcacccgtcatcagctttaactacggcgcacaaaaccacgaaaaactgcaaaagctgttcaaattatgcataaaaatcacgctgataatttcggttgcaatgattacggcatctgaattttttgcagaaccgcttgtcggaattttctcggcaggcaacgaaaaaattcagcagattgcactcagcggattcagaatttttgcaataaattatctgttgtgcggaatgaatattttcgcatcgggacttttcaccgcactcaacaacggcaagatttcagccgtaatttcagttgcaagaacgcttgttttcgagtgtgccgcaatgctgattttgccgatgtttataggcataaacggtgtatggtcggcattgcccgttgcagaattgtgtgccgttgcaatttccgtaacatttataattgccaatgcaaaaaaataccatctggtcggtgtaccaccgcaccccgttcgtgcagacagtttgtgatatcaaaagcatatcatgcccgagtgtagcattgtaaccatttgtacaaataaacgcaaaaaatccgagcatcaaaacaatgctcggataattttttacaacattaaagctcaattaaaatcgaaatcagattgcacgaactctgattacgccgtcaactgctgcgatttttgcaaggtcatctgcaccggcgcctgcaacatcaataattgtgtaagcatagtcgccacggctctttgaaagcatattttcaacattgccgctgatctgtgtgagaaccttcttgagaagctcgggaacattcttgtgagcaacgcagaaacgggtatcgtcagcatttgttcttgcaagtgaaattgcaggatagtttacggagttgatgatgttaccgttctcgaggtactccttaacctgatcacaagccataacagcacaattttcttcactttcgggagttgatgcaccgaggtgtgggaggcagataatattctcttcaccgaggatatcgtctgttccgaagtctgtaacatacttagcaaccttgccgctcttaacagcctcaagaactgctgttgaattaacaagaccgtcacggctgaagttgagaatacgaacaccgtctttcatcttggcaatcatatcggcatcaaccatatctcttgtgtcgtcagtaagcggaacatggattgtgaggtagtcgcaatttaccataacatcttctgcgctcttcatgagcttaactgtaggagcaagcttgagagcgttgccaacagacataaatgggtcaaagccgattacattcataccgagagcaacagcggcatttgcaacaagaataccgattgctccaagaccgataacaccgagagtcttacccttgatttcgggaccgacaaactgactcttgcccttttcaaccatcttaccgacagctgcaccgttgcccttgagagtcttcgcccattcataaccctcaataaccttacggtttgaaataagaagtcctgcgataacaagctccttaacagcgtttgcgttagcacccggtgtattgaaaacaacaataccctgctcgctgcacttatccttcggaatgttgtttgtgcctgcgcctgctcttgcaattgcaagaaggttatcggcaaattccatatcgtgcattgcggcacttcttacaagaactgcgtcagggttctgaacatcgtcaccgtatttatagttatcaccgagacggcttgtgccgatagcggcgattttgtttaatgtaagaatgttatacatcaaaatcaatcctttttaattttttattttaagaatttacaataacaggcgaacagcgttcgcccgttatatcataatattcaataattacttgttttcagcctcgaacttcttcataaactcaacgagtttttcaacgccctcataaggcatagcgttgtaaattgaagctctcataccgccgactgtgcgatgacccttgatattaacaagaccgttttcagtagcctctttaacgaatttagcgtcaaggtcagcgtcacctgtaacgaacggaacattcataagcgaacgatcctcgggaacaacagtacccttgaaaagctctgaagaatcgaggaaaccgtagagaaggtcagccttcttcttgttgatttcatacatcttatcaagaccgccaacctcgttcttaatccattcaagaacaagctttgcaatgtagattgtgtagcaaggcggtgtgttgaacattgaaccgttgtcagcgtgagttttccagttaagcattgtaggagtgatatccatagcgttgccgataagatcctcacgaacgataacaaccgtaagacctgccggagccatgttcttctgcgcgcctgcatagagaacgccgaactttgaaacatcaatcggtcttgaaagaatacaggaagaaatatctgcaacgagcggaacatcacctgtgtcgggaagctcgtgataaacagtaccgtaaattgtgttgttcatgcaaatgtagaaatagtcagcgtcttttgtgaatgttgaaggatcaagctttggaatgtatgtgaaggtcttgtcagccgatgaagcaacaacattagcctgaccgtaacgggcagcctctgcatgagcctttttagcccactgacctgtgataacataatcagccttaccgctctttgtcataaggttcatagggatagccgcaaactgtgttgacgcaccgccctgaaggaaaagaaccttgtagttgtcaggaatgttcataacctctctcaaaagagcctcggcaccctcgatgattgtaccgtaaatttttgagcggtgtgacatttccataacgctctgaccactgccttcgtagtcaagcatttctgccgctgcttttttaagcacagactcaggcagcattgaaggacctgccgaaaaattatatactcttgccatttctgatatctccctttttaaagaaaatttaaaaatatagttgtaaaaataaatacacctaaattatacgcttttagcacgctaaagtcaacaaattcatagcactaaagcataaaaatcgaaaaatttcgggattctgttgtgcaaatgaatcagtcaagcttaattttgccgatacagccaacgatttcatccctcatacgctcagcctctttacgagcggcaacggcaaaatcatcttctgtaagcccctgctttttccatgcgcacataatgccacggcttgagttgatgattgcaccaagaccgttttcgtcaaatgcgtttttaacatcatcggcaccgccgccctgagcaccgtaaccgggaacaaggaagaatgtgtgcggaagttttgctctcatttcaccgagctgttcgggatatgttgcacccacaactgcacctactgccgaatagccgtgcttacccataaggtcttcgccccagccttcgcacatcttgcccatatgctcataaacgctctcatttgtttcaagcttcatatcctgaagttcgcccgagcttgggtttgaagtttttacaagaacaaaaatgcccttgtcatccgaatcgcaaatttttgcaagcggcttgataccgtctgttccgaggtaaccgtttaccgtgagtgcgtctgcaccgaatgcgtcaatgctttcgcctgcaacatctgtatgaccgaggtgtgccgtagcatatgcctccatagttgtgccgatatcgttacgcttgccgtctgtgataacgaacataccctttaactttgcataagcgattgtgtcacaaagagccttaacgccctgccagccgtacatttcataatatgcagcctgtggctttacggcaggaacaatatcataaagcgcgtcaataagcgccttgttgaattcaaaaagtgcagcagccgcaccctcaagcgtcttgccatacttttcaaagcattttgttttgattgattcgggaacatagtcaagcttaggatcaagacctgcaaccgtaggattctgcatttttacaatattttcgataagtctgtcaaatgccatagtgattctcctcattttttgttattctttctatgatcgggcaaacaattcatatcccgacagcaatatcttttttacaatgctgttgttcgcccctacgaattattattttttagctgttgataatatcataaagttcatttgagaacttgtaataatcctgtctgtcctcttttacaaactgaattgcaggacggggatgtgtgttgtactgacctgtgagaaggtacggaatatcgtaaccccacttaacgccctcagccttaaacttgtgggtgtactcctcaatgattttgagaataggagcaacctgatacttcgggttcttgaggaaaccgagaagaagttcaagcgcacagttgcctgcgcctctgcccatgccgtcaacggttgcgtcaaggtagctgacaccctgagtcatagcctcaattgtgttggcaaaagcaagctgctggttgttgtgagcgtgaataccgaccgacttgccgtacttgtcggcaattgagcagtaaaggtctgcaagtcgtcttgactcctcgggatagagtgcgccgtagctgtcaacaatgtagaaagcgtttacgggagttttgccgagagtttcaagagccgctgtaatatcctcggttcttgcctttgaaacagccataatattgattgttgtttcgtagcccttctttgcagcgtcctcaatcatttcaacagccgcaggaattgcgttgatgtatgttgcaactctgatgaggtcaatcgggctgtccttctttgcgataatatccttcttaaaatctgttctgccgacatcagccataacagcgattttaagaggagtcttgttgtcgcctacaatttttctgatatctgcatcgttacagaatttccacttaccgaaatcttcttcgttaaagatttcctttgatgccttgtagccgaattccatataatcaacaccggctttaacatttgcattgtaaagatccttgataaatttgtcgtcaaatctgaaatcgttacaaagaccaccgtcacggattgttgcgtctactactctgatgtcctgtcttaccgacaggaggtcacctttctgtgccataattttactcctttatgttaaagtttatattaaatttattttgtaggggcggatatcatccgcccgcttgatgtgaatttatgtttgtgaaaaactatttgatatcgtcaatgttgttttaaaatcatatcccgttgaaataaaacatttgtatttttaaaacaaaacaacatattttaatgagcaaacaaatagcaattattcgttttggttttacaaccaaaacgattggcgaacacggttcgccgctacagtatatcattatctttgtttcatttatataatttgttttaacaacaatttcgcactattacttgcgggcggataatatccgcccctacgggttttatttgctcaatcttcaaaaactaccttaccgccgaggattgtctttttgaccttacctgtgagggttctgcctttaaacggggtgtttttgcttttgccgtgaagtttaccggcatcaactgtccattcttcatcgggatctataagaacaacatcggcatttgcaccgactgaaagagtgcctgcgttgattttcaaaatccttgcaggattaacgctcatcttctcaacaagctgtgaaagcgtcattttgcctgtcttaaccaggtatgtgttgcagaccgcaaacgaggtttccatgccgattgaaccgttgggggcttttacaaaatcagccttttcctcgggtgtgtgcggtgcgtggtcggttgctatgacatcaagtgtgccgtcacaaagcccgttgataatctcgtcaacatcagcctgagctctgagaggcggattcattctgtaatcagcgtcacctcttaaaagctccctgtccgtgagcgaaacataatgcggagcggtttcggcggtcaccttaacacctctccttttggcatcacggataagtgcaacgcttgttttggtgctgacatggcagatatgaataggctcgttaagagcggcggcaagtgcaatttctcttgcagttccgcagtcctcggcaccggcagggattcccttgacaccgagcttttcagaaacctcgccctcgttaattttaccgccgtcggcaagaaacaagtcctcgcaatgtgcgacaattgtcatgccgagctttggagcttttttcattgcgtcactcaaatactttgtgttttcaacaggtctgccgtcatcggtaagtgctattgcacctgcacttttcacagcgtcaatgtctgtgggttcttcgcttttaagccccttggtaacgcttgccgcaacataaacacggctgtcggcgtctttagctttgtcaagaatatactttacaatttcggggctgtcggttgtcgggttggtgttcggcattgcaagcaggcttgtaacaccgcctgcggcagccgccttgcatcccgtgataatatcctctttgtgagtctgaccgggatcacgaagatgcacatgcatatcaacaaatcccggaacggcacaaagaccgtctgcatcaataatctctccgtctgatgtaatgccgctgccgatttcggcaatcacaccgtcctttatgagaatatctgttttttcgttaagcttgtcggcaggggaaacaaccactgcgtttttaattagcatttccatgtttttcctccgttaagaaaagaaattatcttctcttgtttctgtttgcagggcggtgattctgctgtgggcggcggtcggttctgctgtgaacctgaacaagtccgtcgctttctcctctttcggcacgcattcttgcacgctctgccttttgtctttctctctctcttctctcttcctctgcctttttgcgtttggcaattgcacgcttacgctttatcattattgaaacattcttgcagaaatatccgcagtgaatgccaaaattcttcactccgcctgcaaagcccctgagagcgttaccgatgtttttgcctacattggcaagaacctcttccgttgaccgtttatcggtcggttcaccctcggtttctttattattctctttttcaagagcgttctgctttacggtttctgcttttctttcaacctcgccgataacatcaaagtcctcggcatctctgaggtctgagcttttgataacccccattgactttttgggagcttcgtcaaaaaagtcataaccgctgtcaaacttgtttttcttagcctttgcccttacaagctcctcatcatcaacctcttccccggttttctcctcgggatcgtcactgccgaaaatgatgtttgcgtacttgtcaacctttttttcaagcggatgcttttgttcggaaacctcctcggtttcttcaacatcggcatcgtcctcacggtcgatatcgtcaggctcgcttgtttcaaaaagatcgtgttcgggttcggggataacgagtgtaggacctgacgaagagcttatgtcctcgtgtttttcaggtgtttctgcgttatctttttcgttttcgtcaattttttcgggttcagtctctgaggtatctgctgcggtaggctccttttttttttcgtcctccgtgctgttttcctcgtaaccgtagttgtttttatatgcctcacgctcaagctcactcttgtaagcctttgcggagttgattatctcgtcaatttctttttccttggcatcatccgtgtcataaccaaagtttgaatactcacttgtaatttcttccggttcttccatattttcgattatcggctcgggagcatatcttctgcccggcaaagccggttcttcttcaacctcttccgcatatttctgctttttctttgagcgtttatcgggcttttcgggagaatcgtcaaaattgtcaatgtcgtagtccgtacccttttcaccgagtttatacttgactgcaagctcctcaagaatagcgttattcttcttagcctttttatgctttctgattctcacggcaaaaattatgatgagaacaatcaagataaggataacaacaccgccgccgatgattatgtacggaataaatccctttgaaaacggcaggtcgctgaattttaccgaagatacaattttggaaaaagtatcgtagtcaacggttgtaacatcaccctctgttctctgcattgtgatattaatgttcataccgtcataaaccgtgttggcaacaaaggttttcacatcgcccttactgctctgagcagttgcgtcaaacacaagccacacagctttttctttttggtcgggagtacagctccgatactcgtcggaattaagaaaattgttgcgtatatttgaaagctcgcttgaagaaagctgagcatagttgccgacattctcgctgctctcattttttgtcattgtcacggtcagaataaccgatgacatgttatccataccctgaagatagatatttccgttctgaaaggttttcattgttgtgtcatagtcaagaccgaaaacggaaaaatatttatctgtgcttttactgtcccttgtaacagcgctcataccgtcaggcattgaaagcgtcatatcgtcaatctgcggaatctcgtaatcttttgttgcgcccgaacaggcaaaaataccgcaaaataccgttacggcacaaattgcaagcgttacagctcttttaaaaacagttttcatcatgtccgtatattcccccgaaactaaattagattcatcaatactgctttttagaatgtatatctaattaattatacataatctgtcaaaaaaatacaaggtttttaccgtttaaatttgaaaacaagagtaccctattcgtgaatgcagtatgatattaaagaacatattacgcctgagcgtgcataaaattgaaaattgaaaatggaaaattatggtcgagaagacaattagcaagaatacaaaacattgtcgcccgactgtttttgtatatttttggtatatacggaagttgttgcaaaactgtatgtacggatattatccgcctgcagataaccacgcaaagatttgtacaaattaaaattatataaataaacattcactttcatataaaacaaaaattgcatcaatgccgtatcgggcatcaatgcaatttctttatctgactatcttctcgaattgactgcggtggcacaccgccaaccgaaattttacattttcaattttcaattttcaattaaatacaagaccgccgtttattctacagtaaccgacttagcaaggttctttggcttatcgggatcaatacctctgttgattgatgtgtaataagcaagaatctggagcggaactactgctgtaatcggcataagaagctcgtctgtatgcggaatttcgataacataatccgcaacaccgtccttgagttctcttacacaggcgtctgtacaaacaagaataacctttgcacctcttgacttaacctcaacaacattgctgattgttttggggataatacctgtctgagttgcaacggcgataaccggaacatcctcgtcaataagcgaaattgtgccatgctttaactcgcctgcggcatagctttctgagtgaatgtacgaaacctctttgagcttgagcgaaccctccattgaaagggcatagtcaagacctctgcctatgtaaagcaagctgtcggttgcaacaagctttgtggcaacgaacttgcaggtatcctcgcagttgtcgattacatactgaactgcctcgggcatttttgtaagagccgaaacaagtcgcttgcactcggctgtgctgattgtttcctttgcaagagcaagctcaaaggcaaagagatacataacggaaagctgtgtgatgtatgcctttgttgacggaacggaaatttcgggacctgcgagtgtgtagatgagcatatccgcctcacgggcaattgaactgccctttgcgtttacgattgcaagagtttttgcacccttctgctttgcaagacgcattgcggcaagactgtcggctgtttcgcccgactgtgaaatgatgattacaaggtcgccctcgcctacaatcggatttctgtaacggaactcggacgcaatgtcaacatttacgggaactcttgcgagatcctcaataacatacttgccgaccatacctgcgtgcatggcagtaccgcaggcaacgattgtgatatttttgaaattcttgattgtttccgttgtgatgccgcactcctcaagaaacggaagtccctctttgattctcggcataatcgttgttctgatagcctcgggctgttcgttgatttccttaatcataaagtgcggataaccgctcttttcggcagcctccatatcccagtcggctgtctgaagttccttttcaatcggatcaaggtgttcgtcaacgaacgaaacaccgtcaggtgaaagtgttacgatttcatcatggtcaagaagataataatcccttgtgtactgaagaattgcaggaacatcggacgcaataaagcactcgccttctgcaacgcctacgataagaggactttcacggcgaaccgcaaaaactctgtcggggaaatccttgaacataattccgagtgcaaacgaacccttaagctcagccattacactgtcaattgtttcaagaggatttccgttgtatttatagtcgaggagctgagcaacaacctctgtatctgtgtcgcttaaaaaagttcttccctttgagatgaggaagtctttaagctccatatagttttcaataataccgttgtgaacgattgtaacccttgtaccgctgtgtggatgtgagtttacatccgaaggctcgccgtgggttgcccaacgggtgtgacctatgccgacatgacctttcggagtgccgacctctgcaagcttatcctttaagtcctgaagcttgcccttggtctttacggtcttgatttctccgttatcaaaaaccgcaatacctgccgagtcatagcctctgtattcaagctttgtgagagcattaacaagcacctcactgcaatccttaggtcctacataacctacaataccgcacataaaatttctccttttcggttaatcattgaccttgtggcaaaaagtaggtacaagttctgccaaaagttcaactgtcttttcactgtcattgttttctgcggtctttttgagaacctcaagctttgacagcatatctgtttcgtctattttaatttgatttcctatgaaaattttcttgttctgtgttgacttaagaccttcttcgtccataagaagctcctcaaaaagcttttcacccggacgaagtcccgtgaaaataatcggaacatctttgtacggaaccttaccgtacattctgataaggttctcggcaagggttgtaatcttgacgggagcacccatatcaagaacaaaaatctcaccgccctttgccattgcacctgcctcaagaacaagcgaaacagcctcgggaatagtcataaaatatctgataatatctggatgtgttacggtgacgggcgcaccgttttcaatctgacggcgaaacagcggaataaccgagccgtttgagccgagaacattaccgaatcttgttgttacaaattcggtatcggtgctgtgctgcgccttgtactgaataatcatctcacacgcacgctttgttgcgcccataacatttgtcggattaacagccttgtcggttgaaatcataacaaacttctttgccttgtacttttctgcaagggttgcaacattgaatgtgccgaagatgttgttctttacagcctcctcgggaacggtttccataagcggaacatgcttgtgagcggcagcgtggaatacgagttcggggcgatatgtcttgaagataagctccattttgtcgtaatcacgaaccgatgaaataagcgttacaaggttaagctttgtgccgtattcaagcacaagctcctgctgaatgtcatatgcgttgttttcgtagatatcaacaatgatgatttgttttggatcattctttgcaatctgtcttacaagctcactgccgattgaaccgccgccgcctgtaacaagacaaacctttccgttgataaggtcatgaatctcctttcggtcaaactcaatgggttttctgccgagaagatcctcaatcttgatttcctttgcctgtgaaataagctgtgtatgcccgtcatcaaacaaaagctcgccgagataagggataatcttgattttgcactctgttgcggaacagtagtcaagaatcttccttttctcatcttcctcacatgacggaactgcaacaataatattgtctatgcggtattcatcacatattttaacaatttcgggacaggttccgacaacggggattccttcgattttctgattcagctttttcaaatcatcatcgacaaagcataccggaatgatgctttttgaaggattattaacatcattctgctctttcgcattgtgaatttcacgaacaatcattctgccggcattgcctgcgcccacaataagggtgcgctctccgccctctgcccttcctgcctcggtaaggtcaagaaaagcccttctgaaaacaaaacggaatgcaagaattccgacaagggctattgcgaaatgtactacacaaaaaatctttctctgcggaatctgcaaaaacaacgagattacaaagccgagcgtaaaccccgaaaagacggcagttccgcacacaatatagtcctttgcgttaaagtatcgccacaattttgaatatgttccgcttatataaagcgtaaacagacacatgacaagatcaataacaatatagctcaacaagcctttgcttgaagcagtacctatgtagccgacaagcaagagaatataatttgcaagaataccgctgacaacgataataaacacatctgcgagagccagaaacatcttacgcaaattaatcttcttcataacccatacctcttctgtttaactttgtgtaaatttcccgagtaacatataaatacaattatgatttattatacaacagtgcaaaaggaatgtcaaacaaagcaattcctaaatcaacttaaaatccgacaatcaaagcacaaggagcagtaataatcagacttgttcgacacacatttgttgacaaccgcacaaaacgagcctaaaataataccatacttaatatgggcggtaaattgaatgaaaaatttttcgataatcctcggagcaataatacttgtgctgtttgtgactctcgtaatatggggcgtttactgtgacaacacaattgcaatcacaaattactgtgtaaacaatactaagaacgacgcaaagctgaaatttgttgtcatcacggatctgcacaacaaggaatacggagaaaagaacgcagaccttgcagagcttgtaaaagaacaaaatcccgattttattgcagtttgcggagatatggtcaaccgtggcgatcccgacacaacaaagatgaaagatgtgcttgaaaagctttcaaaaattgcacccacatactgctgtctcggcaaccatgagcgtgacaatgctgccgaattcggaacggattttaaaagcgaaacaaattcaacaggcgctgtattgctcgataatgaatacataaaattcaccaaaaacggcaagagtgtgcttatcggcggaatgagcgactacccttattacgagttctacactcccgatgacgatgttccgtcaagaacgctgtgggaagaatttgccgaaaaagcaaagaacaatttcacaattcttctgcaccaccagcccgaatacattgccgaggatgcaaagaaaaccgacatagacttaatcgtctgcggtcacacccacggaggacagattcaattgccgttcatcggcggagtaatcgctccgaatcagggactttttccgaaatatgacaaaggcgaatttgaccttgacggcacaaaaatgattgtctgcgcaggtctgagcaacaccgtattcatccccagaatcaataatcaagttgaaataggtgttgtgacggttgtataacatcggttctcccctattactttcatataaagcaaaaattgcatcaatgccgtattcgggcatctgatgcaattcttttatcagagtatcttctcgaatagattgcggtggctcgccgtcagttcttctcgctgtaattcctaagttccgcaggagttctgccgtattcggacttgcagaacaggataaacgaatttacatttggaaaaccgttttcaatcgtcgcctgtctgacggtgatttttttgtttctcaaatcatcaatagcgtgttcaagacgaacacggcgaagatactttgaaaatgtttcctctgttttatccttaaaatattttgaaaaatgagcaggcgtcatgcctacataattggcgatttcattgagcgtgatttcgtgtttgtaattatcgtgcatatatctgatagcacttttggcgcagtcaaaatcatcagcctgagaaccgtgaacatattgtatatcgttgtcaatgcaatcacggatgagatagtacgcaacgctgtacatcaccgctcttaccttcatgctgataagcttgctctcgtactcttcatatccgtggaatatgtccattgcttttctgataaactcaagagcttcgccctcgggttgtttgaaactcggcacaatatgcggatcgtcaacatacggtgcaattgcctttggaatgatattgagcataacagcctgagtatcctcaccgatgtcctcataggaatgaacctcctgactgttaagaacatagacatcgcccgcattgagaataatttcacaatcaagcttgttaagccttaccttacctttttttatataggaaatttcatatgaaccatgccacctgagtcccgattcaaaggcaacttttctgtccggatatcttgtaaccctgccgctgtaatacggctcgggcggtaacaacaccttcttgtacttcatggtttcacccttaactcaattaaaatcaatcaattgttaataacatagtcagcgcaaaaataaatatatttaagatccgcaattaccgcagaatggtctgtttttactacaactgttctgcgttcttttttgctgatttcctcaacacagcgtgcaacattgcactttgaaggctcgtagccgtacttttcaaaaaattcttccgcagtcataacaagcgagccgtagccctcaaacatatgcaaaagagaatagtcaatcagcttgtattcatcttcaataaggctgattccgatatcgcagtttgtgactgaaccgatgtaatacggtgcgtcattgaggaacaagcctgtcttgaacgaaccgattgaaacggtaagatccgagtttaccgccgtactgcacacacccgtgtcaccgttgattccgctgttgatgtctgcacttataacataggcatttgtcatattaatctgctcaaccgcttcaagcatttcaccctttaattcacctgaaaagcctgttccgagcagacagtcaactacaatgtcaaatcccgtgaaagccgccgcctgtgacatcggcatctcctcggcaccgagcgacattgcggttttataatagtaaaggccgtcctttgaaaagccgtcgcttgctctgaaaattgtcggtgtaaagccgtttttgcataaaatacaggcgagcgcataaccgtcgccgccgttgttgcccttaccgcaaactatggcaaccctgcccacaaactttgccgaattaaaaatcccctgtgcggctctgtacataagctccgccgaaggagtatgctccgcaatcgtccttgcgtcgctttttctcatattttcaaccgaaacgacctgaacaaattccatcttatattcctccgctttctgaaatttccatagccttatccgccgtttgcggcattgtaagccgtcataacagcactttcatccatattacaaccgagcaaaaacaacggtgtttccttaaagaactcatcaagcaattcaagcagcttttccattctgctccgctcaacatcaataaccgttgcctcaagcaactgtttcataacctgtgacggcaacaccctgactgccgtgttctcttctgctctctgaagaatatacacagccttaacgggtgcttttgtatttgttcctatgtcagctttccccatccacggagttccgtaagcataaaattttccgtcacattttcgtataaccggcttgtcatcgttaatcatcgtcaccctgttgccaaaatgccttcgccacagagccgtgtgggtagacttgcccgttccgctgactgccgaaaaaacatagccctcgccgtcaagctcaagacaggacgaatgaaaaaagaatccgtcaaatccgtcaagcacggcgttgcagaattttgagagtatcagaacatcctccgcaccttgttcgctgaggttgtcggaaagcccgagacgctcacggatttcgtcatccgaaaccgatatcgcaatgtcggtctttcccgattcattcgacttaacggcatagctttcaagccgtttcctgcatattttaaattttggattaacttcaacattcaaatcagctattctgtatatcggcatatctgctccgctaaatactataatgaaatattgtaacacaaattaatgttttttgctacggcgaaatgaataaatattattttaccttttagtgcaagttgttcagtcgcacagctttaaaggcaaatattgcacaatacaagccgtgttattttgtaacaatgcacatacagcttattttttattcattttaaagcctgtaaaaaaagcattattttacgactttttcaattttgtttactttacctgtccgactgcttttttgcatactcttcaaggtatgctctttcataaattcaaatatcctgtgcgtaaccgttcctataagaatcggaatgaatattcctgcggcaaggtagattatgcagtaaaaatttaagccgttcggacgataaatgtaccagattgttgacttgagttttaaaatatcgaaatctttgaacagcggtgtaattacgctcaatccccagaacgcccattttacaatcataaaggcaaaaatgtggtgaatcattatgctgtaggtattgtcagaaatcattctgacaagctttttgttcttgataatcggagtaatcagctttgcaaccctcagccagaacgcaatacccgtgattgcggttacataaggaatgacgcagccgttgtcaaacttcacgcactttgacggagtgtattcaagattttcacagaatgtgaggagaagaagctgaactccgagaacgattgcaaaatatgcaacgctgttgagattatcgtgtttttcaagcttttcgtgataaaatctgccaaactcaaaacacggcagaaaaaatattgacctgaacaataacagcaacgcaccctttggggcaggattccaaatgcagtattgcacaccgaaaattccgattgcaagatacacggcaagaatgacatactcgttgcccctgtgaacctttttgagcagtttgcggaacagtatgttaaaaacataaacacagaacagcggatatacaaaccacgaaccgaggttgtaggcaaaactttcgccgtcaataaacggcataacaaaaaggttgtacagatcaaatttgccctgagcaatcgtatagccgacctgagtaagtgcgaatgcaattattccgtaaacaatgttccatagatacgcaggaatcaacaagcgttttgtccgtccccatatatatttgaaaatatgttcctcgtgcttttccttgtaaaaatatcccgaaatgaaaacgaacaaggcgagattgtacgaatacttcggaaaccaatcgtacatcagcgacacaccgccgttgtagcaatgccccgaaactatgataataatgcctattgccgacaaaattttaaaagtaaaattaatgtttccgtcatcgccgagccttttgttttcagctgtgacactgttttgtttaagtgcagatttactgcgtgtttcgttctttcccataattccctctcatctgtatttgtcgcaatttaaaaattccgcaaattaacacggtaattgtaccacaaaagcaatctgcaatcaatatatcaaattcaccgtgcaaaacacatataaatcattattttgcacaatctcacttttgttttaacaggcatttttagcaggcatctaaatctttcatttgcaactgttccgccatacaattgtgtacatacccttaaaaaactaagattaaaatgtaaataaattcagtcaaaaaagccggacaaagcataaaataaaaaaatatgcaaaaaactattgacacaacctttacataatgctataataataaagctgtaaaaaacagcagagttgtatatcgcgggatagagcagctcggtagctcgtcgggctcataacccgaaggtcgtcggttcaaatccggctcccgcaaccaaacaagacggtttttcgaaaccgtcttttctttttccaatatttccgaaaacacctgaaaatggcttggatatgcggttttcaaacgtcaacaaaatcaagttggaaaaagttgagtttaattaaatacagttaaatcgctgtcaaagtgcagtcaatacattaacctaacccgccgagatcgtttccgacaaaaatttcggaggttaaagctatgacaaacacaaaaatcacttacacacagcagggcggttatcttttgcccgatttaaaattacctgagcagccgaaggttaccatagggatatggggacagcgacatctacgctatattgaaaaacaccacccgataagatataccaatcttctgacgagctataaacttactgcttaccttgccggcatagacgaagaagcgcagactatgtatgaacgaattgtaaatgaaatggcaaaacgcgagggcataaccgagcagttgaaagccgaagatatgatgacatgggtaaaatgtatgaataatgtctacgcacgagcaagagagattgtaaatactgaattgatctacatctaaaacaataagtcgccgtgttgttatacgcatacctgcgaggttagaccacgctaattgatttagtgtggtatgttttttcaaaactgtttacaaatagtctttgaagatatataataacctcactacgaataaaaaggagtttggttatgatttgtcaagaatccatcggtagattaatagatatatacaaggatgatgataaaatacttaaaacaattgaacgctgcgttacttcattcgaagaataccatagtagaatatttgagatggagttatggatgaaaatatattctaagaccgtttccggagaagaatataaggaaaatgtttcgctgcgagataaagcgcgtactatgtcgcacgattctattctgggaaatgttaatttactgaacagattagctgaaagaaataaccttccccttgtttatgatggtatcgtgtcacacgaaagaccttatcgcagagaggttgccaatgcggtacttgaatatgtcgagaatcttattaaaaacagaagataa

SEQ ID NO: 417 - DNA, 7719 bp, unidentified
  source 1..7719: mol_type = unassigned DNA
ttagattttggcaagtgcctgatccaaatcagcaattaggtcatcgatatgttctgttccaatggataggcgtacggtgcccggataaatttcctgttcggctagctcctgtgcattgagctgcgaatgggtagtgctcgccgggtggatcaccaatgatttcacgtcggccacattggcaagcagggagaaaatttccagactgtcgatgaaacggtgtgcctcttcttgtccgccttttacctcgaaagtaaagatagaaccggcaccgttcgggaaataacgttgatacagtgcatggtcgggatggttggataatgacgggtgattcactttcttcacttttggatgattgtttaagaaattcactaccttcaatgcattttctacatgacgctctacacgtaaggaaagagtttccaggccttgcagcaggataaaagcgttgaatgggctgatggtagctcctgtgtcgcgcagcaaaatggcacggatgcggattgcgtaggcggccggaccggctgcgtcaacgaagcgtacgccatgatagcatggatcgggttcggtcagttgtgggaatttgccggaagctacccagtcgaattttcctgaatctacaatgactcctcccaatgaggaaccgtgtccgccaatgaactttgttgcggaatgtactacgatatctgctccgtgttcgatggggcggattaaatacggagttccgaatgtgttatcaataatcaaaggtattttgtggcgatgggctatttctgccactgcttctatatcaatgatatttgagttcggatttcccaaggtttcgataaatacggcttttgtgtttttctgaatagctttttcaaagttcgacaaatcgcttggatcaacgaatgttgttgtgataccatagctgggcaaggtatgtgccagtaggttataacttcctccgtaaatggttttggctgctacaatatgatcgcctgcacgagtgatattctcaaaagcataagtgatggcagcggcacccgaagcgactgccagccctgctactcctccttcaagagcggctacgcgttgttcaaagactccttgagtggagttggtcagacggccgtagatgtttcccgggtcctgcaggccgaagcgtgcggctgcatgggcggagttgtgaaatacataagaggttgtctggtaaataggtactgcgcgggcatctgttgccgggtctgcttgttcttgtcctacatgaacctgtaaagtctcgaagtgtaatttctttgttgccataatcgtatgttttttaagtttatattcttcctttattttcttgcaaagttatgagatgtagatatatcgaacaagatatagatgaaatatagaaaataatgctatttttgtgcctttatatagaataatgtaactgcgttattcctgaaaattaccttttagaagaatatttttcttatggatacttttgataagctggataaagtagatttgcaaatactccgtactttgcaagagaatgcccgattgacaacgaaagagttggctgcgcgggtgagtctttcttcaactcctgtttttgaacgtcttaaacggttggagaatggaggttatataaagaagtatattgccgtattggatgcggagaaactgaatcagggatttgtcgtgttttgcagtgtgaagcttagacgtctgaatagggatatagcggcagagtttacacggatcatacaggacattcctgaagtaaccgaatgttataacatatcaggaagttatgattatctgttgaagattcacgctcccaatatgaaatactatcaggagtttattctgaatgtgttgggaacgattgatagtttgggatcactggaaagtacatttgtgatggcggaagtgaagcatcaatatgggatacatatttagtcctttgtgtgatagtctgaaatttatcttgtatatttgctatgtaatataaatcctgttttgctgacacaatgaaatggcaactttgtaaatagcttcgcccatatggattgtaacaatagagagttctgctgctacaactgtttgtgatttaacgtaagtcacaagttattttttttattctattcaataaactatataaaagaagccattacaatgaattcgaacatatatcctcgttctaatgattttcagactatttacctgaatacggtgattaagaatcctgctattatcgtaggtgattatacaatatacaatgactttgtaaatgatccggtgctttttgagaagaacaatgtcttatatcattatccgattaataaagaccgtttgataataggaaaattctgctccatagcctgtggagctaagtttcttttcaatagtgcaaaccacacattgaattctttatccaattatacgtttcctatcttttttgaggaatggaatttagataagagagatgtaacttctgcctgggataataaaggggatatagtaataggtaatgatgtatggattggatatgaagctgttattatggcaggagtacatatcgggaatggagcagtcattgcgtcgcgggcagtggttactaaggatgttcctccttatacaatagtaggcggaacgccagccagggagattcggaaacgttttgatgagcaaacgattgcccgattgcaagaattgcaatggtgggattggagcgtcgaaaagatctccgaatgtataccttatattataggtggaaagatagaagaactgatgaaaagataaacaatgcatatatgaaatttataatagaacccggaacttctgctgatatagatgaattggaaaagctgtataatgaactgaatgattatctggcagctacgattaattatcccggatggataaaaggtatctatccaattcgggaggatgcagttgccggtgtgaatgataacatgctttacgtagcaagaaccgatgggagaattgccggttcggtcatcttaaatcatcagccggaaaaggcttatgagaatgtcagatggaaaatggaactggattatagctgtatctttgtgatacatacttttgttgtgcatccttcttttttgaaaaagggagtagggcatgcgttgatggattattcgttggaattggctcaaaggtcgggaataaagtctgttcggttagatgtttatgagaaaaatcttcctgccatatcgttatacgaaaaatgcggtttcgaatatgttgataccgttgatttgggattaggtaaatatgggcttaactggttcaagttatatgaaaaagtaatttgatgtatgtctaaatagatttttgtgtctcgttattttataataaatttattcttactatattagtggcaatataaaagagaagagtttatgaaacagttattatttgatatattgaaatattcattgagtgattttttagtaagagatagaaatagtattttagctgatgtgaatgaaagaaatctttgttcgcgactggcaatgtatttagaaagaattgtttgtaaaagtggaataaaaggttattatgcggacgtcgaatacaatagaaataaagatggaagggtaaagacaatattgaataaaaagatggaggttgtgacaattaattgcgatcttattttgcatagtcgtggaaataatacaaaatgtgataatttgatagctattgaaatgaaaaaaagtgatagagacaatgatggaaaacaatctgatagaaatagattatgcgcattgacaaaagatagttatgatgatatatggtcatatgacggtattgtattacctgaacatgtttgtggctatgttgttggttattatattgaaatcaatcgatttactaataccattttattagaagagtatgaaaaaggtgaaaagacaaatcaatggtcagtagatttttctaagggactaatagtttttaaaagaatgaataattaattatatttgtgagtggcttcctatagtgaagctactttttattttacagatatccccaacattacagttatctcccttgtcggattccatatggaatgaggaatttccccttttactagaaatgcttcattcgcatagataatcttttcttccttatcaagtattattttagcttgtccacttataacaataaataaatgattatgcacatgagtatgtagattaatagggccgccgccatccggttctaaataagctatcgccccgtctattatttctccgcagttgccgaagagtttttttgctaagaacttcaggtgttccggtggagtggtaaaaccatctaattgattcataattgtatatatgtatttttttactatcacgtcaccacaaaagtaatcatttgaaattgatttctcttttattatatgtaattttgtaatctaaaattgagatagtagaatgaaattaagagacttctttttaattatacttttgttatgttggtgtgatatttatgcgcatactatcaaggttagtgataaactgaacttgattcagctgaatgagaacgtttatattcatactgaaaatgacaataatggtattgtttatataaatggtggtaaggctgtaattgtttcaactcctgaaaacgatgaagaaactaactatttaattgattatatcaggaatcacttgaaaagtgaaattgtagcttgtgtcgtagatagatggcaccctgatgcaatgggcggattaaatgccattaaaaaagctaatataccatcttatgccaacagacttactcaggtaatagcgaaagaaagaatgttacctattccggaaaatgggtttgatattactttggaattgaccgttggcaaaagtaagttgatatgtcattatttaggagaggcacatacgaaggatgggattgtggtgtggctaccaaacgagaagattctttttggcggtaatcaggtacgtgcaaaaggttggtatggaaatattggtgacgctaatttacgggaatggtctaatacaattgcccgtgtgaaagatttatatggagatgcaaagatcgtgatacctggacatggacattatggaggaaatgaattgttggactatacaataaatctttatagaccgactttatggggtaaaatcttgaaatggaatgatgtacaggtaaaaccggtatttaataattgtggggtaatatttgaattagcagagtctgattctatcaatgagggaaaaagattcttgaaaaatgcgacaatttatattcagcagaagaataaaaacagatatttgaagattcaatctccaatgattagacatgataatgaggagagccaggtactgtcatctgataaaggtaggttgcagatatataatataacaatgaatgaattgattgaagatttatactataaacaattatatatatctttagaagaacaatcggttgatgctttaatcattttgaaagaagctataagataataaacatgatgctatacacatgaagaagctgactatcatattcattctgttactatcaacattctcttgtttctcacaaactgaatttacaacttgcctatttgatggggcaagaagcagagttatccccataactgtttatcagccacagaaagtaaactcaaaaacaaaagtcgttatattcaatcatggttatgatggaaataagaatagaaaatctaatcagacctattcttatctgacacgattcctttctcaaaaaggattttatgtaataagtatacaacatgaattgccgaatgatccactcttggctatggaaggcgattttatgcaaacccgtatgccaaactgggaaagaggagtggcaaatatctatttcaccattcaggagtttaagaagttgaaaccacaattagactgggataaacttatactgataggacactccaatggtggtgatatgacaatgttgtttgctactaaatatccgcatttaataaacaaagccatatctatggatcatcgcagaatgattatgcctagaacggagaagccccggttgtatacattaagaggatgcgattatgatgcggatgcgggactactccccacaaaacaagaacaggagcaatttcatatgaaagttgtgaaattggacggaataacgcatagtaatatgggagagaatggaacggaagagcaacacaggcttattaatcaatctatttttggatttctgacacagaaataattgaagtattctatttattttatccaacggttttaaatcgggagcctgtttttcttataactttgcagctgattttagaaaaagaagtttggaatgataaataagtatgaagcacggctaggtacagagcgtatgttgccgctcgttttcaaaatggcgcttcccgcagtagttgcccaattcgtcaatttgctgtatagcatggtcgaccgtatctatatcggacatattccgggtattggtactgatgcgttggctggggtaggagtgacgacttctcttgttatactgatttcttctttctcggcgattgtaggaggagggggcgcgccattggcagccatggcactgggacagggcgatcgtctgcgtgccggaaaaattttggggaatggttttgtcttattaatattattcgccctgttcacttcgttcatcgcatatacctttatggaaccgattttgctttttacgggtgcttcggaaaatacgttggaatatgcggttgattatctttccatctatttattaggaaccgttttcgttgaaatatctacaggattgaatagctttattaatgcacagggacggccggctattgccatgtactctgtcttgatcggtgccttattgaatattattcttgatcctatttttattttctggtttgatatgggagtgaaaggagctgctttggctaccgtattgtctcaagcatgtagtgcggcgtgggtattgagttttctcttttcccggcgtgcttccttacctttggaaaagcgtaatatgcggttgagccggaagattgtattcgccatgttagctttgggaatatctccatttataatggcaagtacggagagtctggttggttttgtattgaatagtagtctgaaaaattttggagatatttatgtcagcgcattaactatcttgcaaagtgcgatgcagtttgcaagtgttccgttaaccggttttgcgctgggatttgttccgattatcagctataattatggtcatggtgataaacaacgtgtgaaagactgtttccgtattgtgatgataaccatgttttcatttaacctgttattgatgctgcttatgatcttgtttcctacgattgttgcatctgcttttactagtgatgaaaaattgatagaaacagtccgttggacaatgcctgttttcttgggcggtatgactatcttcggattacagcgagcctgccaaaatatgtttgtagcattaggtcaggctaagatttctatttttattgctttgttacgtaaagtgattctactgattccattagcattgatattaccacattatatgggagtaaccggtgtatatgcagctgaagcaatatctgatgcgacagcggcaatttgctgtactttgttgttcttttggcagttccccaagattctggggaaaatacaggggaatattttgcgtacagattag

SEQ ID NO: 418 - DNA, 20944 bp, unidentified
  source 1..20944: mol_type = unassigned DNA
ttcccttttcatccacacacaggcaacgatcagcatcgccgtcataggcaaaaccgatgtccaggcccttctctaccacgaacttctgcagaccctcaatgtgggtagaaccagcattgttgttgatgttcagaccgttgggctgtgcattgatgacataggtatctgcacccagcgcatcaaacacagacttagcgatgttccaagaactaccgttggcgcagtccagaccaaccttgacgcccttgaaagagtagattccgaggctaatcagatagcccatgtagcggttgcgaccggacacatagtccacagtacacccgatatgctcacgatgggcaaagggcagctcaggccaatccttatcaaagacgtgaagtttaccgtcgatatagtcctccaccaacagcaaaatctcctccggcatcttctcgccatagcagtcgatcagcttgatgccgttatcgtagtagggattgtggctggcagagatcatgatgccacagtcgaagtcatcgacgcgggcgatgtaagccacagaaggggtggtagtgacatggagcaggtaggcatctgcaccggaagcggtcagacctgcgaccaggctgtactcgaacatataagagctacggcgggtatccttaccaatgacgatgcgtgcagggttattatcaccgttgcgctcacgcaaagcgttataataccagcccagaaaacgaccaaccttgtaggcgtggtcagcggtcagatcaataccagcttcaccacggaagccatcggttccaaaatactttcccattcttggttacctcgttacaaaagtaaaccttcgattaaatgcaatatgtgctttagccggaaaaatcgttttctgttactcactgtggtcgtctcgcatacatgagcaacacagccttgttcccagccatatctgttactccttcgaaggtttgtaagctatacaatatactcagcaatagggtctatcggcttagcgtattttttgccaaataacaccagattttgtctttttgtcagacatctttcattccatcagctatccatttaccgaattctgtccgaattcctgtaatagcggcattcatattcggcatccccgtgtaatttatataacagccggacagaacttctcggcttgcggaatcctctataaggcagaacaatgcgaaattttgtgtttccttccggaacactttgctcaatgccatcgtcaaaattgatggtatatgcatagggccaatctatttcatgcaggaaggcttttaagttgcccccccatttcacatctgtgaaattgtcctcaaaatatctcgcacgtttgagttccggaacatcattataaaattcacctgcaatccccgtaaaatcaagctctgcaagatagtccgcacactctggattttcctcaatgagtgcttttttcatatattcctgtgctgcggcacaatctggaacgcttccattaagagcttctgcacctgcggaaaaaccagcaccaaagaacgggatcaggttttgcgcaacagcataagacgctaattttccatgccttccgcgccctcaaggtatatcaaatctttcattttttattcctcgtgttttatttcacattttacggctaacttattgaaggtcttttttcttcttaaaagctctaaacgctctgaagagtaacgcccctgcacatgcgccgattagattgaatagcacatcgttgatatctgccacacctctatgcgtgaaatactggattatttcacagagaacggatgaaagcaatgccgcaaacgcagtaccttttatggaagcagccatgttatatatcgttcctccaagtggaatatataaaataacattcagcagatttcctgtccaaactttcacatcgggcaggaacgatatatgataacggatttcttcattatactctggtgttcgacgcagaagcgtgatatagagaatcaaaagcatactatatccaaccggaatcacccgacttttgtcatgacaccgtaatgaccccaaagcggtcatcattaagacaacagcttcatacacagtcagattaccacgaatatcctcgcaaagctgctgaatgattttccacattggctccagatacccttatcccaaagttccgaaattttccacttagctattctcgctgatacaatcataatatatcttcatcagatttgcaatatcgattgactcagaatacttattttcgtattcgtttcgggcgattttcccatattgactgcacaaatccggatcgttccaaagttccatgactttgtggctcagcgcgttataatccttcatagggaacacagtattcatgccgacagcggatatcgcttcgtgcataaagccaatatctgttgctataacaggtttcccaagactgaatgcctcaatgactgtcatggaacagccctcgtagcaaatagacggaagcagtacaaattctgcgttccccataataccctgacattcatcatgcggcacatagcctaggtattgaatctgcaaatcgggatgtgttttgatgaattggttcagcatgtcctcctgaggaccagcgcccataatcaccaacggcacatcaggaagcttctcccatgcactgcataatacagagattcctttttcctgaccgattcgaccacaatatacagcataccgctgtggaaggtctctctccgaatttacaggcgtgggttccggaacactgttgtatttttttaccaacttgcgagaggaaaatccggctttcaaaaagagagctttttgagattcattcagataaatgtagcggtcgatatttcgatagaaggtgcggttccaacgatgaaccccaaaaatcaatgctgccgccaaagattggactttggaattcttgaagcatttttttgataccatccgaaaatactttccatctgtacacagcgtacacaattcaccattacaaatagaagatgcgttcggacagacataacgggtatcatgcagtgtttgtatcacttttacgccgcttcggtgtgcagcaacaaaaacagcaggagagagcaacggaaaaaatgtgtgtacatggacaatatcgggcttttcctctttgcagattctctgaatgtctcgatatgttttgggggaccagaacatatcaagacttgccaacagctttcccgctttgttcttcttgtcaaattcatctgtgtgaatcgtataccttaacagctcgattccagcgtttttcagcatagcagtttcgtgcttgaaaacctgatcatctccgcttgctgaaccggaacgatgaaaattatgtacaactaaaactttcattgatgattttttcctccagacagagctgcttcattttattttctccagaacatcttcaaagaacagtcctttgttttcccatgtccatttgcttcggaccgccttgtaaccgttttcccccatttcagctgcctgctccgggtgttccagaacccagagcattgactctgcaaactttttgaccattgtattgtagtctgcgaccggaagtttgatgcctccatcatcttccaccaaaatgtgcattcctgatgtatccatacagataatgggggtcttgcacatcatcgcttcgtacagcacccatgtgccgccttctcttccgctcgttacgaccaatgctgccgcatttttgattttctgaatgctttgctctttttttagcattccggtaaaaacaacattctgctccagcgaaagctgctgggtcaagcgtttcaaagcggattcacattcgccgccgcctacaatacgcagagaagcctccggatgtacctttacgacctctgccattgcccgtatcgcaacatcgaccagcttcagtccaactaaccgaccactgacaacaaaatctttccctacctttttaggaagctgctcaagggcatcacattgttcctgcgaaacgcctgtctcgatcatcatgctgcatttgctccgatatttcagcgggatacagttcaaggaatcttccgtccgcagaatcaatgccgaagcgtgtttgcaggcagaatggaaccacgggtttgtcaggcagatatacttgttgatttttcgcacccgctcaatcaaggcctgcttttttgtaagctgcggccataacacttccggaacaccttcgccaccgcccaatggaccccagacaaagggtacatttagtttatacatcaatgttggaagccacatcgttccgaaagtgactgcaaataccattgagaatttatgctgttggttcaatctttttacataccggtatgcgccgatttgccatagcgcgtaataaagctggacacctttttgcccctttttgtattttttgatactttccggaagatcatagtaaataaaagacatattgggtcttggatttacctgaagttccttttcaatggagcaacgattgtttgcccgcgtcagcacggtaactttgtgacgcttcgccacttccacagcccaattccagccggctcccggctcagagcctttgtccggctcacagccatatgcggagatcaatatattttccatagtatcaaacaccttttccactttgactcagtaacatcagatacttcttccataaatccagttgctcttgttcttgagtcgtttttttctctgagcggagtgtatatagtatatactggtcgagcagatagattgtaagaagtgcctcactggatattgctgcgcatcctacttctctcagataatcggagatttttttgatttcaccaatcaaagatccgacttcagctgtttttttgagaagaatcggtttcaatataaaatgaactgcgtcaaggaaggcgggtttcggggcagatgcgtattcccagtcaaaaactgcaagttttccgttttcaacaacacaattccaaggagaaaaatcaccatggttcaaatcaaattttacattggccaagaattccggagttgctgtgttcaggaacatcgttttcatccatgaaagagcggagccgaggcttcctaaattattttccatctgtgcggcccattctgcagctccattttcgacaaaagtatagtcggccaattctaataaaaattctttgtgctgactgcaaagttcaaaggatggctgtgtgcgatgatcacatacggaagatgtctcaaagaaatacacgccattttcatgactgcattgcaaaacctgtggcagcactgccgactggatgccagagaccttattgagtgttgctgcctctctttcaaatagaactgctatttgcggattttccgtaaatttgatatacgaaaatggcactccatttttcagcatctgaatcgttgccttgctgtcacttccctcatttccgacataaaatgccggctggcatgcttcattatgcggagcaaaaaaccgaccatttttgtaatccaaccggacaattttggctgaacaccggcgcaagagagggagcggcagatgctccatcgaaaatttatagagttttccttttaatgtattgggaatataaagctgaagtgccgaccgaaaactatgcttatctttcagcggaacaagccatcggacattttcaaaagagggcaatgccatatacagagcaccatctgtgatttctgtcacaccaatgctctgaagctgttttttaaaatcgatccatttcattatactggcacaccctcatcatccaatgtgcaatgcatcagtttggctgtttgttctgccttatagcgcagaactttttctgtaatagaatctgcaacctgctttgcatcctgagtggcatcaactagaaccgcgtttcgtttgttttcagcaaatgttttgaacgcttcgcgctgtttccgaagttcctctattggcagctcttgttttctctggtacaaaatctcagccggagcgtccaagacaaaaatcaaatccggagagggaatgcaccatgcaaacattttagcgacccaggtgggcagcgagtattgatatcgagccatgtctgcatagtaatcgtagtagtaccggtcaaaaatgaccagctttttctttattttaagcggaattatcttcatccatgtgccgatgatgaaatcaagattatagaaagaaaaccggaggaaggacttgatttttccattcaatttttttccgtgcgggtcagtgtttgttgtttcttctgaggttttattgtatagcttatacgaacccgcattcgacagataatgcgggcggaagtaaagctcaacatttccataaaaacttccggacacttgctccgaaaccgccttgatcgccgtcgattttccaccaccatccggggataagaatgccacactgattccggatttgtgtatcactcgtttcgggatgacctcgaagatttggaatttacgatacatgatttggaacttgctgcttgcacaatttttttgagagattgccttcacgcttttccgaaagactgccttgttctcctcaaaaatattgcagtcgagtgtatcaacacagcgtttgatcagcactgctgcttccttgccaaaaacatgctccaaccgtttatcatattcttgtggagaatgcaggtacatctgacgcgcgatttcaagatgttccggcttcatatcatttttgatggttctgcggataaacatatactgaagttcatcaaaataatcgggaacataaaagcatttatagaaccgcttattctccagcatcactgctgccggcataacattgggataatccttgcgggaaatcgcactgtaaaaatcaagttgcagctggaatcttttttgaggaatcggatacgaaaggatataagtatattcataatagccttgtacgattttctgtgtgaccaaaagccgggtctctttagcaactttgataaccagctgatccaaaaaagattcgtccgcattgcgatacatcatatcgatgtccgacgggatttcttcgggcatcatttcatatttattctggatacaatagtcaagtccgctttcattgatagtctgaaatactttttccaaaagaagcatacttgtcctccctctgatgtgtagttatgttcttgtctttacaactcgtcctgcatggccggtaactacagagttggccggaacagattttgtcaccacagtatttgcgcctatgatgcaattatctccaatcgtcacgcccggaagaatgacaactctagcaccgatccagacattgttgcctatcgttaccgggttgctctttttcatgccctgctggttgatggggatattcacatctgcatattcatgcgaattggagtaaatgataacatctggtcccatcacaacattgtcaccaagtgttacatccgtgctcaaaacagcatttaatccaatctgggaattttcgccgatcaatataccatgtccgtctccaaaataagcattccgtttaatcagcgtacccccccccattttcaaaaacaactttttgcagatagaacgacgaatggaatatgccaactgataccccggaatcgggtatgcgggtaaaaatctcgcaaatccataatatagcattagccagaattttttcatgatcaattcctccagattcagtactgttcttgtgtatggcagagtgcgcagattgcaaaaaagcagatgagaacataatacgaatgcaccgccaaagtcgtgacagtgaaggttcgcacaaaaataataaggaggacgccaacggtttccgccagaataacatttgatctatcgatacggtaggccgtaaagatttgctttattgttgaaagccaaaacatcaaataaagaaaagctcccagtaaaccattggaaatcaaaatagcaaaccattcagagtccaaggtatacataactgcattactctgtgcggccacgagtttctcacctgctgcaaatccgtttccaaaaaatttgcagaaccatgacgatttcaaaaaatagttccatgcatatgtccaccactctgcgcgcccggaaagagaaaacaaaaggtcccggctttgtccacggagaagaaatgtcataattgtggatgcgccgaaaacgactacgactattccaagaaaaaacagaagcagttttaatacagcaccacgataaaaaaacaggaaataaactaaaaaagcgagcgcgacagaaaaaatcgcagttcttgactgcgatagaatgatacaggcaatcaggcaaccttcccagatacactctcctaagctggctcgttcccttatcgatagcttttccacaattaaaacataaaagagaatgccagaaagcataccgacgctcgtagaacttagtggtataatccatccactaagcaaaaccggaagcaaggcattcctgattgcagaataggaattttctcctgtgtagagagctttggttggacttacaatgattcccacaagaaccgttagaatcaggaatgaaacaaacagttttatagcgtttaacgctttttcggaaaaatcatcgtcaacttgagtcatgcttgcaacatagacagcacccataaaggccacaaaatattcaacccattttacaaaggagtacgagagccagttgttgttcaaaaatgcaaatgcggataagaaccagaaaagaaagatccatgtcaacggtgccggtatgatcacccttctgaacaggttccacttccatgaaaaatataggatggagaaaaaggcaagtggaagaaatgccattcgcaataaattatccgagctgaacagtcccgcctgagcctcagaaacagttcgggaagcaaaactgaggcatgtcccaaagagacatagaataggaatcatattacgtgtccaataaagtcgattctttttcatttttaattattctcgttgcaaattttccatatttcatatgcttgtaaagtagttggaataatgtaaacgatcagcattgcaatgcaaacgcccataattccacccttccaaatcattgctgcacctgccgttgccaagaaaagtaatccaagtaaaagggtgtagaaaatcatttgcggcttcccataagcttgtaatacagcattctggatattgttcagggatacaaagatcccacgaatgcagcaaatcaaaagaggagcaacaccaatataatagctttctccatacagcattccaatcaagctctttcctagaatgccaagtcctatacaccagagcagattggcaacggctgcaatcaaacatgcgctatacacttttttagagactgatttcgaactctctgtttggatacttgccgatagattaggaagtaaatattgagacagtccaacaaacactggctgagggagtgttgccagagtattattgttattataaattgcaaccgattctgttgactgaaagaaattcagcatccatacagacatctgtgattttaccgagtcggacatactgataccgatactccactttgcagtccaccaattttcttgccaagttttcaagatatctttcaaattcaaggtcatcttaaaaatcgacgcaataaagagactgctgcatacaaggcaagagccgccgataattccgagaaccgtattcaaagacagatttgaacggaaaaaaatcagcattccaagctgggcaacacattgcgtgatactcataataaggcaattcccaatccgaccaactccaaaaaagagttgtctggaaaaatctttgtataagtatccgacgaaaaagataaagaatgcgattccatttgcagaatggcttgcttttcctccaaggaacagcgaaataataccggcagctatcagaaaaataaattccaaactgaatgtcgaggcatagtatcttttcttttcgcttccttcagcatacttgggataatgcacactaaagggaacggcaataatgactctttgcagcccaagaacaattaacgagagtgataaaatcaacgcatattgacccgctgtttgcatactgcaactatgcgcaataataattgttgtcaaaaaagaagtgacgctcgaaaacccctgctcgatcattgataaaagactgccagacaagaaggattttttatacattaaataccctttcgtactcacttatgattttctcccagctataagcatcctgtacccgagcagtgctcttttcatccagttgctcaattatctccgcatccagagcatccgctttctccagtaaagcagacagattccccggctctttgctccagtacagagcgctgtcttcgccaacttctttgttaaagccaacgcccaaaagcaaattcaaccgggtactggcaagtgcctctagcagactgggattagtaccaccgacttcgtgaccatgcagataaccgtaagcttcctcacggatttttttcagcaggtcctgatcataaaccgtaccaacaaatttgatacgcttatctttctcaaaaccggttttttcacgaagctgttcatagaacttgttatgctctacgttcgtgataataacgaggtctttttcagtcttgctgcgcataaactctgtgatcatagtctcatagttgttctccggaacaaaacggccaacaatcaaataataatgcccacgtttgacattgaactgcgtataccactcgttcagcttttcctcatcgcactgagagcgatcagtatacgcgccatacgcaataaacgtggtatccttcacccgactgccataagtatctttgatatatttctcgatattgacagaatcgcagattgccaaatcgctgttctcgaccagacacttttcgcaataccgcagaaaagctttggccggagcgctccacttactgcgcttccactccaacccatctgggttgcagtagacctttgcaccaagtttgtgcagctttttggcgtgcggaatcagcaaaggtccaattctgcatcccagaatacagacgattactttctcctgcgggtgctgctttgcccattcctccacctgattcagaaccaaacccacatggaaaatacgtccgggggcgccgggtagcggaacgcgaacattaaagcagtctgcatcattgtgctcgaaatgtttttcatcgttgttcatacaggaaacatgatactttagctccttagactgtttacctgctgtcagattctcgacaaaggtttcaaatccgccatactgtgccggaatgcctttgctacctacaataaaaacatgtgtcatactctatttatctccttacacgatctggcaattgctatacatcggttcgcttttcctaaccttttcgctttccattaacagcacaatactttctcgccggaactccgggtcgatttttccatctaccacacctttgcgtcccagcacgacctgaatgctcttccaaatgaccttcaaatcaaatttcaggctaacgttctggacgtattcccggtcatagtagactttgtcgtacacatccaccgtgtcacggccgttgatctgtgcccaaccagtaatgcccggtgttacctgatacaccccgtaccagcggcgcagaaaacgaatttcacgttccgtatacaccagcggacgagggccaatcaggctcatttcgccacgaactacgtttgccagctgcggcagctcatcaatgctggtgtcgcgtaaaaaacgtcccactttggaaatgtacatctgcggattttccaaatctcccgtagccacatttttaggtgcggaactcttcatcgtccggaacttgatgatattgaagcaatgagcccccttgcccacgcgcttctgtaaaaagaagataggctcatccggtgcactgactttttgtgcaatacttaccgccaaaaacaagggtgaaagcaaaaccaaggctagcaccgccagaatgcggtcaattacggatcgcaccgcaaggtattttttctgtttccgggtcaaatgaacatagtacggtccaaaatcaacgtgataattcaattcttccaatttttccatattttcctcacacttttaacctgtttatgcgtatttttgttcgtctctctataagcccaaatcgtcccccaacaacacataaagtccttgcttctgtttttcatttaactctgctcatccaagttttgccacaacaattccgacttgtgctgcctgcttaggcgagtactccgggttgcttttgtcccaccgcatcccaatctcatccagctttgcaatacgctcctctgtcagaacagcaccgcttttttcgggattcagccgtgtgtaacgctgccgcttgacccatttaccgagggcatatccctccggcgaaacatagttgaccgggaccctcagatcaccgtgggcttcaaaataacgttttgcttcctgatatccttggttccactggcggtcattgcggttgccccagtacatcccgatcctgttgagccgttcgatctgctcctccgtcagctttcctttcgggtacgaccattgctgatttgcgagccatattccaagccgttccccagccgctgtcacataggagcggggaatattcaagttcccgttttcctcgtaataggccacagccagggcataggccttttcccacttggcgtcgaagatgctccacaccataccgatctcatccagctgtgcgatgcgttcttccttcaagcagccattcaacttctgctgccgggtcttgaggatccattggcccaagggatagccctccgggtccacatactttccagccaccagcagatctccgtaggtgtcatggtatttctttgcagcctcgaacccgtgctgccatgcaatttccttccggttgccccagaccatgccgatgctgtccagccgtgcgatctgctgctgggtcagatcgccctggatctgcccttcacgcacacggcgctgggtgatcagccacaccccaaggctcaggcctccaggcgtggtatatcgtttcgggacgttcaggtcgccgtgctccgcatagtagatgctcgcctcagaaaaatagtgctcccaactggaggacaaactcgcctgtagccgttcaaacaacacccggcagtcctgcacctgctcaataacctcaaaccgctccgtgacgaccttatcgccctcaccgttggcatagagccggtgaacggcctcctgcatctcgttttgcaggctggaaatactggtcaggccctcaaagttgttgaccacatccaagatcagcggtattgcagtgtcccctgcagtcaaggcccgtccgatctgctgtttgtagacgacaggggagatggtaggccggaacaggatcacgccagaaatgccttctacatggacgccctcgttgagcatatcgatacagaacagcagcttcagccggtcaccggtgtccgttttgaagtccgcaaaggccttatccgtgttcgggtcatccgagtaagcctgatacaccacaacattcgggtttaccccggcgaaccactcctgcacatgggacaccatctcgtccatatgctccttgttggcgcagaacacgatgtacttaccagatttgtttgtgatatgatgggcaaagaccttgtccagaccgtctgcttgttccaaagcgcggcgcagctcgtccagatatttctgattcacatcctgaatgcccggtgttcgcaggttgtccacccgtgcctgatactttgcaagcgttttctggtactgataaactgtggtcacatatttcggggcaggcaaaatacccctgacgactgcttcgccaagggtcatctcactggcaacatgtccgtcaaaaagttcttcagccatattgcggttattgtccagatatcggatattcgtcgccgtcagccccagcagttttgcatccgggcataactttaataaagccaccgtactttcgccccaacattcggcaccggcacggtggaattcatcgagtataatataggcaggcttctgcgctgctatttcgtccagctgtgcctgcgtgcaacacatcagtttggcgtaggtataaaagtgaacgtttgccaacggaaaatccgggtcgttccttttcaggctttccagctgggtcttgaagatatattcactgggagaaagccagattacaaccttctccgggttgtcctcgatcaacttgaacgcaatgtagctctttccggtgccggtgggatgaacaatggcagctttgccatactggttcatcatccggactgccgcacgatatgctttctcgttgtgctcaaacaggcgcaatgccaccctgttcacccctttccgcaataaaggggtatcctccacatggaaaatggaggataccaatctttcgacatcattgtttgattctccttattattttatcatggttatatctgggaatcaatagaaatccgtacaaatgtatcccacatgaccttagaaaaaacctcgcagaagctgaaagtttgttgcacattgcccatttttgcatgaaaaatccagctaaaaacgatggtggacaaaataagtggtcaaatgggtgtccaagccgcaggaggaaacagaaatggcacgacggggagaaaacattcacaagcgcaaggatggtcggtgggaaggtcggtacatcaaggcgcgcacgccggagggcaaaatccagtggggctacgtctatggcacggtctatgctgaggtcaaacgtgtgctgattcagaagaaagctgaggcgggcttctacaacctgaaaagaaccgacctgacctttgaagcgctggctgaagtatggctgcactccctgcggaacagtataaaagaatccacctatgcacattattcgtacaccctgcacaagtatcttcttcccgttttgagcaaagtgcccgttgcctcccttgaagaaagctttctggaacaggccatgcagcagatcattgcgccgatagatgccgcacacaagccgctagggaactcctctgcccgggaatgcctctccatgctgcgccgtatctgcaaatatgccgcgcacttgcgcctgatccgtccgatggagctagaagtagcgctgccaaaagccatcgacaaaatttctgtacccctctccccggcggagcagcagcggctttatcagtatgtacaggagaaccccacgccccgcaagattggcttattattagggttggaattgggtctgcgtattggcgagatttgtggcttgcaatggggtgattttgacctgaaactcggaacgctgaaaatcagccggacagtctgccgaatttcctgcggaaatggacatacaaaggtagtcatccaaacgcctaaaacccgcacctcccgccgggaaattccaatcccgaagcagctgcttattatgctgaaaaaactgcgtggatgtgtcagcaatgccacatggtttctgtccggcaacgagtccaagcccaccgaaccccgttgctaccgaaaaagcatcaaggcatatctgaaacagtcaactatccggcaagtacgtccgcacgcgctgcgccatacctttgcaacgacctgtctgcaggcggggtgcgatgtaaagaccctcagcgaattgttaggacacgctaacgccaacatcaccttgcagcgctatgtgcactctgacctgacccgaaagcgccgggagatgaaccgaattttctcccatcaggtgtccatgaggggcggggatgcgctaaatataacgtaatagagtatgatttacacgtcgttcctccattttccatgtggaggatacttttttgttaaatatattctttgcatcatgagatacttttgcgtatacaatactgcacgaacttcagcacctcatattgagttgaactttatccatgactgtaaaagatgccattgccaaacgctttgaacagttctgcgaccagcgggagatgcatcccaacaagttggcaacccacgccggtgtatatttccaaatcgatttattgcttcactcatagatatatttttattctacaaactgcacctcttgcgaacataaaaaacgagtgttatactaaagccatcaaaaaacattggaggtgtcccttatgccccatcccaaaggaagcaagaacaagaccaagaccgtaaaagcaaccgttgactttgctgcgcagattgccgaaaagcagtccgcaaaggaagccgctgccgctgaaatcgcatccatcactgcgaacatcgatgcgctgaaagctgacctgaaagccaagaaggcagagctaaaatctattgacaaggaaatcgccagaatcgaagccaaaaaggtcaaggcggaaaccaaagcagcggaatccgcaaagaaagccgaagcagaggatgttctgaaaaaactgctggcaagcggcgtgagcgcagacgatatcctcgcaaagctgaagtgatttaaaatttctgacgcagaagtttacggaaatttctacgtcgcaagcagtgcaacttggtaccaacttgcgatttttgaatcggatttttcaaaatccaaattcaaaatgcttgttgggctgtgcccaatcccctttcgttctgcatcgtgcgatgcaggctgcgcgtttgttccaaacacttctataacaaaaaaagatagcctagggctcttccataagggaagaatcctaggctatcttcgtttatcgggacttcattttttcagcgccactcttttcctctgcaaagaacagttctacatttttctttgcacgaagaagctcctgcatttcttctttcgctttgcgatagtccgggtagcgcgctttcttttctgttagccgcttggaatattctgcatccaactctttgaccttggggagcgttttcaaattggcttcatcaaacgccgctttcgctgccttgtgcagggtgatctccgtgcggtgcgtttccagaaagcgcttgctgtatccggtcttgcggtaggcgtcatagaccggacgcgtcttggcgtagttgatgatgtgcgctttcagcactgcaatttctgtcagccgcttctctgatgctttaatggaatcgcccagttcatgatagcgggcggtggcagcgtccacacgctcctgcatttcctctatgctgccgattttattttcctgtaagaagatcagcgtccgggacatttcttttaagttgtgctgctttgcccagcgagcaaaacccgtgccttttccctcgactagttttgcctgaatgtccaccagcatctgaaatttctgctccggtgcaggacacttttgccgaggccgatgctccacttcccctgcaaggacagctttcaattcttcctcgctgtaccctacccccaaagtgcggaaccggatgaatcgtttctgccgtgcgcccttgacggaggtatattttccgcgtttgacttcatagccctgctgctccagcttttgcagaagctcctcgtagtccttgggcttttcagccagaatgttgtcgatcacactgcataaccggtcacgattgctctcccttggcgggtaaagtgtacgcttctgccgctcccggtaaggctttatctcaatgacggagagctgatgttctaagcagatcaggtcactcaaccgctgcactgccaaagctgaaaagaaaaaatcccggaattttcgtgttccatccaacgcagtagagttataaataatgtggttgtggatgtgtttcctgtccgtgtgagttgcaacgataaatgcatatttgcccttggtaaagcgcatcgccagttcgtagcccaccttgttggcctcctctgcggtgatctcaccggggcgaaaagactgccgaatctgataggcaatcacatcatttttctgtctgcgccctgtggcaagttcgtattgacgcttggaaagcataaattcttcgtctgcggtcaatgggctgcactcgtagctactgaccagctctcccctgtttgttttgtcaggattcttcgcgtagtccgtacggcttttcaggcaggccgcaaccgacttgcctttgtttttgtgcagcgcaatcaaacgtattgcagccattctgaatcacccccgtgtgacagccaatacttgagccacttgtagcgttcgcagccccaaacaaaaaagccgcccgaaggcggcaaagataaaaatacttacagttctgcaagccattcgctgaaccgtccgatgccctctgtgatagcagttgcgccgaaaaagagaacgaagcagataaactccgccaccagcagaatgaaaaactgatcccaagtctggcggtaggcggtgtaaatgccgcagccgaagatgtagagcatcagcggcgcgaccacatagctggacagagtcagcagccactttgccatcagagccagaaacgccacaaagagagaaatcgggaaaagagcaattttcttcagcgtaaacatcatatcgaacaccaacctttcttttcggctctattataaaggtatcagctattgcgttgcaaggatgtcaactgttatgtaccccgcagtcctccaactgcggggaaagttttaaagttctgccaaccgggaaagaatctgcttgccgatgctgattagttcatccagccgctgctgcaggtcctccagatcggcggcgtaaacccgaccattttcattggcggctttggcgtactggttcagattgttactgcacatctgcaaaagatacgccatgcggcgcagttgcggcagatccaaatgcagacaatatccgtccagcgccatttttcgcagataggagccgatgctcagaatgccgctggattccattttgttccgaatccgctccaactccggtttgctgacccggaaatggagttgctggtcgcggcggtcgctcaccgggcatcaccatccttatcataatagctgcggaacggtttgacaggctccgactgattggtcttttcccccagtgcagccagcacagacggacgagttgcaggtgtttcggtttcctcggtttcttcgggagcatcctgcgaggaactgcggtcacggtcgatgttcagcaaggcgttcaattcagcaaggcgggcagacttttcggccagttcttcctcctgtgcaaagggctttgccacttcgacctctgcggcctgcttctgctgttcaaggttttgcagagcattttcggcatctgcaatacggtcagcgaaattgtcgatggcattgtccagacgagtgatgttgccgcgcgcatcatcgcccagcgacaccgggtaactcaactctgcccggagtacggcctgatgctcatttttgaagctgtcgaatcgaatgttcagttcaaagccacggtaggtgcccagcagcatcatatcagcattgggcatctcctgccgagccagcagcagccgttcgcctgcagcctttttgtcatcgtacaccatgcccttgatggtcataccgcagaagttttctttgtcttgcgggtgtgctgctgcaatctgtgaatcctgctgcaaagcagcaatgcgggttttctgtttctggatttcttctgggaatgttttgagcagcttatcttccagacgatatttctgattctggaagtcaccgcgcagaactttcaattttgccacctgcacgtccaaatccatcttttcccggatgcgcgggtcaccagcacacagagccttgatttcagcgtaagacagagcctgctcatcaatatcatcgcaggagcgcataggcgacttgctcgtcatgatctgcgagataaacttctgtttattctcaagggtctgatagaggtaggcgtcaaatgtcgattccgtgacgtagttatagacgtagacttgtttgttttgattgccttgacggatgattctgccgttgcgctgggtcatatcagacggacgccagcctacatccagatgatgcaccgctacgagcagcgtctggacgttggtccctgctcccattttggcagtgctgcccagcagcacacgcacctgtccgctgcgtaccttggagaaaagttctgctttcttgttctccgtatctgcgttgtggatgaactcgatctcctgttcaggcacaccggcgttgagcagcttggagcggatatcatcatagacgttgaacgaaccgtcccccttgggagtagacatatcgcagaaaatcagctgggtcagcttctgctctttggtgtcgttccagatgcgcaggacgttgttgatgcaggcatttaacttgctgttggggtcatcgggcagagcggaattcatcaaccgctggtcaagaccaattttgcggccatccgacgtgattttcaacatattatccacagaggggtcaacagaaccgctgtggacttcggctgcacgttcgctcaacgcctgcaccatatctttctgaatctccgagggcttgaccacgaccgtctcgaatttggcttcgggcacgggcaagtgtaactggtcgctagttttaatgtccgccgcttccttaaacatcgccatcaattcgggcaagttgaaaaacttcgcaaaacgagtgcgcgcacggtaaccagtgccctcgggctggacttcgtcaagaggttttcggtaatttttctaaattcatcaggttgtctgcaaggaagtcccttgtgacctcatgtctgcacatatccttgaacatcttttcaatcggctttttggcggtttcggactgcttcacacacacaataaaggtggttttaccaatctgcaccgaataactcgaattctgattctccattcgatttctccttttatcgtcactttttgaatttggctggcagactggcaactgtgggtgtaccatgattttcttgccagccaaatggcttattccatccaaaagacctttttgcggccttccacgatcttgcttt

SEQ ID NO: 419 - DNA, 20479 bp, unidentified
  source 1..20479: mol_type = unassigned DNA
ttattaactaacaatgaattcgacactgttgcattgtctgtttgaattcaggattaataaagaaatacagtcttcaggattacgtaaaatgtatcggtagtttttcatatatggaagcattatctaaaatgcaaacttatgacatcttagtacttctcgaagccagattggaaaaaggtattttctttgcaagtaaattcacagattatctgcaaaccgggttaccgattttggcgatttccccagctaatggatttgcagtagatatgctactaaatcaagaaggtgaatttttagccgataatcagagcgttgattccattgtttcctccttaaataaaataattgcaagatgggaaaaaggcgtacttgccgattgtgcctccaaaaaactatatgaaaaagtctctcctgaggcagtagttaaactatacaaaactttaatttaacaagaaatgcttgtcaattgcaaaggatacagatgcgatattgccttattgcgcatattgtgcattgtagtggtggtatttttccatgggtatggaatgatgtatgccaaccatttttccgactgatgtagcagaattatatcgtcaacaatatgaattgattaatcaatatggacttattaacttggcaatgccgatgtttgtctttataagcggtttcctttttggaagacaattaaaacgtaagccgttgtcgttagttaaagttataaaagacaagtttgttcgtctgatgataccattctttgtctttaccatattttttatgttaacaacgaacagcttgtcgtgggaaccgttttaccgctggacttactggcatttgtggtttctccctatgttattttggtgttttattgttacatatttgatacatccgtttataatgaacaacagagcatgggttgctattttaacccttttagtgctgtttgctatttcactggtaggaaaagttgttccgatgataataggtgtgcataacgttcacctatggatttgctggttcgctttcggaacatggttctgtagtcatgaacatttaattactaaaggatttagccaaaagttcgtaattgtctgtggaattagcatttatgtgattattagctattttgttccatgggaatatggaaacaacaacctgatgggaacaattgcaacattaggaggaatattggctttgtggagtatggcaaatatattatttccattagattattgggctattgagcataccaccttattccctctaatattttcattgatggcattcatcatttcatggggactgacatggcttttacttaaaactcgttttggtaaatttcttataggatgaaaaatttgctccgttatgcacattgtgtatggttaaggataatggcgtgtaaagcgcgaaagtttctaccggataggcatatattgattgttgctcctcaccccgatgacgaaataataggatgtgggggattgatagcccaccttgtaaaagagaataaagcacctcatgttgtaatcatgacaggaggagaaggctctcatcacggttgttgtgatacttcatcaggtgatatagttgcagcacgtcgccgactgacccgtaatgctgctgccattgtaggattgccgattgagaatattcacgagttgaattatcccgatggaggcatttccatgaataatacggaaacagacagattgaaagcgttgattgatgaattgcaacccgatacaattttagtacctcattggggagaaggttggagtgaccatattcaaactgctgaaatagtaaaacagatagccccccactctgctaaactttggatgtactgtgtatgggtatggtactataatgtgtggcgtgatttggattggaaaaatgcagcacaattgtgtatgactcctgccgaacatcggattaagcttgatgctatggatgcttatatacgccctttggcaccatgcggcaaaccgtggagcggagtgttgccgaaagtgtttgtaaaggcgaataaatggaatagagaactttattttagtttaaaatgagtagattgcagcaacaagcaattgttataggtgattcatttaacaatacgcttggtttaattcggagtcttggagaagcgaaagtagatatcgttttgttgcttgtgggtgacgatcgtctgtttgtttcaaaaagtagatatttgaaaaaatcacagattttccaaatggaaactattgatgattgcttgcctacgttgcttcgtattgcggacaagaccaaacaacagacaatcatttgtacgaatgacattgcaacccaatatatagatgagtatgaaacaaccctttgttccctgtatataactccaatgaaaggaagacatttaggaaacctactgaataaagatgaacaatgccgtttagccgaaaattgcggcttaacaataccacaatcaatcatctataatcgcaacgaagatttccctactgtttcatacccaatattaatgaagccggccaatagcaatacaggagaaaaatctgatatacatatttgctactgccaaaaagatgtcaataaagcactttctgcaacatctacttgcaaccaattcattatccaaaagtttattgaaaaagaatacgaaataaacctcatcggtgtcagtaccgttaatggcgtatatattcctggaggaattcggaaaattcgccattatcctacaatctatagcccatgctcttttggagtattccaatcggtagaaaacttgaatgtagatgttcattcgatattaaaattaatgcaacatgtagggtatcatggaccattcagtgtggaattattacataagaatgcaaaaaattattttatggaagtcaatttccgtcatgatggtcttgcctatgccgctaccgcgagtggtgtgaatcttcctgcaatgctgttcaacagccaaactgttcctatgacagttaacaacacatacatgatggatttatcaacagactattgtcatgtcaaggatggtaccttatcgcgtaaatattggttttatgatttcaggaaaacaaaatgccaattgaatttcaatcgtcacgatttaatgcctactatatattattatgtgaataaaataatgaaacatatatgaaccctattattagtcttatagctccagcttacaacgtggaaaagtacattgaagcatgtgtacatagttgcgagaatcaggatttaccacgagatagctatgaaatcattatcgtaaatgatggaagtactgattctacttattctacaattgagaggttgtcaggtgtttacgaaaatataagaattgttacgcagaagaatcaaggattgtcagttgcccgtaataatggtttcaaattagcacgaggtaaatatgtatggtttattgattctgatgattgcatttcttccaattgtctcggaaaatgtttagagattatggaaagagatgatttggatgctttggtcgttgctccttcagttccgtttagggagatatttccttacaaattcgattcagaagcggacgtgtcaaaagtttatgatggagaaagttttttattagatagtggcttttttgttgtcggagcatggtgctatatatttaagcgtcagttttggcacaacaataattttgagttttatcctggaatatcatacgaggatactcaacttattccatgggcaattgctcattgcatgcgaattgccgggttgatcaagttcagttgttatgattatatccaaagaaatggttcaataatgaactcgcctgtcaatcaacacaagataaaaagtatagctatgattgtaaattcatatcttgattattcggctcaaataagctcagaacgacttaagaattattttttagagaattcaacgaggcaatatatttcaggtatcaagatgtcggtacaaagcgaaagaggggatgtaaatgtattcctaaattacatacggaaatatccaacaaaagtaggtaaatttccttatagcttgtatcagctgtttgttcttaaatatcctctgatttttgcaaaattattaagactcttgaaaaaatatgattcgtgaacgtcagacttatattgatgtccttcgtatgacatgtatgatatgtgtcataagttttcatatatttggtaggttggatgatctttttcgtgattcattcttagataaatctgctatactctatggtagtgcaatattggttcaaatttcagtagcaatgtttatgttccttgcaggatattgttatcggaaaccacagagaaaagatgttttaatgtttttgttaaaaaaataaaaaggttgctgatcccttatctcgttttttcatgcttgataatgtttagcactggtttctttgatgtgggtgaactgttcggagggggattttatcatttatggtttcttacagcattattttggtgtttcatgttttcaatgtgtattgattattcccatccaaattctttattattactcccaatttctttaatacttatagcaattcatttgccaaacttatttggattacaagattttgttaagtggtatttttattttgtagttggtgcattgatgcactcttataatagtttagagacttttataagcaagaatattacttgtataatctgcttgattatagccatcggaatatttgttttcacccctgctctaaaatatagagaaggttcaataatccatgcaatagcaacttgtttgctcatttgtattctattctgcttggtaaagaaacgttggaataacaaacaaggattaaaagtcaacgcggcttttatatatgttgttgggaattcttcaatgggcatttacatcttccatttctgggtgttgatatttatgctttcttctacgtcaatcagactctttcatttaaataagttagtagaacatgtttcctatccttttggcaggaagcttgataattgtaaattttctgataagttttgttcttacagtgcttctaaaaaagactcgctgcggctgctggctgttgggagaaaattatataaataatttgctaaataaatgaatgtattagtatgtatcccttgcctgatgacaggaggaacagaaattcagacactcaatttggtgaaggcccttatcaccgcagagcataaagtgacaacagtctgctattttgaacattctacaaacatggtggaacgttataagcaagctggaagcaacgtatgcttattgagtcctgatgggaaaagacctgtggggataacaaacacggttattctcctgtataagggattgcaccgtgtattgagggaagtaaaacccgatgtggtacatgtgcagtacatggcaccgggcgccatccctattatcatattacgtctgttaggcatcaagcgcatagtagcgacggctcatacggctgccgacatctatctttctttgcgattattacacttcgtttcgcgatatatacttacagcatttcaatgtattacagaacgagcagagaattcgttcttcggaaattcgcaaatgtataaagctgaaatgaagttaacccgacatggcaatcattttaccatttacaataacttgccaccttatatttccatagccaataaagaacaacgaatcggcaaagtgataaccataggagttgtaagccgcctggagcctatcaagggaatggacttggtagtgcctgcttttgcaaaaattcatgccatgaatccaaatacgcgcttgttggtagtgggtgatggctcgctatgtccactaatggagcaacagaagaatgatgccggattgaatgaagtcgttaagtttgcaggcgtacaaccacaggaggctttgcaagcgtattatgacagcatagacatactgttgatgccttcgcgcagcgaaggattcggactgactgcaatagaaggaatggcacggggatgtgtagtggttgcggcaaataccggaggattaccggaagtggtaagtgatggtaaggtaggtttgttgcatgaaccggaatcatcggattcgcttgcagaaaaagccatacggcttgtaaatgacagggaattgcttatgaccatgaaacagaatgccatcggtcatgtagcaagattttcatttgcacattattctgaattaatcaataacttgtattcgaaattgtaattatggctattgtcattaacgcaataatcacggtcatacttctgtactatgcctataagtatgcttccggtggcacaatgatcataaaacatccgtttaaggttggcgaatattatgaatgcaacaacaatttgtcgtttatgatattcagtgtaatgacggcaatggtgtttttaggaccactatcactggtgaaatatgctatatggatattcttcatgttgttgatgtcacgccgatgggtcaagaaatgggatggtgtgatgacgatatacctgattttcatattatggaatctatatacgcttacctattctcactatatctttcaaggctggatgatgattgtcaaattttgcctaccaatactctatttctgggtggggtataatgccgtaaaggaggagcttgacttgtgggtgttcttgaagcgtacagtactaatctgtgtaatctattcatttctgataggtggagtatctgctaagttgattagtccactttatgggtttctttgttttggaaccggaggaacattcgttgcatacgcttctttggcagacttttatgcaatactgataggtattcccgtaatgctgtatatttttacgtctgaaaggaaatttttatatgcagcaggtctgttgtttttatcatcgatattggagagtgtgcgaacaggtatcggcgcatccattcttggtctttcacttctgtttttagcctataaaaaaggacgggctgttccagccgtgatgcttttgatagcactctttgttggctccgtattctttgtcaaacccgtaaaagataaaatgtttggcaaacaggctgaaaccgttacaatcagtaatgtaggcaaggctaaaatcgaaactagcggacgcgaatacatgtggaaaaggataatgaatcactgctacaatccaaatcccacgttcggtagtggttgtggtggtgcgttgggatggctgaaggacataaacagtaagggaggattggttcttattcattctgattgggtgcagatgatgtcggaatcaggcaatattggtttgtgtctctatattttgtttgccgtattcatgttgtttaaagtgctggccatcacatggaggtataggaacaataagatgttgacactcttgggcggcacaaccgtaggagcctttgccgcctgtttcttttgcatgggatttgacaatgtcatcacatacgcccaacaaggctatgtactgccgtttatgctgttcggcatattccttaagacaattgacttgactgaaaacggagaatttgaagaagaaataattccataatatgttgaattaatgatatctgttgttatacctttatataataaggaaaagagcattgcgcagacactggaatgcgtgcttaatcagacgtacaaggattttgaggtaattgtagtggatgatggcagtaaggataatagtgctgctattgtggcacaattcacagacacacgaatccatttaatccgacaagagaatggaggtgtcagtgctgcccgaaacagaggaatagaagaggctcagggaaaatatgtggcattccttgatgctgatgacgtatggctgacagatcaccttgaaagccttgtaaatctgattagacaatattcccagtgcagggcatggtcctcaaactatgtcaataacataaatggtacagattataatattattctgaataaaataccatttaaaggagaaagtggaattttaactaattattttgaaatatgcagttgttcccatccaccagtttgcagcattacaacatgtgtagaaaagtccttattgaaggaaataggtggttttcccgttggcattacctccggcgaggacttgcttacgtgggcaagaattgcaataaaaaccgactgggcatatacaaagaaagcgacagcagtttatatgatgccagctacaaattcatttacagaaaggccaactcgcccaaatgatgaaggagaccctgtttgcgatggactgaaattattactgaaaacggagtattcaaaaaaacatgaattgaggcatttcataggtcgtttctacaaaatgaaggctagtacgaacttgcggtatggtgataggtggaagaccatttgtgaatgtatgaagtcacttgtttataggccgtttgcgaaagaaacttatcctatattgcttcttgccttgatgccaggatttattcagagaaggattttcaccatccattcttatgataaagtagctgatattaaagatgtaaaaaaactaatagggaggtaaacatgggcttttcgcatttagttattcattgtctgaatacaatggaattaatgttttaaaatgagataaacgattagtataaaatatgagttacatgaacagaatatggtattatgtatttcgttggtatgctgtagcaataaagctgattgccagaagggggtatgacaaatggattgtaagagcccataagaaagcgggtgtcatttttattggaagtccggaatacattgactcacattcgcatttagacccatctggaggattgaccataatgggggggtagttatttttactaatgtgataatccttacacatgattggtcttttctaaaagggttgatagctatcaataaggttaatgaatgtatttcttcatttcatgctcttgcttataatggcgtcagcattggagaaaatagtttcatcggtgctggagccgtgattttacctggtaccaagattggaaaattttgtatcattggagccggatctgtagtgaaagggaatattcctgattattctattgtggtcggtaatccttgcaagattatcaatgacacgcgaaagtttggggaaaaatttttagttcggtcgaaagaatcatgaatatctattttaaatatttactgtctttgcccaaatcattatggtttaacttccgccacctgccactgaaacaggcgctgaagctaccgttttatgtccgctatggaacacgcgtcagcgttaaaggacgaataataattgaagatgataatcatgtaggtatggctatgattgtcattggatcccatgaagctgatgtctcggaccccaagcataccacttgcttgacggtggaaagaggcggagaattggtatttcagcacactgcacacatcggactgggaacgaagatattcgttaagcatggagcaaggatgtatcttggcgataactttgctgtaagtgccaactcgcagtttgtatgttacaaaagcatcattatggggcgtgacatacagtttgcctggaattgtttggtaatggatagtgacacacattccatctatagtgacaaggggtgtatccaaaaaatgaatcccgacaaagaggttcgtattggggataaagtatggataggctgtagagtaactatcttgaaaggctcgcatgtgccgagtaattgcgttattggtgcaacaagttttgtatcgggaagcaagtttgaatccaatagtctgattgttggctcaccagctaagtcggtcaaacctattgcaggatgggaattatagattagaggatttctatctcagttaatagtcataagttatttaggtattatgttggaaaataatacaaagattctgtttgtttgtcccatgccgccgccagtacatggctcgtcgatggtgagccagagcatcaaggagagtagcgtgctgaacgatgagtttgagatggactttgtgaatctttccacttcgcgcacgatggaggagattgacaaaaggtcgtggtcgctgtatgcacgcaaggcggtgaggttcatcggggcttatgccaagacgctttggctgttgactacgcgcaagtacgacctgtgctatcttgccatcacttgccatggagtgggctttctgaaggatgctccgtttgtactgctgtgcaaactttttaggcataaagtggtgatacaccaacataacaaggggatggctaaagatgtggataggcatatttaccgatggttgctgcctatggtataccggaacacgaaggttatattgctgtcgtggcgactgtatgctgatatagaaaaggttgtgaaacgtgagcaggtgatgatttgccctaatgggattcccgatacgaatagcaaaataacttctgcggaaaggcataatgatgtaccgcacattctgttcttgtctaacttgatagtttccaagggagtgttggtcctactcgatgcgctgaaaacattaaaagaaaggggatgcagattcgtttgcgactttgttggaggagagacaaaagaactggatggtcggagatttgcactggagattgaagcaaggggattggatgatatcgccgtgtatcatggcaggaaatatggcaaagataaggaggcgtttttgcaaacggctgatattttcgtttttccaactttctatttcaacgaatgtttccctttggtcatcatagaggctatgatgaatggactgccggtaatctctaccgacgagggcggaataagggatgaggtgaaggacggaaaaaatggatttgtggtgaaaccgcaggattccaaagttcttgctgatgcgatacaacgattgttggatgataagaatgcaaggcatacaatgggagcagaaggaagacggatgttcaaggagcgatttacaatggtgtattttgaaaacaacataaaaggtattttgattgactgcattgaggccaatgacaaatagcttatgagtacgctttgagatggagtctccgaggtactttgtgaattggagccatgtgagaaatagtctaataattaaatctattttgtaatgtacgatttttggcaagataattatgaatggttattatcgggcataattcctaccttgataacggcaatctttggtataattaaatatagaaaaaacaaaaggaacaaggacgtatctcaagaaaagaatatccaaactaatactatttatgccaataacaattcaggtcatataactaacaacaaccaccagaatatcaatattggagacacgaagaataccgctgaaaggagatataagaatgccattgaaatcgtaaagaatgaattattagataattatcgtgatttatgtgtgttgataaatggaattgaagaacgagttcctcagaaattctgggatgtacgcaaacccaatgaatcggaagatacatttcaggaacgggcaaaaaactttcataaggaatatcaaacaggaatttttcaactgattcagacttttaaaataaaagaagagatatacaacatatccaaacaagacttgtctttcaattgtaacaatgcaaactgcataaaaacatatactattggcaaaaagatgtgtatgacacgctaaataatttttcatccacattatcgcactacatatctcttaattacagaaattacgaactttatttgaaaaacaaatcgctccatgaggataaggtgcttaaatcaaaaatatcactgttgcaatcgttaagagaattcatacatgtatatccaggggaggaagacagcctctttatccatatcagtgaaatgggatttgaccatataacagcaggtatggacataaacatccaaaatctaaacattgaattgaaagagttatatacgaaaaggtcggatatattaaaaaaaaaaattccaacgcctctcagaacgttagaaatcgaaaggattatgcgagatccctttttgatgcttttgcgtaaaagtgcaggattgacagaagaattaacccctgctgaatatagtgcgttgttgaataaagaaattcaaacagaggtgactgatcctcagaagttaatttcacttgcaatagcgtcatacacagaatctgacggaagagaggcaatctattattatagaaaggctttggattgcaaagaactaccctcaaacatcagggtctttatagaacaatcattgtcaagattgctaaatccagacatttatgatggtggaattggtctgattattttagaaattcaagaaaatagcatgttatctgaaagattgaatatcggcgatgtcattttcaaaatcaatggaaatgtcctcttagaaccagctgaaattttatctacaatggcaactgccagtaaggaagagaatatattattagaagtatatacgaaagaacaaaaaagaatttcgatatctcttcctggaagaactcatttggaatgtatagtcagtcaatctgtaatgctaaacttattttttatataaacatcatcacatgaatacatattttaatatccgttacgagtttgacaagaagcttgtgtggaatcgtattgcctcgcaggtaaaagcggaaaagtctgattatatatgtgtggctgacggagtggtactgaatatcgccaataggaaaccggaatacctgagggtgattaatggtggaatgttctctatttgcgacagcgggtatgtgccgctctatctgaaatggatctatggcgtgaggtatgagcaatactgtggggcgcagatattcaaagatattgttagttcaaggaaataccgtatgatgttcatgggtacttcgcaacggacattggatgggctgaagaataccataaaagtatggaatacagatgtacttacgatgacattctatgaactaccattctgcgatgtgaaagagtttaactatgaagatatagcacggcgtgtggaggaatcagaggctgacatcatttggatagctctcggtgctccgaaacaggagatgttcatgtcgaaactgaagccttacctgaaacgtggggtgatgatcgccgtaggagcagcattcaagttttacagcgatacagatgagaggcgtgctccgcagtggatgctgaaaacgcatttggagtgggtctttcgtattatgtgcagtccgaagaagcaattgaaacggtgctcgatgattatcttgaccttaccacgactgctaatagaagaaatcaagcggaagtacaataaaaagcataatgacactattaacactatatacaaatgaagaaagcattgattaccggtatcaccggacaagacggttcgtttcttgccgaatttcttttgggtaaaggatatgacgtacacggcaccatccgccgttcgtcagtggattatagagaacgcatcgctcatctggaggggcatccgaacttccacttgcattatgccgaccttggcgactcgatgagtatactgcaagtggtaaagaaggtgaagccgacggagatatataaccttgccgcacagagccatgtgcaggtatcgtttgatgcacccgagtttacggcagacgtggatgctacgggcgtattacgtatattggaagctgtgcgccaatgcgacctgattgatacatgccgcatctatcaggcatccacctccgaactttacggtaaggtagaggaagtgccacaaaacgagaagacacctttccatccttacagtccatacgctgtggcgaaactctatggctactggattgtgaaagaataccgtgaagcatataacatgttttgctgttcgggcatcttgttcaaccatgagagcgaacggcgtggagagactttcgtgacacgcaaaatcacgctggctgccgcacgcatttcacagggcaagcaagattgcctctatttgggtaacttggactccctgcgtgactggggctatgccaaggattatgtggaatgtatgtggttgattcttcaacatgataccccggaggatttcgtgattgccactggtgtgcagcacacggtgcgtgaatttgccacgcttgccttccgttatgcgggcatcgaacttcgctgggaaggagaaggtgtacaggagaaaggcattgacgcaaagacagggaaaacggtggtggcggtaagtgaagacttctatcgcccgacggatgtagtcaacctctggggagacccgaccaaggcaaagaacgagttgggatggaatccgcagagtacctcctttgaggaactggttcgcatcatggtgacgcacgacatgcagaaagtggcagcggaacatgttaccagcgtaatgaggacgaacttggctgaatatttggagaaaggaatcgtgaaatgatggagaaagacgcaaaaatctatgtggcgggacaccggggtatggttggttctgccattgtccgtgaactgagacgacagggttacacgaatatcattacccgtacacataaggaattggatttgacccgtcaagaagcggtggaaaagttctttgcggaggagaaaccggaatatgtgttccttgccgcagccaaagtgggcggtatcgtagccaaccagtcggcattggcggattttatgtatgagaacatgatattggaaatgaacgttatccatgcggcatggcagaacgggtgcaaaaaactggagtttttaggctcatcttgtatttatccacgcatggcaccccaaccgatgccggaatcatgtttgttaacgtcggaattagaaaagacgaatgaggcctatgctttagctaaaatatccggtctgaaatattgtgagtttttgaatcggcagtatggtacagattttattagcgtgatgccgaccaatctatatggtcccaatgataattaccaccccgaacatagccacgtgttaccggcgcttatccgtcgttttcatgaggcaaaggaagcaggtctgaaagaagtggtctgctggggtgacggaagtccgttacgtgagtttctctatgttgacgacttggccaacctatgtgtattcctgatgaataactactcggggaatgagacggtaaatgccggaacagggaaggaaatcaccattaaagccctcgcagaattggtggctaaagttgttggttttgaaggcttaatcagatgggatacctcacgtcctaatggcacaccccgaaagctattggatgtatcgaaagcgacttcgttcggatggacttacaagacggaactgaaagaaggcatacgcctttcatacgaggattttttgaacaatcccatgagggcgaaacgataacataactaattacccattatatggtgattatagcgacagggaatacacctcttcccattccgaacagagaagtgaagactgtttgcgccgatggtactgcaatttgcggaagagtaggtaattgccaaagagagatcaactaagtttaacttaaaacgaatttaatatgaattttatatgtaaaatttagaacagcctctctcaatggaagacgaggctgccaaattggatagtaataatacttctttttcttgccactgcacagacgctagacaacgctcatcagtcatatgttgcatagacaagtgcagagcggttcgctgctgagttaacggtatatggattatacgacaacttattgagcaaacagaaacaggatgaattactggaagttttgaaaatctaatcttccaacaggttgagggttcctgtcaaaaccctcttttttattcttaacttattgcatttattgaaccattatcatgcaaattattttattatccggaggttccggaaagcggttatggcctttgtcaaacaatgcccgttcaaaacagttcataaagttgctcgatgctcccgatgggcaaaaagagtcgatgttgcagcgtgtagttcgtcaattgggggaatcagatttgaagggacatgttaccatagccaccagtatctcgcaggctgatgttattgtcaatcagttgggtgaccacattgatgtagtgacggaaccggaaagacgtgatacatttccagccattgctttggcagcttcatatctgaaatatgagaaatcatgtgccgatgaagaagtagttgttgttatgccttgtgacccttttacggaagctggatatttcaaagttattgagcagatggtgcatgcggtggatgacaatgtagctgatctggttcttatggggattactccaacctatccatctgctaaatatggatatgtagtgcctgatgaattgaaactgaaaggtggaatcttttcggtcaaacggtttacggaaaagccgaatgtagctacagcggaatatcttataaaagaaaatgtattttggaacggtggcgtatttgcttttaagttgggatatatgatgaatattgtggagcaatatatccgggctgtttctttttcggaaatccgtaacagatatagtgaattccccaaaatcagtttcgattatgaggtggcagaaaaggccaaattggtagcagtagttcctttctctggcaaatggaaagatttagggacttggaatacacttacagatgagttggaagaccatgtaatcggtaatgttatcactgatggagaggcagaaaatacacatatcattaatgaattggatcttccgattatgtgtataggaaccaaagatttggtgattgcagcatcgaatgacggtattttaatttccgaaaagagcaagagcgagaacataaaaaaatacgcagaccggctacagtgttgtccaatgtatgaggaaagacattggggagaatacaagattattcataatgttcaatattcagatggatttcaatcgttgacgaaacaattgattataaaggcagggaaaagtctcacatatcaagctcatcatctacggaaagaggtatggacggttgttgacggagagggactgttggctatagaaggaaaaattaccccagttaaacagggagatactgtttgtatccttcaagatatgcgccacggtctaaaagccataaatgacttgaccctgatagaaacgcaaaccggaagcgatcttcttgaagatgatgtggaattgtttgattggaattggcaaaagtagatacaaagtttggcgagaacttccagataatcaaatccgattaaatattttacacaaaattcagaattataaaaggcaagggcttttgtgattcttccattgattatgaaaatcgagtttatgggagaatcaaaatttatattgcattccaaaaatgcaaatgttcagtggatagtatcaaaatattccggtgttaatccattaagaatttatcttatgctatttcgtatgggaatgaagaaagaacaagaagtgttggaacaaactgcgtcttgtacatcactttttgttcttttgatatcttgaaaacattgattgtataacatggtttcttcgttatcggtttattatcgaaaacttgcttatcacgtaatagaatcggacggcttcctatgggtcggattcaagccgggaatggtacattttattgctaaagaggtttggaatattcgccccttgacccgaacggacgttgagagatattatgaggagtttacagtattaacccaaggtaaagggagtctttattttcggattgtagctcatggtggatttctgaaagaggcgttggcttatgagttgcatggtttgactgtttctgacgacaactacctcagaagccttaattccggcagacatgtagaactttacccgcataacgagaaagcttatcgtgctattataaaaggctttgaacagcatcgtatcggtaccgttgtgcaagcgaccgggacgggaaagtcatatctgctggctcgttatatatcagaccatgccacagaacgaatttgcgtatttgctccaaatgtcacaatcctggaggagatcaaaaaggcggtaggctttacctctccttatatctgctatcgaacgtttcagtcattgatatattatcgaaaaaatgataaacaactcaaagcagatcatattttgattgatgagtttcatcatttcggtgcagaaatatggggggctgctttgcaggaggtaattgaatccaatccgcaggcctatatattaggaacatcggccactcctattcgcccggagggaatgattgatacggtggatctttatttcgagggaaatctgttttatgaacttaccttacctcaggcttggtattaccgtattttaccagtcccaatcctggtacaaagtgcctatggattagacggtgaactgaatcgtttacaaaagcgattggatcgaagcggatgttcaattcgacgaaaagaacaagtccaaaagaaactggatgtggctcgcgttgattttaaaggggcgttaggagctcctgaggtaatccgaaagttcttgcccaaagatgtatgtaaactgctggttttttgccgtgatcttaccgacctgaaacagatggttcctgaggtgtgtggctggctgacacaagccggacgggtaatcataccatttgagatccatcacactcaaagcgaacggattaataatcaaatactaaaggctttccaaaaagaatctgggaaattgcatgtattgttctctgtcaatatgctgatagaaggactgcatgtggagggcatagatgccgtcttgtttctacggcggacagaatcctatattgttaccctgcaacagctgggccgttgcttggatgccggaagcgggaaacagcctgtcgtattggattttgtgaataacctatcgggcaaatctgtatatgacatgatggccttgcacatggaacgccttgcctgtcagccttcacccaagggatttgaaggggtgacctcttttctgaccacaggtttcctatcagacatacggcttcgtattgaggagatattgacagagttggaaccttggcagatcatgtatgagaggcttattgagttccgtaagaaagaaaatgactggccttcggttacagaggggaagctgggcttgtggtgcaatacgcagcgcatggcttacaaacggggcagactctcggaggagcgttacaaactgctggagtctgtcggctttgaatggaacctgctggattcaaactggatgaaggaattccaatcattgaaagtcttctttgcgactcaaggtcgctggcccaaacgggaggatggtgccttggctacctggtgttatactcaacgggaaagacgtaagaaaggacgtttgagcaaagaacgcattcgtgtgttggatgagatcggatttgtgtggagtcaggacttgaacggtgaatggatgaaaaattatgaagcgttgaaaatctttctcgacaaacagcagcgctttcccaaatcagccgaaggctatttgggcgagtggtgcagtacacagcggaaaatgcgcaagcaagggaaactttcccctgatcgtcaaacactattagatcgaataggatttgtgtggtcggtggagcaggtctggcgaagccacttggaacagttgcaccagtttcatgtccaaaatggacggtggcctggatgtcgtgaaggggcattggggcgttggtgtacggttcaaagacggaattatcgaagaggaagcttgtcggatcaaaaaatcgtccaattggaacaaataggatttatacccttgaaaggagacgaataatacagatgaagtgagaaatattctcatttcatacggaacaatagaattacaatagatgtagactatgattttagattaaaagtggcaaagaacgggtggcaagatgttcgtgtcgttaccgctacgaacgaggacttgcaattggccatcaaggaagggcaattcagagaagacctttatcacctcctttgctagttcaagatacgccagcctttgttagcagaatgtccggaagatatcatccctttggccgagtttttccgcgaacgccactcgaaagaactgaaaagggaaacacaaggctttacagacgatgccaagcgcaggatgcttgcctacccgtggccgggcaatgtgcgtgaactgcaaaacaagatcaagcgttccgtacttgtttccgaagaaccgatactggatatcgaagggttagataatggaattccgccgtgcgataatgggcaggcatccgtaccggcagtcctgccgttgaaggatgaatcgttggagaagaagaacattgtcaacgcccttaaagcctgcaacgggcacagggagcaagccgccgcaatgctgaatgtcaatccggcgacgctgtaccggaagatgaaaaaatacggatgcggtagaaatagaaggcactataaaatattttgtgtaaatggaaacgatgaggtgttaagcaaggagttccttagccagttcaagacagaagcggatgtg

SEQ ID NO: 420 - DNA, 6366 bp, unidentified
  source 1..6366: mol_type = unassigned DNA
ttttatttactgccagagccgcttaggctgggctaatttttaacgaactattgttcaggtaaatacttgttatatgtaggaggacgttttacttataaaaattttctcttgtttattaaaagctttgctgaaatatcacagtattatttagacttaaaagtcgtatttaccggtgagccttttactaaaaaagagatgaagcttattaagtcattgaatatttatgatagggtcatacatttatttgttaatgactcccaaatgtgtaatttatatcaacatgccacagctttcatatatccttctttatatgaaggatttggtttgcctatcttagaagcatttacgaatgaatgtcctgtattgctgaataaaaaaagttgttttcctgaaatagcaggagaggctgcattatatttttgtttggatgattttgaaaatactctttctccgattttaatggattttttgaaacatgaggagaaatacagtggtatgttgagaaagagagggagagagcgattaaaatatttttcttggaaagattcggcgaatcgtttatctgctatttatgagtctgtcctataattaaataacatagaaaatcaatatgaaaaatattggaataagtattataactgttgtatataataacattcgcggaatagaaagaacaattcaatcagtattaaatcaaagttataataacattgaatatataattatagatggcggtagtacagatggtacattggatgttataaaaagatatgaaaataggatatcgtattggataagcgaagcagatgaaggaatttataatgcaatgaataaaggtattttgaaggctcatggctcttttttgaattttatgaattctggtgatacttttgttacatctactacaattgaaaggcttattgaaagatatgaaaagggagataaaataatttatggtaatattttaaaatgttatgatagaagaaaagaaagaacatctggaatagtatcatctcatcctgatattattgatttctataagaatatgataaaccatcaggcagcgtttatatcaagggaactctttgaaaaatatggattatatgatgaaaaatataaattggcatctgattggttttttttcttaaaagttgtaggaattaatcaagaaaaagttagatattgtaacatagacgtcgcaaattttatgatggatggcattagctctatgatgccactaaaatacatggaagaacaaagagaaataaggaaagctttatttaaaggttacgatgtccttttttgtgaattagcagaatatagacaatctagcataatacgttttttagttaaaataaggatgtatttaggaagtcgaaatgtaggtgataaaattcgttttgtgagatctatttttgaaggaagatgaaaccattggttagtattattactgttgttttcaatgataaaaatattattaaaacaatagagtcaatcattccatttttaaatgataaagtggaagctgttattgttgatggtaattctacggatggaacacgtgaattgatacaaaaatatgcagatagaataaaaatattaagtgaaactgataaaggtatatatgatgctataaataagggtgtatccttggcatcaggaacgtatatattacatataaattcaggagattatttattggatattcccattgaaactttgttgaaatggcaaaataactctgatgtagttgctttatcttttcctgtattgatgaatggtaaggatgtattctatccttcttggaattggaggatgagatttaaaaatacgcttcaccatcaaggaacattttatcgtcggaatattgatttttatgatatctcatatcgagtgtttgcagatgcagatcttaataaaaaattatataagagtaaatctatagttaagatatacactatgccttgtgttgctaatcatttgtggaatggaatttcaacagttactaataatagaaaagaatggtatcaggttataatgaaacattatggatggttttatttgttgatacatttcgggtacagattaatagaaattcttttgaggaaggaaaataaaatgtaatgggcggtatattcatatttctgtgtgtttgaataaatagagttatagtaataatactatggttgaaaaattatatttatttacgctagttgttaattgctgattaaatgaaaaacttatatctatttgatatttgcggaactatttatcgttctaatacgacatttgattttttggagttttacttgaaagaaaataaacgttttagactttatagggctatctataaatctttcttttggaagattattaatcgagctttaaggagttggttgcattatgatttgacaagaattttggcccttagatttttgaaaggaacttcttatagtgaacttagtaaacaagcaaagttatttactgaagtctatctttctcaagtgcgtaatattgaaatttataatacgattgaacatcttatatcaatagataaatcgaaagtgctactagtatctgctactattgatgtagtagcagaagctgttgccgattcattgcattgtgaacaatattatagtactgcattggaatataaagacggtgcttgtactggcaaaatggtgaaagatttattaggaaacaaatgcatgtttctaaatgaaaaaggaattttacaccagataaaaagtttttttacggatgacttgactgatgccgatgtattggaatattctgagataaagaatattgtctgttatcctaaaactcgaaaacgatggataaagttaatagcgcaaaagaaatgggaagtatctatgctggagtactgatgttttatgtacctgtattgtatgctataagaacacgtttcttaaaaaggacaaaactgggaatttttttttggcttgctgaatatctgtttcccgtattattgtcattcttgttggcaaatattgaaccgatatctatttctcaaatgcttttgtcagttgcctgtgtatattgtttttatgaaatcgggtatattcaaaatgattgtgaaacaataaaaaaagaggagagtccaactttgcggttatctgaagatgaattgaaaatatatgagcgaaataagtggaatatatatatgacaagaggcgtattaggtattcttttttcaatgtattatattcagcaaggcattcctagttgcactttattacctgtattgtgggggatcattccattatatcttttatataatagtatgagaaacagacttaatcagtatttggttctttttttaatgatctatagatatggtgttccttttctcttatatactcattttagttggaactgttatttattacttttgataattatatcttatcctattccgacttttattcaaatatgtgctaaagagaaacgagggagatgtgaaaaatgggctttattctttgttgggagttataataagagagagctctttagattaaagttttatttgcttttaatagttggggtaggtgtattggcttttttgaatcaggtacatttatattatgtaatcttaccgatatatttctttctgtttagaattggttcttattcaatgagaaaaatattataatactatgtgaatattacatctcgcgcttagcgtgtatcggctagtgcaggaggtctttgttgcttatttataattgcatataatacaatgataacagtttctatcgtcacctacaagacgaatctaggagaactgtccaaatgcttgcagtcactaatctcttctcttgtttcccaaatttatattgtcgataattccaacgagcggtatattgcagatttctgtcagcaataccccaatgtgatatatattggcagtgaaaatgtaggctatggagcagggcataaccaggcattgagacaggtactcaactcgggtgggaaataccatttgattcttaattcggatgtatattttgaaccttcggttttggaatttctggcagcatatatggatgcacatgcggatgtagcacaggtacagcccaatgtagtataccctgatggagagcagcaatatacctgccgtcttcttcccacacctgccaatctgattttccgacgtttcctacctaagagaatggtggagaagatgaatatacgttatcaactaaaattcgatgaccataagaaagaaatgaatgtgccctatcatcaaggtagttttatgttttttcgtctggaatgtttcaaaaaagtaggattgtttgatgaaaggttcttcatgtatcctgaagatattgatataactaggagaatgcacaaatggtatcgaactatgtttgttcctagtgtgaccattgtacatgctcatcgggcagcatcttataaaagtaagaaaatgttgaagattcatatggttaatatgattaagtatttcaataagtggggatggatagttgataaagaacgttctgcttggaacagaaagttattggaagaattaggatataaaaaataatattttctataatgaattactttattacaggtggtaccggtttcatcggtacccacctctccagtcttttgcacgaagtgcatcccgaaacaagaatttacaacttggatattgtagagccgggtactccattaccgacagtaaaaaattataaaccggctttaggaaaaggggaggaacatgcagccacattcatctattgtgatgtacgccagccgatagagttggaaaaagtaaatatcactcccgatgatgtgatctttaacttcgctgccgttcatcgcactcccggtcatcccgatcctgcatattttgaaacaaatatccgtggtgcggagaacgtctgtgcctttgccgaacggcatggcatccggaaaatagttttcaccagttccatagccccttacggtgctgccgaggaactgaaggaggaaaccacgctgcctatgcccaacaccccatacggcatatccaagctggttgcggaaaagattcatcagacctggcaggcaggaggtgaaggccgccagcttaccattgtccgtcccggtgtggtgttcggacggggagagaacggaaactttacgcgtctgtattggggtattcgggggcataagtttatgtacccgggacgcaaggataccatcaaggcctgtatctatgtgaaggaactggtgcggttcatgctttacagattggaacatcacgacagtggggtggaactgtataattgctgctacgagcccgcctatacgatagagcacatcgtggaatccatgaaaagagtgacaaatatgaaggtaaaagttcctttcatgccgggatggctgatcatgactgctgctggtatagccggagcgctaggctctccgatgggcatctgtccggcacgggtgagaaagctgcagatctctacgaatatctgcggaaaaaaactgtccgcttcgggctaccgtttccgctacacctttgaagaggcgctggcggactggtacaaggataatggtaacctgtatctgcaatgaggaggctgatactttttcttttgttttttgtaatgatcggtgcggtacacgcccagttcacctacgggactacaggactgttgaatatgcctactgccgatatgcagcgtgacaagacgttcatgtttggcggtggctttctggagaaacatgtcactcccgcccgttggacctacaatactttcaactattatcttgacatcactatttttccctggctggaggtatcctatatttgtacattgcacaaggccatggaggttgatcctgcatatggtccgggtttctgggttccttccacgtatgggaagtttgtcaaccaggaccgtaattttgcggtacgtttacggctgtggaaggaaggatggtggaaaccgtggactccgcaaatcgtactgggtgcgaatgacgctcttaataattcatggacggagggtagcaagattgagatgagttcggctacggcaaatggtttttacagtcgctattatctggttgttaccaagcatctttctatgaaggaggtgggagagtggggcttgcatctggcatatgtttataacaggcggaaggattacccgttaaatggtcccgccatcggtgctaatttccgtttttctctgcctcaaacttcttttatcaacaaagcggtaaataacttgaatctgatggcagaatacgatagtaaatcgataaattgtggctttgagtacagcttctggaaagactacatcaacgccgtagtagaactgaaccgttgca

SEQ ID NO: 421 - DNA, 31630 bp, unidentified
  source 1..31630: mol_type = unassigned DNA
agatcttcaccagggccgtatcatcggatgccacacaaaatgaggtacgcgcagcatccgctatatcaggatacatctcctgccctggctggccgcaagcacaacttaaaacaaggataagagataaatatgataatttcatttttatacgatcattatgttattacaaaaaaagcgcatcagaatatcctcggatagtcctgacacgctttctccctataattcagaactggttattatttccaaccttcgttttgggtgatacgacctgggttcaagtcgatctctgcttgcggaatcggccaccagaaatcttttgccgtataagcatctcgctccgctggaatcaaaacggtatgtttaggcgtcccgctcgaaaagtcgcgatattcgataccttcgatcggcttgttcatcacatccaacaaaatgttccagcgacggatatcggcaaaacgaaggccttcctgcgcaagttccacacgtctttcgttgcgaaccagatcccggagactaccgttataacgttcggctaccatcttgtcaatatcgttcgtattaccagcacggtcacgaatcacttttatcagggacttggcttcgtccgtacttcctccggtttccaccaacgcttccgccctcaacagataagcttccgcataacggaaaattataaacgagttgtaagttgtccatgtttcttcttcctgacaatattttttccaagacaggccggtaggcgtcttgttccattcgccaccgccgccttctgccaagacatcacctacgctgatttccttgtcttgcaaagccccgtaatccttgttaggatcaaaataagttttgccatctttttcaaccacattgttcggaatcgtattaaaatacttgccacgcatttccatacctggagcatagatagtctggtaaaaacggggatctttattcagatatggcatagtttcatttctctcgcccacatattcaaacgcatcagctaatgccttcaccggagttgtcacgcaataaccaccgatagactgattataccaattaccccaactgttcgtcgcatccaatgaatagcgtcttaccaggatcacttcatccaggtcttcacaaccagttacaaacaacttgtcaaaatcggccagctgcggagcggatgcaaccaattgggccgtttcatccaacgtaatctggaaataagatttatcattcagataaccggccgcataagcagcagcacgtgcacgaagcaagcgggcagccggttttccgatcttcgatttattgcttggcttatccggtaatccggcaattgccttgtccaggtcatccaggataaaatcgaacacttccttcgggtcctgtacttgcttaacgttttcactttccgctactgtagccggattctcggtataaaacatgatatgtccgaagatagaaaccaaatccagataaaaataggcacgcaatgtacgagcttcacccaaaacctggttccggttagcatcgctttccccgcccggccattggtacttatcaatattgttgattacgttattcgcacgctggacggaaatatatcccttatcccatttgtcagccgggaaagaagaggctgtactcccgatgcctcgccccaagtcatatcctctattccaactatgcgtaaccaaaccattatctgtcacgccatccatccacaaatcataactttcgacgttcagtctctcatacaaggcggtcaacgccttttcatagtcttctgccgacttgaaataaccgtccgccgtaataataccttccggttccagatcaatattactgttacaaccgcctgccatacaaagggtaaaagccaacgccccatacagcaacgatttcttatatattttcataatgctctatttattagtttagattaaaagataatgtttacaccgaagtttacgattttcaacggaggaaaatcattgattctatcactttttccttctgggtccagaccttgatacaaactactgaatgtaagcaggttcgagccagaaacatacaatctcagctttgtgattctcagcttgtccctgatatcctttgagaaggtatagcccaactgggcgtttttcagacgtagataatttgtctttttcaggaagaacgagttgtaggtagatgcattccggttattggctgcttccaaacgaggcatttcggcatttccattctggttctcttccgtccatctgtcgcggaaatgtacaccggtgaaggcctcatagcttggtccttcgatccattccccatacatcatacgattcgcgccgcttgatccctggaacagcaaactcaaatcgaaacctttatattcgccgctgatattccatccatatgtgaacttagggatattggaggcaaagatctgacggtcgtccgggtcgatcgttccatcgttattcgtatcgaccagtttcacatcgccggcatgaagatcagacataccacgcgggtccgatttatatttggcacggtattcttccaattcctgttcgttcgcgatcaaaccgtctgcctgatagatgtagaaagcattcaaaggcgaaccgatcgtttgaatattataaccgctgatattcttgtcatcaccaccgcggtcgatccattcgttcttgttataagccaagttgaaagaagtgttgaatgtaaactctccgaatgttttacggaaaccgaccatagcttctacacctgagttacgaaccactccggcattttgttcaggagcatccagaccaatgaaatgagggatacccagtgctaacaaaatatctttcgtatcttttgagtaccagtccaattcaccatagatcgtgttatttaggaaaccaaagtccaaaccgatattagtctgttccactgtttcccaagtcacatccggattcgccatcttcttctggtaaacagcagaaacaaggctaccgttcatgaccacattcgaggtgttatactgaggcagatacatgaaggcatcgatacgctcgttaccggtctgcccccaggaggctctcagtttcagattatccacaaatcccagatttttcataaacccttcttccgaaatacgccatgcagcagagaaagacgggaaaacaccccacttatggcctttagcaaaacgggaagaaccatcggtacggatattcgcttcaaataaatacttatccttaaatccgtagtttacacgtccgaagaaagagttgataccccacttggtcggatatccttccgcaaactgactaccggccgaacctaaagaaacgtccggtaaagcatcagagatcaaatctttacgctgagccattgaataatagttgcggtaagagatttgctccataccgtagagcaacgccaaatcatggtcgtcgccgaaacgctttttgtaattggccaggaaacgaagtgtcatctggtaactgttgttacgtgaatcttttacactattcggattattacgttgtgtaaccagttcaccagtttcgttgtaatatttataattcttataatggatctttcttctgtcccatgaaccgttcaaagaagccatacccgtaaacaccaaatccttgatcggttcgaaatcggcttttacctgtccataaaccacatccatattataacggtcttcccctacgacatccaaatccataagagagatggcatttctattctgtttatccaaacggtaatcgccattttcatatctgaccggcgatgtgggctgcatgctccatacatcatactgcacgctacctaaagattccggccataggcggtcaacgtgacgatatgttacgtcactactcaccttcaacattttgccaatgttcaaatctgtatttacacgataactataacgctgatattccgtatttttaaccaaaccaggctgatctagatagtcaaacgaaaccaaataacgtccgacttcactaccacccgtcaggtttaatgtatgctgtgtgatataagtaggtttatacacctcattcgcccagttcagataagaatggttatacggatcatcgcctctttccgttgccagaatatcatcttccgaatatttgatcgaaccaccggaattgactaatgcttcattaaccatcgtcatatattcgcgtgcggaaacctgctcggctctcaccgcccggtcctggaaaccgattgtaccatcgtacgataatttcactttaccttccttaccacgtttggtcgttactagaattacaccgtgagcagcacgtgaaccgtagatagaagcagatgcggcatctttcaaaacagaaatattctcgatttcggaagaaggaatctgacttaaagacatttcgataccgtccaccaataccagcggtttggcattgccagtcgtaccgacaccacgcaagtagatttcaggatcgtcactacctggagcaccaccacggtcaactactgtgataccgggactcaaaccctgcaaagcttttgtagcatttaccactgtcattttattgatttcatcaccttccagctttgtaacggcaccagtagtcgtcactttacgctgaacaccgtaaccgacaacaacaacttcgctcaatgcttgggtatcttcaaccaactggatagccaatgtcgactggttacctacctttacttcctgcgtattataaccgatataggatacctgtacaaccgcacccggagcgacttccagtgtaaacttgccatcgatatcggtgataataccgtttgtagttcctttttcaatcacattggcgccaataataggttcacccagatcgtccgtaacgacacccgtaatcgttttcttctgctgagcaataaccggagcagatgtttcctttgccttataactcgacaggacaatataagaacctttttgggaataattcagtcctaactgggtagagaggttatccaaaacttccttgatggacttaccgaccatattaacggatatccttttatttacatttacaccggcatcataaatgaaaagataatccgtctgcttttcaatagtattcaaataatctttcagtgaaagattatcaccctgcagggtgatcttttgcgatatcgcattctctgcatgcaagcagaaaatggctgcaaataataacatataggttattctcataatcctaaataaatgtttatgtcgtgattttaataagagacaaaaccccgacaaaggtattttattcataactttgtgatatttaaagattaatacttgtgttagacatgtgttagttgtaaggcggtgaatctcgcacattcatcgcctttttacattgtttttcgtgttccacttcattccataggcattttcgtttttaatttaaggttacacatttactttaaattcttatcttattgacagattgatttgaaagacaaacgcttatagaagttttaaaaagtttcgggtaacgatttggagattgtgctaatttcaatattttacagcctcatactcatgagtataactcttctttgaacaaaggtaagaatattttttggattaaagaaaaatcccgaagggaaaaataaaaaatatttgggagaaaggattggaaaaattcaagagagggaggttgagggattaagtgagggaaatcgcataatcgatttgtagttaccgaaaaaggcatattcgaaatccctgtatattgcttctaccggcgattacacgaccggaaattatattaaaaaatgaccccaatcaagaagtattttatgtttctcggttggggtataaaggttatttgaattgtagccatacctcatatattcaagccgcctttctttaaaggaatatgtagtaaagatttcatttccatgtctgcgaaacttggtaacaacatcttttaaaggtgtcaggaattgctggcagttatgtacatatccgaattctgattttatgcgtgtttactcataaaattagactctatatctgcttgcacaggttatcactatactatttcctgtaaataacatttgggaatataattggtggcgaccaatatcagcaagccttcaaaaggaataaccagccgcttgttctttttgatacgtctgtaatatcccactactccggcatattccccacctgtcacccggtatttttcggcgttcttcacgagattgtcatcatacggtatctgttcgaaaccgtcctccatggaagaagtgagcatgatgaacatgtccatctcttcatccggaatggaagctggaatctgggtaccgggacgatgatacaccatggctttctcatcgagaatcgaattcaaggaagagatatagtcatcatcgcaacgcaggaacatcaacatggcgacaagaggaacccgcctgatcacgacttccccatcaggttgcggatagcttctggttttcatcgggatataactctcaatcccgtcacgtgacaatgtggccttgatttccgaaaaacggttatagaaaaccttcagggcataccattttttcatcatgacctattgattcctttttttatgatttccagttccaatcgaacctttcgacatcctcctccacgagcagatctcctgactgtacctcaataaagagcagatcggtcatggccttgacggcatgtctcatgcccttcctgatacagacggtgtctccacggccgattctagtcattttcccatcaagagccagcataccctcgccatcaatgaatgtccagacttcatcgcgatagcggtgagcctgatagcttatgctcttaccggcttttatctttaactgcctggtaagggtctcatatccgtcaggaaaactcaccgtatcgataaccttatattctccccagcgacgctcctcgtacatcgggcggcattgcaagcggtccgcatatgtcttgatgtgctcgctcctgcctttctctgaaaccaggatgccatcgcatgaagcggctattaccatgtctttggcaccgatgcacatgacaggtatttccaattcgttgatcacatgggtgttttcagatttctcgtccatcaccacgttaccgatgcaacgctctttcagttcatcggtaagcgcgttccatgtgccgagatctttccattccccgtcgtatggaacgacagccacagacttcgctttctccaccacctcgtagtcaaagctgatctttggcagttcctcatatcggaggcgtacctcctcaaaagtatcgtatgcgagatagctctttacgatgtcaatcatatatccgagacagaaagcgaatacgccgccgttccaaaatgcgccatctgcgataaatctttcagctgtggcgacatccggcttttccataaaacgctccacttcatatattccgtctgttttgcgatgcttttgaggtatcacataaccgtatttggcggacggataggtgggctttatgcccatcagtacaagatcagccacattattctgcactgcttccgccatttccgctatagtttgaaaatagcgctcttccgtatacgggtcgcatggcataacaatgactgtttcattcttgtcgcatttcgctgttttctccaaataggcggaagcgagacagattgcggggaaggtgtccctacggctaggttcggtgacgacagtcacatcctcaccgagctgattggtgatggcatccttttgggatacacttgtagcgattgtaaccgggcaggaaagtcccgattccttgatttgtcgtatgacacgctgtaccatagattccctgcctccgttcggggaaggaagcagtctgaggaattgtttggagcgggattcgtttgaaagcggccacagccttttacctgaaccgccggataagagtatgatttgcatgattatgttgtgaaagttatctttccgccctcatcgggttgtttaagaaatcctcgtaggaaagacggatgccttcctccagttctgtcttgtatgtccatccgagcgaagtcgctttcgaaacgtcaagcagcttgcggggggtaccgttcggccgtgaggtgtcccagcgtatcccgccggtgtagccgattatctttgccactaattctgtcagtgcctttatggtcagttcttttcctgtcccggcattgaccgtttcgttgccactgtagttgttcatcaggaacacgcacaggttggcaaggtcgtccacatagaggaattccctcaacgggctaccgtcaccccagcaggtcacctctttcaagcccgcttccttcgcctcatgaaagcgacggataagcgccggtaacacgtggctgtgctcggggtggtagttgtcattcggcccatagagattggtgggcatcacgctgatatagtccgtgccgtactggtggttgagaaactcgcagtatttcaatccagagatttttgccaatgcgtatgcctcgttggtcttttccagttcggaggttagcaggcagctttcaggcatcggctggggtgccatacgcgggtatatgcacgatgaaccgagaaactccagcttcctgcaaccattgcgccatgccgagtggatgacattcatctccagtatcatgttctcgtacatgaagtccgccaatgccgattggttggcgatgataccgcccacctttgctgcggcgaggaatacatattcgggcttttcttcggcgaagaagcgttccacggcttcctggcgagtcaagtccaattctttgtgcgtgcgtgtgatgatattcgtatatccctggcgttgcagttcccgtacaatggcagagcctaccattccacggtgtcctgccacatagatttttgcgttcttctccattgttttctcgattattttacgattcctttttcgagatattcggcaaggttggttcttacctgttgcgatgcacgttcaacggccacttttgccatatcggcatccaccatgatttttacaagttgctcaaacgatgtcttctgcggattccaatccagttcacgtttcgctttcgacgggtctcccaaaagatttaccacatcggttgggcggtagaagtcgggagaaacctcgacaagtactttaccgctcttgcagtcgatgcctttttcgttttcaccttcaccctcgaaacgcagttcgattccggcatatcggaaagccaattggcagaactcacgtaccgaatgctgctcgccagtggcaatgacaaaatcttccggcttgtcgttttggaggatcagccacatgcactccacgtaatccttggcatagccccagtcacggagcgatgacaagttacctaaatacaatttatcctgcttgccttgggcaatacgtgcagcggcaagggttatcttgcgggtaacgaacgtttctccgcggcgttccgactcgtggttgaacagaatacctgaacagcagaacatgttgtacgcttcgcggtattctttagtaatccagaacccatactgtttcgctacggcatagggagaatagggatggaaaggagtattctcattctggggtacttcttctaccttgccgtatagctctgacgtggaagcctgatagatacggcaggtatcagtcagatcacattggcgcacagcttccaaaatgcgtagtacgccggtggcatcgacatcagcggtaaactctggggagtcaaacgacacctgtacatgactttgtgcggcgaggttgtatatttcgtttggctttacttttttcaccacctgtaagatgctcatcgagtcgcccaagtcagcatagtggaggtggaagttaggatgcccttccaaatgtgcaatacgctcacgatagtctaccgatgaacgacgtatagtaccatgcacgtcatatcctttttctaaaagcaattcagcaagatatgatccatcctgtccggtgataccggtaattaaagctgtcttcatataaatatcaaatttgtgatgtattatttcgtgaaactttagtttcgatgatctcatatattttgtaaatgtatctcaacgattcaagcaaaacattactgtaaattccattatccttgaatgcccgttggtgatctcgcaaaatttgtttatggctggacaatccactggtcgatgctcctcctgtacgcattgttacaaaatccattgggatgtatcggagtcgtattttatggacgaatattaatcgtaacagacattcaaaatcagcagcaattttgtatgacaaattgaagccgccgtatctctcatatatttctttgtggcaataaaaactcggatgggcgggcataaagccgagacgcatccaacggcgatgaaaaagtttcgaagagtaataacgggtacatttttgcaagtcattgtcttgtacataatgtatatcgccataaacagcatctatgttaccgtcttcaaatgcagatgccactgttgaaagcacaatatcgctggtataaaaatcatcgctattaagtattcctatgatatcgcctgtcgccattgcgatacctttattcatggcatcatatattcctttgtcttttccgctgatataacgtaatttaccttgatattcaggctctaattcatgtacgatttccattgtgctatctgttgaaccaccatccacgataatatgctctatatttggataggattgtgacaacacactccgcatcgtgtaacgcaaagttgcactgctattccatgtagcagtgattattgatattttcatcagattaaattaaattgattttgggtaaagagtttgattacgattcaaacattacccgttctgcgactttaaccgcaggattcccacgatatatcgaatatggcattaagtctttagaggctatggaaccgacagtaagaacactatgtgaatgcattgttactccgggacaaacagtggattgagcaccaacccatgcaccattttcaataacaataggttttaccatgaggtcaaatgtcgggcgtttataatcatggttaccacataataacatagctccctggctgatacagacattcgaaccaatcgcaacatgggtaagattgtctatccatacattttcaccaatccaagaatagtctcctattgacagattccacggatatttaatattgactgaaggttttattacaactccctttcccattcgggctccaaaaagacgaagcagccgtatcctaaggcttgaagaaggattccaactgcaatttataaaaaaaacatttacgaaataccagataatcgctttcatctttccagcacctatgtagaaccatgaattatcatatttcgacagatttacgctagtcataaacaaaatcgggtttagaacgttcacctaatagccattcatacagttgttgcatttgcattgctatcataggcgcagtatatttcttctgcacaagctgttgccccctttcccccatggcgagtagttccgggatagacatctccatcacttgtcgcattacttgggcaatgttttcgggagtacggtcaatccaccatccacagccgatggtgttcaattcttcccacggagtaccaagactagccatcacaggagtacctaccgacaaggcctcggttacaatcataccgaaattctcgaagtcgctcggcacgaaaagacatgataattgtgccaattgttcatacttatccctaccgttaataaagccgcagaatttaacacaatcttctaatccaagccgtttcgtttcgctacgcagaaattgttcgtaaatttcatctcctttgcccataatcactaattcataatcttgtaaacgaggtagcaaggctaccccataaagaaggttttcaactttctttatggggtgtagtcgtccgaggaagccaaacttcctcaatcgactacaccccagaaaggacggctttttagtcgcaatctcgtttagataaccaggcaaattggccgggttagggataacagctatggcaccacggtatccaaattggcgtacatactccatttcaggcttgcaagtaacatgcaaacaatcagcatgattgatgtccttacgaaaacaaaactgtatcaacggccatttcttccagtaagagcgttttaacgcttccggataaagcattccatgcggcgtgataatataaggtttacgtttatgccttgcaacggaacaagtgatgtggttgcaatacatccataacccattggtgtgataaaggtcatactcattgttttgtagataggaagagatgttctttgaatactcgtacggagttatagcatcatttggtaatgctttaatccaattttcacccttacccatcaatacatccgatttgtttttcacttccaaagtcaacaaatcaataggaaaaccgatattatacatcgccaaaattaagtcatacgtgcaagtggctattccgccatacaatgcaccaaacccagcgatggtttgtaatactttcatataaattgtatgctttaagtttttgaacaaggcccttctacaaaaggagtatctttccctttttccagacagtttattaggatcagcagcctttcggctgcgatatggggattccatagttcctgcatcaaggcggtagaacggctttggatatcttgccatttacgtggattggcaagcaggtactccactttgtcgcataaggaatccaacgctgcaatatcggggcggttgaaactacttgattgcttgggactggtaaataacaatcccgtctgcccatcattgatcaaatatggagaacttcctattccatcgcttgccaccaacacacaaccattggacatgctttcattggccacagcaccccaaccctcgttgcggtcgctggtgaagaggaatatgctgtggcagcgcatcttgaccatcagttcgttgttgggcatgttaccgtaaaaacgaactacatcagtcacacctagattcttcgctagctgtttcgtacgactttcatactccccgctgccgtacatatcgagccggaatcgataccctttccgtttcaaccgttcagccataaggatgggtagttccggatgtttcaacatcaaatatcttgaacaccacataagtggtgtgatatttaatgtggaaacatccgagaatgcttcaacatcaactttttccacccgggtgaaatagccccatttgtagcaacgtccctgataagtacccactttgtactggtctgccgccgcaaatgcactacaacaaagtttatacaacggctttctactccaacctccgaaatgataggcgaggaacattttcaagatagcaggtgaaaataagttcaaaactccccgtttcagccatcgctcgctcatatcgaatgacagcagccctcgcttcattcgtatcttttggaaaggcaaagcctgtactcctgagaacacacaacattctgccgtctgtgccaactccattgctttactgtaattctttttcgattgccaagcccgcaacaaataaggccgatcgctataatcatacgagtctcctttccgatgctcggcttgcagattggcaagttccacaaagtaatagttatgtccagtcaaattccacaattcatcagccacatttgcctgatggttgtttagtataagcgagtaaaaaacaagtttcatttgattcgtaaatgctttattcctctatttttgccattgcttgattccatacttcgacaccaaacaatcgttccacaacattcccttgattagcataacgtaacaattcttcatcagataagtctgctatagctcttattccgttatggaactcctctttggtaggtttaaccgtaaaatatttcattccttcaatttgtggataatgaatggtagatatgattatacgattgtgaaacaaggcttctattatcttagaaggaaagttacattgattttccggaaaattaatatctcgtgtacttaattgaaaggtgatatggtgtaaaagttccatgtaaacgttgaaaggcaattgaccgtgccaatggatattgctatgattgttagcgtattgctgcaacattaactcatttcctttgataccggtgatatgtaattcgtattcagatagtttggaaaaaacatcaagcaccatagaaagcattgatatttcctcagaaaggacaccggagagtaaaaaggttttctttatagatttaatttccggtctcgtcttgctgctatatggaacaacacctgggagaactaacgaattttcctttttgaataattcagaattggctaaacaaatacggccatgtgcccaatttataagtttcaagtaaatctgattcaatccgaaacctcgatttacgggtgtaaagtctaatactatcacatttaattgtacggatggtttcaatagcttcaacatcacaaacaataaggcattaagtgtatttaggttgtagaaccatactgatgcatccttgggtatttgctggaacatagtgaactgttctttgaatgttgccagtttttgcttgaattttcccgccttgcgccacctatcataaatcaattcaaagcgtttatcgctaaacgcttcttttgacatctcaccgcctacataaagtggcatactactataaactttgtcaaaagcacaaccactcatcaagttataggagaagttacaggcagcaaatgacaatctgtattgagcaattaagtgttcaggcagtatgcaagtccaaaatatccgatatttcttcataaaatcttaatccttaccagtcggttaatgccatctttaagatatttcagtaaaataagtacaatgacaagaatggcatatttcaacaatggatttaatgtaaataaataattgatacacataaccgtgacttgggagaatgcgaccaccacgtatgtttccctccccactttggtaaatatattagaaaacatagttgacgcatttcttatccaaaccgacaagcgaaataccatcagcgtaccggtaacagctcctaatgtcaatggaattatcggggttattaaattccacgctaaatcaagtttccacaaatagctaattaccgcagtgacggatagcaagcaataaaaatcccaataaaacgaaaggggtgtttcaattcgttttttgtaatctgctaattctttacctaacattacaaggaaagaagcataaggaagaaccgacaaactccatggtaaggatatttcataatgccgcaaactatatccaatataaaggaagcataacataataaagcgtcggacatattttctctttatcaagaaagttattcgtaccaaaacagatgacataaataaaatagggataaaccataatgcataccccccccaaccacattttatatagtgtatgacatccaattccccgataaaatacattaaaaatgcaacaatagtagagtaacacacaaatggaagtaaaagcgtatatgacttatgctttatatagtccacgaggctatacttttcatagttactcaccaatcccgaagagataaagaacaagggcatgtggaaagcatatatgaaatgtgacattacactgggaatcggtgtatgccccgctaccatcaagataatagctatacctttagctatgtcaagccagcgatttctattctgactcattaccaatcgaaagttttttcacttgcagatatgcctgcattactattgtaaacgacatcaacggatatagcagttgcgtaccatcatacggcctctgcaaaaaaccaaatatcaatatccaaaatgtccacccgtatttcttgtcataccgtcttaaacccaacaggaaaaagaatggactccaatagaccagttgtcctaaaaccccatcgcaggccaagattaaatttggatttgcccccacaaacactctatgtttttgcgatatacttatcaagttccgtgcaccatgccccacaactggtgcttccttaaataattcccagcacacctttgtcatctgttgtcggttgtcaccggctatcgttcctttcttctcgtcatactcgaagcgaccaaatatggcccgattcatccgttcattgaaggaagaaatcataatcaaggcaaccacaaaagccacaatgtatagtactaacttactgaatctgtttcgatagaaaaagaatgcatatattgctatctggatgaagtaggccaaagaaagcgtagaaataagtccggatataagtagcatctctactcttttattattaacaaaaagcttattgattatcaaagcatacattccccaaaacgccaatgcacctggttcatcatagaaaccggcattacgaacaagaccgtcaaaataagtattagttgtgaataggccaaagaagtatcccggtctcatatccaattcacggaacacaaaaataggctgaagaatgccaataagaactaaaatgaatcctatgctacctgctattacttgaaaaacaagccataaattatatgtcttcacaaaacctaaacgttcatcggataattgcatctcaaggaacatatatgtgatacacaacatcagtattcgagtgaaataggacgtatcaagcccatgaatgatagaatagataccccaagctgttatttgtaatactaataacgatactataggagacggtagcctaaattcattctttgttacaataaaaaatgctactaatacaaataatagcagatagtttatcgtatagtgaggcaaccatcccattaaaaaaaatacgcaaggccagccagctattaaagcgaagaaatacaggaaatacctaagatttagatatgcttttattttttcaaacatattttcaacgttgcattatatcgtaataaatttctgcaagtctattggcatttttcttacagtcatgccgttcttgagctatttccatttctgcagccgaaagtctggtataatctcccttttcaaacattcgcatcacaatttgcgccaacatttcatactcctcataccgataaaaatatccggtctctccttctgtcaacaatgtcggtgtacctccgcagtagcttgcaactacaggtgttcccagcatttgtgcttcgcacagcgagttgggcgaattttctatagcactcggcatcacataaacatttgcatcaaggaattgctgtttcatctgtttttctgataaagaaccaaggaaatgaacattatcctgcaagcacaatttttttactagtcggcgtagatataaatgataaccttggaaacgaagaatatctttcactgcactactcattacactactaccacagaaattaactacagtgtcaggatattgtctcaagataataggcaatgctttcaatacttgatgtgcacctttcaacggagaaccactattgctcacaaaaatcgtgtgttttttacattgtcccaagttccatacaggagcttcataaaaagaatcacgcaaagtttcattcataaaatgatagcgcagccgtgggtttacggtcattacatgatcatgatcccacccagtacgtcctacaatatcagtaatatgtgtgagtacataatgctcgcattcagcacgatgcttgaaacttcgtttcgcattcaacagaaatgttccccggtaaaaatcaagtggggtgatattcatccatttatcccacaatgaaagtctaccatcggcataacgcatatatggccctgccaacccttggatgtttgctacagtttttactctgtcctcattggccatacacacagctttagcaagcgaatgttctgtaccatggatatgtatcagatcgggagcaaaatcccatatagcctcattacaagcctctatctgttttttagttgtcttgtctatctgggcagtaggcacaagatagtaggtcacgccatctatctcataccgttcatatttctttccgtatgaatagacgatgactcccaactgtacctctggcatctccatcagcattgcctttgccgatgaatacatccacccgcaatgtgccggtgcttcttcccccaagtaggagcataatggaggaaatttaaccaaagatacccacaagattttcattctttccatttttaaaaagacttggtcatttatacaaactctctgcatctttgtttcaattcatctgccaatttccgccatgcgctcttgttggacgggtggttggtgaccgtgatgggcaatacggtatcgaaccggggtgacaaaacaccattttcgacactcacaacgttgaacaattcacgcaggccggccaatctgcacttactttcctcaatgtcgcttcctttttccaaataaatgacaggagtttccagtccaaggcatggcaatgcacaatgtatacgagaggttattactagacgagcctttgcatacatcttgacaagtcgctcggcttcagaaagacgttccgcatcggtcttgaaaagcgtcttataacacatactttcttgggttacatatgtggactccatgacgagtttccgaccaaacacttttgaatactctttatagtaaagagccgtttttaatattttgctcacgatgttccttccataatgcagacgtagctgtgttatcccacaaagtttcagcagatcgagaggatgcttaatggctgtacagacagcttgcagaattgcattaaaattaagtgtaccattgaagatagggtccacgatatatgtcttatcctctttctcctcggaatgatatttctcgccaagggtcaaggtcatgcacccggagaaataggcatctactccgtttttcgacaacaggtacaaagtgttcaggtctctgcaacctataggctgatgacttttcaaataagctatgctttgtgacgaaagcaatacttcttttacaccactgttcaagtgaaaggcaacaaatagcggatctatcaagtcggacggaggccaattttgaggtaggtgcatataccatccattcatgatgaccttacagggttctcccgcgtaatctttcaaatcttcgtctcggtcaatgaagccatctatgtgagggaggaattgcgaagaagccaatgcttgcacataatccccgatattcactcccgatatgttgggaaacttagaaaccgctaataacttatatttcatattccaactagttttttaattactctgtcaagtaccttttcatatacatttaatatcttttctccgtaattctcaatggagaagttctctcgggcaaattgccgggcataccggataatttcttgatgatcagtttcggctgctttttgcatcgcagacacacaaccatccatgtcgttaaacagcagtcctgtcttgccgtcaaacacaaaatccttggtaccgccggaattgcggccaatcaccaaacagccataaaacatggcctcaatggaaacacgtcccaagccttcgttttcggaacacatcaagaatgcaattgcccggctcatatattcctttaccttgtcgcttcgtccaagaaattctacagcgtctgatatgccggcgttcgctacgattttggttaattgggacatatattttgagtgggcttctccgataatcttcagtttatatcctttggtagccaaccccgacttcgcaaaggcagagatggcataggcacatcctttctgttctgtcaagaaccctgcacaaaacaggaaatacttctcttttggtctaacaaggcatgtatcatctttactccgaacggcatccgatattacatacgcattcttgctttccaaagaaacataatgttcaagcacggtcttggtgataccaattacagcatcggtttgctttagcgtgtttatatatttgtcccatccccttaatggcatccacccgaagtccaggtccataaagccacgtaaatgccacacaacctttgagttaaggatcttggctatttcatagccaactgacatgacagtattattgatatgtacaatgtctatttttctacctttcaagatttgcgcaacagtttctgcacacttgcggtttttccgatagaatgttaaatggtttggaatatattttagccaatattttatgtgttggtacaatttcacaggtttccctactaagtcttctttaaagtcgcacacaatgcactctacaccattagcggtgaagtaatcatatacacatccttctgtcccaaccatgacaatgggatggacatatcctcggactgattttatcaagtccattagcgaatatgtcgctccatcaaaatttttcgaggcaaatgttacatacaaaacatttatcatctttatcctaatttggtttaaagttctacttttcggatatcagtttccaccacatttccgctatccgttcctgtgagaaccgctgcgtggagatgacggcttgccttgccatccgttgccgcaacatattatcactcatcaattctttcattcggcatacgtaaccgtccacatcactctcattgataatcacaccgttttcaccatcggtaataatttcacgtaatgaggcataggtatcaaaggctatgggcactacgcccatctgttgcgcctcggtcagcgttaatccccacgactcgcttttcgaagtcatcaggaagatagatgcctctttgtagtagggaacaggattttgcctgccttcgagagttacatcggggatatgttcgttacgaatgatatgttcatagagtttgcggtcattaccatggcccacaatgcggagcgtccaatctttggctaccggatcttgtttcacacatgcccaaatccgaagagccagtgacaaccttttggatggttcatctaagcgtgaaacaatcaatgccactttgcatttagtaagttcgtcaaagcaaggcgtaacgccgaatgacagtccgttggggataactacatatttcgatgtgtcatgcacacctgcaaattctccataaggtttgatgaaaccccgacagagcagcaccacatggtcagcgcactcataagctgcacggtagactgaggaaagttgccgtttcttccgcattgccgtcaaaggatacattattatactttttgtccatcgggcaaagtccatcacagattttggatgatacctgataactttaccaaagcgtccgaacacaagttcccattgtggctcgaaatgatgtgcaaagatgactttacatgttattccttctacggcagcccgaaatctgggtacatgaatgaatgccccctgcacaatgacgcaatcaatacagttcgccacaatgatacttctaagcacttgggcattcttttccaaatccttctgcggaatccattgaaactctttgataaagcattcctctttgggtgtatcggcaggtgcctcatagatggagaagcatctggcaccatacagctttgtcaaagctgtggctacggtgatagtggtgcgttctgtcccacccttagtggaatgcacttttccgtaagtgtgatataaaatgttcatgtgtaaaacttagacgaagtatctgtttttacagagtatattcaacaattccccttggatacaatatctttgctaagtcttttggcagacgacgcagtactccaatatggatagctccaacttttttcttgtcagaattgtagcattctatgcgtgtataaaaaacacgatcgattatttgtatcactgctgcattttcttttttgcaaagtttaataatttcgtaaaatgttgattcttcatcaatttttatattgcgctcgtcatataatgtggacaaatcatctaagttaaacttgatttctaaggcctcttcttcaagagttttgagaatgtaatttggaatcataccttctttaccaggcatttctacattatagaagtttttagtctgaaatacctgcccatctcctgttgaataaaggtttctccatatttgataagaatcgatattttagaagaaacagttttcatctattgatttttacgtttgtcttctaacgcatttttctgctcctctgccagttcgttatcgagtacaatgcgtattcccttactgtcttccaatgactgcttataagtatctatttcatttttgacatcaaccgtatctaaggccgtaatccttcctgcacaaatcttgatacagagtttcaaagtgatattctttatatcaccaccagtcagtccggcggaatattctgctatttcagcatacgagaaattatgtatatctttgggaatttctttggttgaagccaatttcattctttctagaatattggggtttccgaggtgaaatttccaaagttctactaattctttattggttggtaaaggatatttaatgtggtatagtattctcctaaaaaatgctttgtcgaagttcttgaacaagttagttgcgtaaattattgtaacattcgaacgatcaactagtgtcaataaatgcgacttgatttcatttgcagcatttgagttcgaactgttggttgtgcattttcccaagagccatggctattgcttcagctgtgatacttttgcccgttcctggttcaccataaagatttattcctatagaagaattgcccttcaagaaattatttaatccccattcctcaataagcctatccttgtttttgcagaaagtaataacatcaagcaccgtctcacgtaccttttcgttaaggattatttgctcaagtctccatttagggtcatcttctatgaactttttcaattccaatttttgttcttcctcgttgctactaaacaaagaagactttggcttatcgttttcaggattctctctcccgtatttctttttatacttgtaaatgtcggcatagcgctatattttttatcttctttctttacactatgtaaagtattgatgttttttactttatgcaaaaatattgcactttagatattcttttccaattccttcaataaacagtattttgcttctctaagtctgaaagggcaggcattaattaaaggatataaatcaatcgtggcaggcttccagtttgatgctttgagatttataagttctataggtaactcgtcattcgcaataaccaatggcgtttctccgtagcgttgaacagacaagaaaaaatcgtgaaacttgaaatgtccccctatcagtggtttcccgaattcaatccaaacattgggtacatgataagcttcagctacgataagaccatgtagcgaggaagacaagatgattccacattcacagatttggtcaatgatatcatgccaatgcttatattgcccaagataaataatttgtacatcctcacattcacttaatggtttcccattaaaaagtaaggtttccacaaccgtctgattaaccacatgggatataataccatacttataaagtttctgtttagatggctgataatagagaggtacaagcatggctgggtctccatatatttcagggcaatctactccttcggcaagcagttttgctcgggaaagtggtccacggactgcatagactttcttgggctttatttttaaaggtttacttccatcaataataccagctccccatacttcggtgttttgtgtacataacatatcaatggttgagccgattaccaaatagttccgtagtttcagtctgaacgctaaggaggtacggttaaagagtacaaccggagactttattatctcacggaggaaataataattaatatcatcaccccagttttcatgcttgatgcgtttgttattttggtaaaatacaaatgcattaattataacgggatgtaagaatagtttaatatgctctattatgattattgcgagtttaatcatgagacctatatcttaaagtatttattttagtatatattaggtttctttcggaggtgtttaatcctacaaataaaatagaaattgcagtcataactattgataaaataattacaattactgtttttaataaactctgattagtcattgtataataaatacttattgacatacaagaagcgagtgtaaaaacagaaatagttggtaatagtactttatgcgcatattgtacgagtgaaaaagaaaccatccgaccgacaatcattattctacaaataagggctaccatagaaataattaagtggacaatgaagaccatttctggattgccgcccaatttaagagctatataagctatcggaagtataagcaacaaaagccctcccacgacactttggtaaacttttacttgaccaactgcctgcgaggagatcatcaaaggattggataaagcatctataagcaagatgcataatattatacgaacaaaccagaccgtatgagccggaacattcttcaaccacacagccagaatcgtctgtgtttcaatcataattggtagcactataagcaacaacaggaaaaaggaatacttactgcttgcaaatatgagagaatgcatacgactcaaatccccggtagcgtaacttttggtgatttgtgggtttaatgccatttgaaaattgctaacaaaacccgttacaaccccttgtatagtgaccgctattgctcgtgctgcattcacaatagggccaaagaacatattcaaaagaacattcaatccttgtgtgtagaataccccggcaatattaccgaacaagctccagccagcgatattagccatttctttgaaaattctcttattgaacattagtttcactcgtgcctctttgaaatgccgcttacagtatatgccatatattaaccggtcaagaatggagatactcaaaagcagagctgcataaaatattaatcgatcaaatgtaactattgtcaacagatacactatcactaatttcaagactacatcgagaattgatatgtaggcaaaagccgacatcttttcatgtgcaataattaccgcattataagggatagaaacaattgatacaaacattgtaagtattgaaaattggtatacccaaatggcagcaacaaacctctcttcaggaataaccaacttatgatatacaaaccataaaccgagagtttcagcaacaatcacaattaacaatgcgataacaaaatggataatcgctgcggtagaaaatgtcattatttgttttttgatatcacctcgtgcaagttcgaaagtgataaacctttgtgtggcattagacattgccccgtttaagaatgaaaaaaaggtaacgaatcctcctactacattatatatgccataatcctctactccaagtgtattcaatacaatcctgctggtgtatagtcccacgcagaggataaatatcattctcaaatatagaatgaaagtattcttggctattcgtttgttcgaggaaacagaatctggcatgaatcttcgattagattatttagatttttcccctatgataattccccagccaatgtttctgactgctattgttaaggagatagataatgttaggctgatagcaaatacacctaatgagagtagtattgggggaatctcatagggaattgctataaattccagccaataaataatcattgagtggaacaaatatattccaaaggaatttggaactatcaattgatataatttagtgttctctatccacatggtattgacagaaagaatataaaatactgttattccaataaaagcattaaataattttaataaataggagggggggggtaattcctggcattactatattaaaaccaatcccacatacaactgcgatggctacatatttaaataccggtctgtaaatggtaaacagatagcctaatgtgaaccaaatgagatattgctccacatttttgatctggaaataaatcatatttatgggaaaacagtagagaagcaaagcgactatgattatcgcccatattgggatatctagtttaatacaaattttgcgtaaacagaaaaacacaaggaatatcagaaatagtgcatacacaaaccatagatgccttggatctaaaacaataatgaaaccatcaattaaataatgtatcgggtctcggacacctagaagtaccattgtagggtaaaccatcaatagtccaaacacataaaacggtatcaataaccttttaaacttgttcttaaacaattgtacaaaagtcatagatttcttttttacctccaattgccaagcgaagatacatccgctggcaaagataaacagaggcatgtgaaaagcgtaaatcaccttgtttacggaattcaaaattggcgatggcgtactgggtgtaataatcgacattggggaatacgtaaacacaacatgccccaatacaaccaatagaataccgtaaaatttaagaatatttagttctgttagcataatgacaatcgttcaacaatcctcttatacttcatctaactttctatattacacttccaattgtaaaacaactcttatgtcaaacgtttgacaaagatttcgtgtaagaagaaaatctttgaaaagccgtataaccatcatagaagtggcagaaataacaaaggggttattgatgcatacaatgtaatttgcaattacatactaccctttatgtactaaaaaaacaattctgattctaaaataaccttctttctgctagatatgagttcttttgtgttacctcccagagaaaagacattgggtaatatattcaaactcatggcgcattccaaaaggttattcaactcttttcattaaccgtattcaataagatgagtggcaataatcagattaaaaatcgagtagtttttgtacatttcttgtgatgcttgtacaaatgaacttttgaaatatattgtaactgtgaatgtctgtcccggtataagcaacagccttttcacttaacagcagcacggcctttttcttaatccggttaccgtacatacctgctattgacggaaggttgagctggaactttacccccatgtcttttagccgtcgataatctgattcacccatataaacataccgttcggggtgagcgagaaccggatagtagcctttggccttgatgcgaagcaagatattgctcaatcccatcggaggactaaaataagaggtttccaccaacaggtggtctccattctcgcccaaaggcaacaagtcattcttttccaaacgctcctcaaagagattgtcgagcatattttcagccgcaagatgtagcgttatcgggccggtataggtggcttgtagttccgcgaaacgctcccggaggtgtgccgtggtattgggtatgtcctccatgatgtgcggcgtcaaccacacggctttcacgcccagctcttcatacagacgcagtatctccaacgcttcttccacagttcgcgccccgtcgtccacacccggcaggatgtgtgagtgccagtcggtaaaaccttcgaatataccgctatctttcaatggtatgcatttcctgaacggccacacaatgatataaagattttgtttgaaaaggatttattgataactatttggcagatagctatttacagctaattgtgtttttcgtcggagccgtaatggtagcccgagccgtaaccgtagtgataaccatagcgatagccgtaacggtatccgtatcgaccaccgcttccctcggtcccgttcaggatcagggacatgtttttgtattttttttcatcgtagatcttctccaattccgagagcatgctccgttcgagcaaccctgcgcggactacgaaaatggtacggtcagccagtttctcgataatttgcgtgtcggctaccagttcaacgggcggacagtcgatcagcacatagtcatattgctcccttacagtatcgattgtctgctttaaccgctcgtcgaacaataattccgttgggttaggaggtatcgttcccacgggtagtatatccatagatttatgtttcggatcgggtacgatgatctcatccagattatcgatacgacctcccagatagtcgctcaatcccttgtcgggagagtcgatataggatgatgcagaggcgtggcgcaggtctccgtcgattaccagcactttttttcctttgatggcaaggctcatggcaatgttcatggtcagaaacgatttgccgctgcccggattgaatgaggtcatgatgatgacattcgaagtcttgtccttgccggtcataaattccaggttggtacgcaatacgcggaacgcctcattgatgatgtcacggttgccctccttgacgacaacggccttgacttcctgcggctttttcccgaatattcttttcttctttcttgtaaacagcggaatctcgccgatgaacggtacggtcacactctccaggtctttccttccccgtacacgggtattcatattctcgcgcatgaagataatgactatcggaatgagcagccccagagcaaatgcgaccataaagatgttcttgcgtacaggggatgtcggcaacatactgccgtgcggtggagtgacaatgcgggtattataggccgtaaatgcttgcgagagttcgttctcctcgcgtttttgcagcaggaacaggtaaagagcctcctttaccttctgctggcgttccaccgaaagcaggtatttggcctgtgtagggttggccgctatacgtgatgttgtctgttgctccgtctgccgtaaactttttatctgcgaattcaaggttactatctgattgtcgatagacctgattatcgccccacgcatggatgccagagcctgatccatatccacgaccagcggattttctgcgctgctgttcgcaaccaggctgttacgctgcaacagttgtttgttgtattcggcaatctgcgattcgatgttggcactctctataccggaattggccggaagcagttgggtacggttggcatcgttggctaaatagttcctgatgtaacgggtcatgtaaagctggttgttcaaggccaggatctgtgcgttggtcgcactgctttgggccatgtacatgctcgatgccgcctgcacatcgggtaacaggtgttctgacttgtaagaggaaatatcctcgtccacgttccccagctcctgttcgattactcccagacgttcattgatgaacattgaggtactgacagcaatctggtttttgtccttcacccagttctcgttataaacggaaatcaacatactcaatatatcttccgcccgctgtgtagagttatccttgaatgccaggtctataaccgacgctttctcgttattcaatgaaacggacagattggatgagcaggagtttacagcgttatacaaattggatttgcctacatataatgtatatgccttgcctttcacgtaattgggtgttgtattgataatgattttccccaatggtgtaggaatggagtcgagcaagtttccctttatatccttttcgtcaagatccgtcccgttacgtataaagtcggataggaataacgtgccgtccggctgcacttccagcgtgaaaccggctgattcattttcaggcaagtcatttatcgttacatccactggtaatgtcagtccataggccacctgacggtggaattttcctggaacgaagtaattcatatccaaacgcaaccgtttaactacttcagtcattaaagacggtgactgaaaggtgataagttcgttattcacatttgtaccggattggaacaacccgaactccgagaaggattccagatccgaggaaaacgacttacctttggaatcttctttgaccaataccgaagcggtacgtgtataaacggcaggggtacgtaacagatgaacggtagcggcaccgaccgttatcgccaaagacaagacgaaccacttccaccttgcgagacacagatacaacagatcctgtatccgcaggaaatcatcctgctgtcccggttttatattcttttgatttatggccatatctgattttatatttatttcacaattaacacggtaatggtagtcagcagcgaggccaacgacatccaaaaagaagcagaacggacgttattgccgttgacagtcgcctgccgtgctttcattgagttaggttccacataaactatatcgttctgctgtaaataatacacgggagaggcataaaggtcgtatcctgaattcaggttaacctgatacaaggtctgtttaccgttttcctcccgttgtaccagcacattctcccgtttcccgtagacggtaaggtctccggccatgcttaaagcatccaaaagcgtcagcttgtccttatcgatattgaagcgtccggggttggcaacctcacccaacacggaaacggtcaggttcatgaactcaactgtaacgacagggtctttcacgagattcttcgaaaccagttcctcttttatatacgaggcgatttcctcgcgtgtcattcccgccacatggatatgtcccaacactggaaaatcgatatctccatccttgttgatcgtatatcctgatatcccctggctattggatgttcccgatgtcgtaccgatctgtctggatatgatcggaaggttgaaaaggttcatcaacaaggggtccttgctgttgactagtattgagatcttgtcttcgggacgcacccggatttccagcgggttcaagacttgttctgcggtaccccgtttcaggtccgtgaaataagcgactttcggcgtggcacatgatcccagcaggaaagccacggtcaataagaataaaatgtatctgattttcatatttcattgatttttatttgttggttttctgttccgattgaagttgtccgatagatttcgtcagcctgatgttggcaagagtccatatcaggatatcgcccagcacgatccagttcacattgagataaagggacagaagaatattgagcagtatgaatattgttgatacggaaacaatgataatcatggcattgcgctgctttattccgagagcaagcagcttatggtggatgtggttcttgtccggcaggaatgggttcttcccgttgcgtacccgatgcaggtagacccggaccacatcgcagcatggaaccagcaagggtgagaaggctagcaccatcggatgtacatttcctgtattatcgtctagaccgcacatggtcagtttgagactgaggaaacagagcatcatgccaacggtcaaactacctgtgtcacccatgaagatcttccttccgtgctcggcgttcccgaaaacattgtaatagaagaacggtaccaacactcccaatgtggcgaacgccagtatggcatagacatgctggtggagcatgaaaaaagtcagaccgtaaaacaggcaggcgacactgcatagcccggaagccaacccgtcaatgccgtcgatcaggttgatggcattgatgatgaagaccacgattaaaatggtcaagggataccctaaccataacggcaccgcatggatgcccaggataccgtataggttgttgatatataccccaccggcgataagcatcacgccgca

SEQ ID NO: 422 - DNA, 19065 bp, unidentified
  source 1..19065: mol_type = unassigned DNA
tcagcggaacaatgcctccccgttcaccggttccccgttgtgggtcagagcaaagtatacgttgcttccttcggcgctgtagtatttcgtgggcgctgccacactgccgatggtgtcgccgggattcacataggaattctctttcactgtgatctccgtcagctgtccataagttgcctcatagccgtcacccagatccagggtcaccgccttgccgatctcctcattttcgaagattgaagtcacttttccctgcgcacaggcggtcactgccgtaccttcttctgcggaaaaaatggtggcgggattgtatttatactgatccagtgtagcaaaataagtgctcttgtccatagagtaatgcatcagaatatcactctgcaccggttgctgtaatccgtcgctttctgcaaagtgcagtgtcttctcaacgaccacatccacgcctgctgtctgctttcccccggtctcttccttttgtcggtcggcatcggaattctgctgctctttctgtgcggcctccagcagggtctcctgatccgtcagccccggaatctctacgttgccggagcctacctcctggggcatatagtccagatcatcctcggtgacaggagttcccgcgatctcatttcccgctgtattatttgccgtcagtccggggatgttctcgtcctccttcagaagatgttcgtcgttattctccgtgatctcctgtaatttgtcatccgcattgttgggaagcgcagtgaagtccaaggtataaccatcatccctggactccacattctgccccttcatatagacccctgtcatggtcaatgctgccagaacaaaggccgaagaggctaacattataatacgctctttgttaataccgctctttttatttcttctcatatcttatccgcatccttcctgttccctgagtcaactgcctgctattacgtccttcaaaccattttccctggtttatcctatagtcttgcccgattcaagggttttattcagaatgtcttcgatatgaaatttgcatttatttggaactattcagagccatgtaaatagcgtcgaatgtttgcattcgtaagaacatttgatgctatttatagggcgaagtaactgaatagttatatttattctatgcctgtgcggcataggcagccatatccacgtgctgtaccgtacccacatttccgttttcgtataagaaaataccggtcttgcggaccacagcattggtcgcattggcattggtagtgccgtcctgagccttacggtctccctgcagggtaaaatccgtagaaacgttttgcagacagatagcaccgacacccttgtcagaaagtttgtacagtacgtcgttgccgttttcatccttgcaccagatttttaattttgaccagatggaatcgttctcatcgatccagccgttgccatcctcatcatactgcgccagatctgcaaagccatccccattccgggtgccgaacagctcactgccgtcgttgatagtgccgtcaccgttcttgtccagtgccagatagccgctgccattcagcacggagatctcttcttccttgccatcggcatccagatcaaaataaaaggtctgatccgacacttctgccacatcagtatccaggttgatcaccagcggatcatggagcgtgaattctgctacattgagttgctctttgtagtattcctcgcatctgcggctcatatttacatttacattaaaattgatctctctgccatccttggtccgtacacttcccacggtggaaaaactggtatcctcctgttctatgttccaggtctcgctcacatagttcaatattttcacacgggacgtgaccagattgaacacgtctgacgcaggtgttgcggttccctgtgtgctgccggaattcgtctgggtattatttacgctattccctgtattccagctgtttccggtctgattaccgctgctccatccgttttcctgcatccagtcccgcaaagtgctgttcctggacgggaataataaatcaaaaatataacgcaccgtatattcccggatggtagacaatgtctgttcactggcactgcttcgcatatcccatctggcagaagataccagcaaacgactctgccagtctttggctgtcatcgtggtgttctctgcagtgttctcctgttcctccgtgttctgtgtggtatcctcaccattcggcgtcttctgtcccttggtggatacatctgtcagacctgcctgataatccgttatctcaaatcgtctgacgcttgtcttagaagcgtgatagcttctggcggaatccattcctatgcttgcggaatcaattctcaaatctgtaattttctcctttccccgacctcaccacgaaccaacagggcgcgcttcctgtaacgcttaacagttcaccgctgcatgtattcataaaagcgcctgctccgcagtcgacgccgctaagcggctcatcttttatttcatacatgcggcactccgctcatgcaatatcatatgttctgctttgtgtgccagcacccaagcagaacatatgatattgcatggctgaactgttaaactaaaaaaagatggtaaagaaacagaatacatataatatgcctctgtctggttaccatccgtggtgtcattatcaaactgtaaaaaataagtagcaggaagtgactggccttgtcacctctctactacttatatcgtccgctatggacattttatttagtgttaatttactgctgtttgggctgagtgggagcgccaggggttccgggtgcggaaggcaccggtctgccggctgctttcagctttgctgcgatcatgctggctaccatttctctggtcaccacgatgttgccaccgaagggattgatcacgaatcccagcgccgggctgatattgccctgtgcatctttgcgcagcagcattcccgcataatcgtcaaagttcatggcgaaagtctgctgattctcctcatctctccacctttttagctctgtccagtcagtgaacgccatgaagaacttccgaccgtcctcggtggacagcatcgggaactgtactttggcatctcttgcgatggtcacccggccgttttcatcgggcacaggcaccggatcgatcacgaccggagacaggaactttgctttctgcagttcatccaggaacatctgtctgtgttccggggtgtcctctgcttttaataattcaatggatcccaccatcatggggttggataccggtttgttaaattccatattttttctccttacttctcattgtaactattcagcctctcttcgcgaaacgcatctgcgatggttagtcacaagtctctgaatagttacactcggttatagttgatcaggcatcccttcaggatgatctgacgttcttcgtcggtcagctctcccagcttcagggtgaattccttcatgccttctccggttgttaccacatatgccttaatttcctcggccttgtcttccacggctttcttaataccaggaatgaacaggtaatccagattcttgaaaggcaggtctccgggctggatcaggaaaggaagcatgccccagttgatcaggttggaacgataacgcttggtggcatactcgttggcaatatttgcccagccgcctaataccttctggcaggaagcagcctgctcacgggcagaaccgtctccgggcttcactgcgaaaatagtggaaccgaatccggtgttctcacgacttgcatcgggatactgtttctttacttcacccataacatccttcagtaccggaactgcctgacagggatgtccgccgttcatacgctctttctctgccttctggatctccttggcacgtcctacatactgcggatccttacggcttaaagtgaactctgccagtcccagaggattggagcggtaggaagaggtctcaccggatggaatcagctcatcggtagtagttacgggatcgtggatctcggatactacctgcagtaccagattctcaggcagggcacccatagcgggccagtccttgatattgggaccgaactggatctctacgctctcgtctgccacaccgtgggaatcgaagacacggttcttgtaaatattgctatcgaaatgatatttgtattttccgaaatctccatcgaagtccgttgcgggagtcagcacacccttgttggctgcagtggctgcgatggaacgggcatccatcagagctacggaagcgatctggccgttctgcagcttggagccttcacggttcgggaaatttctggtagagtgacggatactgaatgcgttattggcaggcgtatcaccggcaccgaagcagggaccacagaacgcagtcttcatgactgcaccggtctctaagatggtagccgcacagccgttgcggatcagctccatgtatacgggcatggatgcgggatatacgcttaaagtaaactcatccgcaccgatgtatctgcccttcaggatatcggcagccgcacagatattctcgaatccgccgccggcacagcctgcgatgataccctgatctacaatgaacttgccgttctttactttattcttcaaagtaaagtctacggcaccgtccagacttactttcgcacgcttctccgtctcatccagaatatccatcaggttcgcattcagctcttcgatggtgtaagtattgctgggatggaacggcatggcgatcataggacggatcttgttcagatccacctcgatcagtccgtcgtagtatgctacctggccgggattcagttccttatagtcttcggtacgtccgtggatctcatagaactcacggatctggtcatcggtcttccagatggaggacagacaggtggtctctgtggtcattacatcaatgccgatacggaaatcagcactcagggaagccacaccggggcctacgaactccattactttatttttcacatagccgttcttgaatactgcgccaatgatagcaagtgcaacgtcctgaggacctacacccttcacgggagcaccatttaagtatacggctaccacgccgggcatgttgatatcataggtctggttcaacagctgttttaccagctcgggaccaccctcgcccatagccatggtacccagtgcaccgtaacgggtatgggaatcggaacccaggatcatcttgccaccgccggctaacatctctctggcaaactgatggataactgcctgatgagggggtacatagactccgccgtattttttcgcacaggtcagaccaaacatgtggtcatcctcgttgatggtgccgcctacggcacacagggagttatgacagttggtcagtacatagggcatggggaacttctgcagtccggatgctctcgcggtctggataatacctacaaaggtaatatcatggctggtaagcttgtcgaaacggatcttcagcttgtccatattgccggaggtattatgctcctgcagaataccatatgccatggtgtttttcgctgcttcttctttggagatcgtaatgccggtcttcgcctgtatctgactggctgcttccgggttatccgctacgatgtccgtaccgtttaccaggtaagcgccgccctgtgttaactgaatcatgctcgtcctcctgttattccacttcttatgcgtaatgtgcatctaaatgtgcactcctttcattatactggattgttttctcagatgcaatgatcttataggatgtttttgccactgtaccacgctaaattttatttttctccgggaaccattcctcttttgttccggtgttgctataatatcctcagaaattatgccgttttccgaaaatctatgcgaaaacgacagttgtcggccgaattccggcggccgcggaaaggaaccttatgaatgtagtaatagctatcgattccttcaagggaagtatgacctccatgcaggcgggtttgagcgccgccacggggatcaaacgtgtttataaagatgcacatattaccgtccgtcctctggcggacggcggggagggcaccgtcgatgctctggtaaacggctgtgacggccgtatgacacaggtgcaggtcacaggtccttccggtcaccccgttgtctgtccttacggcatcgtcgacgagacccataccgcaatcattgaaatgtccggtgccgccgggattacccaggtcagcggagaggaaaagaatcctctgaacaccaccacttacggtgtaggcgaagtcatcaaagatgcaatccagaacggctgccggcattttattgtcggtatcggtggcagtgccaccaatgacggcggtgtcggaatgctgcaggcacttggctttggctttctggataaaaacggaaatcagatccgcttcggagccaaaggactggaggatctggaatccatcactacggatcatgtgcttcccgaactcaaggaatgtactttccgcatagcctgcgatgtctccaacccgctctgcggagagcagggatgttccgccatctacggaccgcaaaagggcgctacttccactatgatcctgcagatggacaaatggctggcttattatgccgctctggccagagaacagtttcctcatgccgatgccaaatatcccggtgccggtgctgccggcggtatgggatttgcttttcttaccttctgcaatgccacactggaatccggtattaagatcattctggaagaaacccatctggaaaaatatatccgggatgcagatgtcgtgatcaccggggaaggccgccttgacggtcagacggttatgggaaaagctcccatcggtgttgccaagattgccaaaaaatatgaaaaaccggtacttgctttttcaggctgcgtggtcaaagaggccgttgcctgcaacgcagagggcattgatgcctttttcccgattctgcggaacgtggtatccctggatgaggctatgcataccgacaatgccatgaccaatatgacggatacagtagagcaggtgttccgtaccatacagacattttcctccgtctgcaaataatgcactttacagtttttctcttaatgataagcttatcaacgtaaaaagtttctaaatgtaaagcgaagatttttcacactcaaatttgctcctgcactgtatactcaagcatcccataccacagcttaaaatctccggatgacatcgtgtccgcactgcccctgctttctaacacttttcaagaaaatgtcaacaaccagctgtagtatgggctgccaccactccggaagttctgtttgtattgaaaatgccattttttgctaaaaaaatacaaaagcaggagattttggccttttataagagcttattttcgctaaaatgggaaaaataataaaatcagtacaaaaaatgttggatttagaagttttgttgtactgattttgctattttgatgcgatttgccccaaagcaatagaaatgcctatagtgtacagatattatgagaaagcacaaagcgcccacgtcagatggaatgtccttccaagaatgattgtcggaaggtggtgattttttctcgaaaagcattgaaagacaggatggaatgaacaggatgtttgcggcaggctcccttgcatgacagccctacgctacgaaccatgcaaaaaaagagcgaaacagcatcgcttgtgcgcaagctcccacgacgtgttccactctatttctgcatggctcgtagctatgctaactttccatttactaaactatagattattcttcgtatccgtttggattgttcttctgccatctccaggaatcttcgcacatctctttgatgccattctcagccttccagccaagttccttctctgccagagaagcatcggaatagcaggtggcgatatcgcctgcacggcggggtttgatcacgtaaggaatcttcacgccggtagctgcttcgaagttcttcacgatgtccagaacactgtagcccacaccagttcccagattgtagatcttcagtcctgcattctcctcaatcttcttcagagcctttacgtggccctttgccagatcaacgacatggatgtagtcacgtacaccggttccgtcgggggtatcgtaatcatcaccgaagacacccagctctttcagcttgccgactgctacctgtgtgatataaggcatcaggttgttggggataccgttgggattctcgccaatggtaccgctcttgtgagctccgatagggttgaagtaacgaagcaggatcacattccattcgggatctgccttctggatatccgtcaggatctgctccagcatagatttcgtccagccgtaagggttggtgcactgtcccttggggcattcctccgtaatgggaacaaatgcggggttgccgtatacggtagcgctggaagagaagataatgctcttcacaccatgttttctcatgacatctaccagggtcagggtaccggcaatattgttctcataatattcccagggcttctgtacggactcaccgactgccttcagtcctgcaaaatgaatgactgcgtcaatctgttccttgctgaagatctcttccagagcttcacggtccagaatgtctgccttatagaaaggaaccttcttgcctgtgatggcttctactctggggatcactttctcacttgcattgcagagattatccaatacgactacatcatagcctgcctgctgtaattccactacggtatgactgccgatgaatccggcaccacctgttaccaaaattctcatacactctctcctatccgccgtgcataggacaatactatttgttcactatggcggctgcacaatctctcatctgtcagagccggatgaaattttttcttcgtttcttacagtatcagattactgtaattctatcgattcctcaataaccttatgttgtgaaaatctgtcgaaatgtttacagcaccacaccattctcggtgagcagttctctggcactttccacagagtccacaccggtcttgttcttgatcggcgcaaattcttttcttctgactacttcgaagggcagacagctgtccatctgatggatcatatccagcaccagactctcgaatttgtagccgttgggagcctccggcttcaccggttctccgttctcatccagatacgggatcttcttctctacgatatgcaggggcatcttctctgccatgatcttttccagatcctgtaccttgaacagataattcaggatcacaccataattatacgcgggttctcccttctcatccttagcattcatcagttcatcggtcagttcataatattctacgatagaaggtctgccatcctctaagcacataacgcctaccttctcatccggtgcattcttgcggaccaccttggagcctaccacacaatttttctgaatagtagctccgatgaagcagggatctgcgattcgctgcaatacattatccacggcaaatacattgatccactcaatgccttctctgtgtacaatgtccagcatgccattgtttttcatggaaatgaaccagccgccgttaccattgggggaagtggacagcttgcccttttcctccagatagatcttaccttcataatcggtagccgcagccatctcctgtttaaagaaatgcacatattccgcattatatccgaagaaatcatgctcctttaaaaaggctatggtcgcatcgttgttcttatcactggtcattacgaacagatggatccaactgtctgcctgatgtacgacttccatcagattattgatcaggcattcaaaaatatacagttcatgagtcagtcccacattgtacattcccttgggattgtcagatcccagtctggtgcccataccaccggccagaaggaccgctgctaccttgccctgtcggatcgcttcgataccggttgcggtaaattcctccctgtttgcttcgatttcgtctaactgcatggcagccaacggtgtgatcactcctttttttgccagatcttctttatgcttgcaagcttccagaatgctcatatccgtagtttcgatctgatccagaatcccctgcttctcttcctcgttgagctcccagtaatacttcagaacatgttcctgaccatactttgcaagcttctccttagcctgttccagtgtcatactcatattcctacctccgttttattttctccgactattccaccccgggtaacagtcaattttctctattatacttgatatttcctgcgattgcaaaccttactcccgggatcgttcccgccctgttaagattctgtaaatgccttgcaaagattctgtaaataacccgacaaaatggtgttaagggtcgctcaaaactattcacccgggggtatctgtttactataatacggtatatgaagtttttaaggacttcatcgaatgttgtacagaatgacagaaagttgaggaattcattatgaatattggaattttaatcattgcaatcgtaggcggtgttaccggacttttatccacagcatatctggcagtcagtttccctgctgtgctcctgtggaagctctatcgcagggtggtccacagaattcctctcacccaataagctaactacaaacactttccctctaaaaaggacccggaagctttcgcccgggtcccttgtcgcattttcttattctatttttattcctgtaccggatcccagttctcatccaccagtgtcgcagttaccgcaattccttccgatgcattttctgtgcggatcacaagatagaacattccttcttccgaatccacggcatattctgacggatcctccggcaaaaagacagaaaatccctccgggtactgctgcatctccagaaatcccttttccagcagtgcagttttgtaggcttcttttactgcatcccggtccccacaggagtacacctttattgaagcaaaagttccctcttcgctgtctgtctccgtacaatctgaaatcacagcatcgggatagataatatcctgctgcaccgctttcagatattccgttgacatccggacactctgtaagatctcaaaagtatcttttccatcctcggaatgcgccatgagtaccagactcaaaaacaaaatgagcagataacttcccagtgctcccgccagtattttcgcaaaaggattctctggctgccccagatttgtataagaagtgatgatccagccaaaatttcggtagtccaccgcggtattacagtattcgcagactccgccgcccaaaatgtccacactgcctccgcagttggggcatttgtattcccggagtgccctgctgtgctgcgttaccacatcctgtctgccttccagttccagccggatctcctcataacggttccggatcttctttcctgtatccagtgtcaatcgggtcctcacttccacgctgattctgtaagactctccccgtgtctccgcctccagaaaacgcacaccgcaaatgcaacagtccaccacattctgataccgtgccaccaccgtatccagatcacaggatgcgaaaaagcgtacctgctctgccgtatccgccagatggatcattcgcagctggtattccagattctgaagaaaattacccgtggagaattccgggattgcggcctttactttcgattcgtcttgaattctcggctttctgcgagtctccatcacgatcaacattacaataaatataatgagcatgtaaaacaacgaccggaaaaataccggagccagaccaattcccagcatcatggctgcggctgcctttaccgcattgtatccgttcctgcccaacgccaacagcaaaaacataatgccgcccgcacagatggccagtaccgcaagagaaatcgctgtaattcccaccacagcaccggctttcataaagttggaaatacttttctgtcttgcgtcctcctccagagaaaatccggatacctttgtttcaaaatcactgacgagaaactttgccccgcaggcatcacagccatcgatatagctggtcagttttccctcatgtccacagttagggcagataaccatatctctctgcatatccgctttcaaaaagctcgccgctgcaatctccggtgtctttaggaacgcaatttttttcccttgcggtaataagtccgtctcatttttaccggctgggtacggcggcagctataatcataaccatccttccagggaccatcatagtccgccagtcgtgccggctcctgcatctccatatccaccgtcagttcccgctgctgcagtctttttctgctcaggcgcagactttgccagaaaggctgggttgtctgctccatcaggttctgttccgcttccccgttgccctgatagaatgcttttaattccccacagaagtcttctgtccgtccctcgatctctttccgtgcatcattcagaaactctgttgccatttcgttttttctctcctcataagtgatcctgccgcgtaaaggtcctgatatcttttgtatcttatgtcccaactactttgtcccatatagctatgtatccattatataagttggtacccggtatttcaagacactttcccgtatagaatgatttgcctcatcgaatatctagtgctggtgcagatacttctctctggtagccagtccgccgcggatatgacgctcggatttattcacatccaataccttccgcgcctgctttgccaacgccggattcacctgggccagccgctccgtcacgtccttatgtactgtgcttttgctgatgccgaatgctttcgctgtctgccgcaccgtggcgttgtggtcgatgatatagttggctatccctatagctcgttcttcaatatagtctttcaaaggaaaacccctcaggatacttttttacagtgtatgaaagtatctgaggggttatgatagggattgtatttatctctccaattatattattgctttcttttatctatggatacataagtagtgtatgcctatattcaacaacaattttcctatggttctgttacctcctagtctaccatatgtcttaaatacatatatgcaaaaggaggaatgctcatagtttgcatgaacattcctcatctttcaagctatgtcatctgtcaccttactcttatcctctaagtcaatatctatttgaattccaagtaatttgctttctggtgcatcatcgttgagttccagaataacattatccctaacaatatttttatagtcttctgtactcattataccctcaaacgattcaagtgcatcctcattaatagtacatatatattgaaaatcttttttacagcatgtttcatatactattctaaaaagagtctccctttgtcttggatccatattagcaaacaatctactatcatgagcaataaatctcatcttgcttatctcacaattcaaaatcaaccagtcaaagcaaaacattcttacttcattcaccccatcagaggagtcgtcttctatacgtgcttctaatgaatatcgcaacaaattttctccagtattattttttataaccaatccactttttttcttgggataaaagcgtttggcatattcccaatacttatttcgtaattcttccaaatacccgctttcctcatcaagatactcatctgttgccttatcttgctttatcatttcctccttaattctccgtttattttctcgatatgtcttcaaaattttttgatattcctgtatcctgttcaattcattctgtaaagatgataattgttttgtcaatgccacatattcttccaatgctccatgcgaattcaaataatcaagcaattcatccatcctacttccaagttctactattttgctgtcaatttcctctaacgctcttttttgttttgccagttcatttcgaaggcgtacgtttcttgtagccaataactcactatgaaactgggttacctccgcaagacttctttttaccatctctggaatttctatttgagctgcctcatatatttttagtaacttttcctcttttacttcagtagtttcctttgtagattcctcaatattttttatatatgtgctaacaagtactcttttattttccagttctttcttttgataactcttttcatcagcctctttttctaactcatgatagttttttgatactttgaacacagatatttcctttgccaattctgcaattctatattctaaatctgcaacatctaattctgcatcattttttcccaaatagtactgtcgaaaaagcggatcattttttattgccttctctgttgccgctgcagccacttgcctatcgcgaagttcccttttagcaacaattagttccttatctatccctaacaaaaaacaattattcaaaattttactataatcgctttctttaggaacaaaagcatcatatattgaataacacagacgagattttctaacaaatcttgaaaaaagagttgtccatgtcatatctttgggtgtttcttttaatccaaaacaaagttctctcaatctctcctgaacttcttttggtttcagtatctctccattaaattcaattttattttgattgcatgttgatcgcatgcaatagtgttctttatcatctatttgaaatcttaatgtaaactcccactctggaataactttcgcaaaagattcaatttttcttgatcccaaacaaaaatgaattaaatgtaaagttaatgatttgccaacgccattatatgtattgccatcattctcattatgaggagtaacctgtttccctgcaattatattaatgccatctttaaaaataattggatgaaaagatttttgattagcagttaaacttatcagtctcataacacagcaatcccctttcatttttttcaatcgcaccaataataaacaaataatctaaggccataatatattgatcaaaggaaaatttcgtcgaatatcttttattagaatattcttctttataatattcccataaatcatctatcgtcataggtttagataattgctgaagtagaaaagcaccaaatccaaaaaaggactcacttactgacaattgttttttcggtaatatcatattttcatccctttctatatctagccttatctaccttggttcttcaaatatatcacatgttgaaaaataatatgccatcaaaacccagacacatgtaagcatcgacatggttcttttaggcacggaattttccagaatataatagcatctacaatctgaagcattctcttgctcatcttcaataatttcacatgccttttcatataaagccctaaactttttttgtaaaatatcctttattcccggattttcgttaaagtattgatttaataatccttcttgatagctccctacagtaagatttgcttcaatttcttcacttaaattattaaaggttattttttggacgaaatctggtacaaccaatttttctccagtactaattggcaattctgcattcaataaatatcttacaacttcattaagtgcatcatattctataatacaatctgacacatcaggaataaatcccactatctcctgcatatcattttcatctaacatgtcaaattttccttgcaaatcttttgctgtaaaagtttcaatttctatttctgaatataatggatttgatttcaattcgagagctttttgaattattggtgctggcaacccctcatatctatcatttacgacaaaataaaatttcttaattgcacatatattattccatttatcatacaaccctttaaaatctgtttctaatttttttaccgcatcacctactgttttttctttattaacatctctaggtgcataaacttgatagtaaatacctgtttggctaacaaatccatcattttttctatcacctatattaccatatgctttaaccggctgaaaatttggttccgctttcgtcataacaaaaacaaaaaaatcttcaaatgcctgtcctttatactgtaatattttaattctaaaaagtatatctgcaatatatctatcacctttttccaatataactatcccctttttcacttttgaatataactaaattattataacatgactttcattatttggtttataagttcatacaatttttcaaactttttcattaataattttctttcaccttttattgttctaatttatagatttcatttttcgcaatacgtatcattcctcgtaaaaccttctacattgtcactaccaaatgcgcatattacggtatattacggttttactaatattaattttttataatcttccttactgcgatattattgccgatatcacttactattctcatagctcgttcttcaaaaaagcttcttttcaatgcaaaaaatatgattgaaattgaaataaccttatatattcatgttataatttattgattttggggcatgttccaattcatataaacgtttaatcatcatatctatgacgcagtcattgtaacattcattacggctacaattgcttggtatattgcaaatcttataacccccattcactaaaattcttccttttttatcctttgacataagtttttgcatcctaatatccccttattcacaattatatttttacatagttcttgacaatcaaacatcttcttgctaccattctaatcaagaaatgggttttcaccgcacttattgttgtggcttgcccgtttcttttttcaattataaatacatcctttatccgacatagcagattcctgcacttgatttatcatttcatcataatatgccctataacgatacgctgtccttcggctgatttgaccttcttttacaatttccataattgtcatacccgcttcatacttaattgcaaattcctgataagaagccatccatgccgcattatgccttttacgtcctcctaaattacgtgccttaagacgctctatttcagccctaagttcttcattttctatttccaattcatcaatgtgcgtcattgcttcctctaaaatgcttatcacaaatgtccctccatccttttgtgtgtcattttggtttatggcactattataattgctgactgcaaatgtgtcaatttgatttttgacacgcaaatacttttactaaaaaacattacaagcgcacctgtttaaagacatcaaaacaataaaagcacatgaaaaagattttatattacactctttttcatgtgccattttcaaagacattcgctattttattatgataattaccctttgttataaacgcttttaatattctttttctaacttcctataatccacctttcccatcattgtcattggtaattcatctataaattcaaaatagtaaggaactgctctttcagccaattttgtagtacataattccctaatctcaccctctataattcccgtatctcttttgcactcatgtttcattaccaaaaatgctttcgggaccttgccatttgcgttatcctctatcccgataactgcacattcttcaatatctggatgctgagttatgacattctcaatcgaaggtggaaatattttaaaaccatcaaatctgataatcattctctccatcctactatctatagtaagcactccctgtttagacatatgacctatatctccggaatgtaaccacactttaccgtccttatgtcgttgtaacactttatccgttaattctttatttttaaaataccccaacataacacttggaccggttacacatatttctccttgctcatcatatgttaattctttatccgttcccggctcaaaaatactgattatattttttaccaaaggtatgcctacacttcctatctttctacatgtaggcatttctaaagttgccgtagatgcaagttccgacattccccaacctttatacaattttcctttagattttttacggattaactcatcttctatcttcttttctaaattctcgttaatcatatctccaccacaacccaaattgtggaaaaaagaaagatctttcaccgttttgctagacgttaaaacttcataattatgaggtactgtattgcagtgattaggtttatattttaaacacaatttaaccatattctctgcagtaactctaggttgcactatagtatatagtcctaatgacagcggcaaatgtacagacgcaaccattccaaatgctgcaaatgctggaattgccgtcaaaaatctctcccttctatttaattccagcgaagtaagtttatactgaaatgctagtgcattcaagttatcatttgataataaaattcccttgggcgttcccaccgttccactagaatgaaccaatagagccgacttatttttttcgtattctactactttacccttattgttctcctctaattcacaaaatttcttccatgtaataaacaaatcatcatgtagcgatttcttttgctttttcctgttttttatgtagtatcctatcttagtaactgttggcattgaatccgccgccgaaaccaatatcactttttgaatatttgtctcagatataatttccttaattttaaaataacaggcatcaaatagcaccaaaatttctgattcattttccttcaagtaaaatttcaattgatctttattggatcgtggatccagcatatctgaaattgcccctatgctattaagcgcataaaatgccactattgtttctactgttgttggcatgcaaatactgacaatatccccttttcctactcctaattgcgcaaactgactggcacacttatttattttatgaaacagttcttcgtaagtgattagtcttccaaaataattaattgccgtttcatttaatctatttttattacaaaggcaaatataatcataggccgtcatatggggaatttccacattgattgcctcatcactatagtatttcaaccatggtctatctatagagggataacctgtcatttcgtttcttgcttcttttttcat

SEQ ID NO: 423 - DNA, 21201 bp, unidentified
  source 1..21201: mol_type = unassigned DNA
aacattattatggatgatattctttcaactgaccggcgcattgctgctgggattactggttaccgtgggaatgacccagatcaactgcatctatattcctcttgttctgtgcggagcattgtgcgtgtcttctttgacagattttctggggaaaaaagtgaatttctacggaaaaattgtagtaagcattcttttggcagcacttctgctgggggaaaatgtacagtttgaaaaggcatattttacttcttataaagagctagtcagtgcctattttcaggaaggcagcgaggaagccgtacagaaagccatggagattgcagcggaaagcggtcgtgagatcgagatcgaagatgccatcaaatatcccagtgttttgctctacggcgagattgatgctgcagaataccttgccaacaggaacttaagcgatgcacctcccaagccggagtctttcctaggcaagggaatccgcttcactatgggaatcgactgggagcatattgacagaaataagatatatatcatttactatacagatgcggaaaaattcgatggattcactctcctgccctgccgggactggtatgtggcgtattaaaatgaaaataaaaaagccctcacatatcataaaaggtgggggctttcgcgtgtcaaaaattatgtttcatttacgcactcagatccagattccgtccaatcagcatggcagcatcggcagatttcttattttgctggtaaggattgctctcgtcacggtaactgatcttggtcgtggtggtgccgccggcggtgtagacggtgccgcattcgggacataccgcggtccgcagggacactgtggcggagagaaccttgccgttgttctgtgcggccttgttgtaagcgttcgttacatgctcctgttcgtgggcacgaactctggaggaggaagcctgtggtgaaatatgagatgcagatttgaaggagaccatttcgttggaaccatcctgatatttccggttcttgcaggtttcgcattctgcgggagaagactttctgccgggcttttctacatcggattttccggaatttaccaccatacccttctcttcgggctgtgcggaagataccgcaccggtagaataaccgtatccgtaattgccggtcagactataattattagaataattgattccgtaaatacctgtcatgggacttctcctttctgcgtaatgttttgctactcttctatttgccctcattgtagcacctgtatccggtgagggcaagttaagattgctgaaaaatctgctcaacttctgaaatcacggaggtcgtacctaatattacaatgggatccgaaaaagaatccgccagagtaagtgcctgttccaccgagtctgtccattctgcaccaatgcccgctcccgctaatgtctcttgctgttttttggaaaaatgatagtgcggatttccggatctggtgagaaggatccggcttgccgtttcttccatggaccgaaccaccccggcataatccttatcctccggaattcccacaataacagtgcaattccaaacccccagatgtcgcaggacttcctttacattctcacagctggtggaatggatgcaggcatccagcaggacaaacggcttggaacgcaggacttccatgcgtcccggccagtgcagcagagacagatttttccggatgtctggcaaagaaaaaactgcggattccctgcgcagatcagacagcacatccacacacacagcaagtgccagagcacagtttttcgcctgatgttctcccagcaacggaatttgtaaatccgcataaatgttgtctccgatttcaacatcaaactgcattccgaagcaggtataacggatgttttctgcatgaaaatcccgaccgtagatcttatagggaatatgcagagtttcggcacggcgctgcagaacttccagaacttccggttcctgctccgcaaaatagacacacttctgctctccggtgataacgtgggatttatcttccgcaatggcagctaacgtatctcccagctctcttgtatgctctaagaaaatccggttcatcacggcataatcgtgacgaatgttgtttacatcatcatattttgcaccctttccgcattcaaatacattgaaatccgtatgcttttccgaaaaataagtcagtgccaggtccgcctgaatgcccatggggctgatacataccgactccggcagatcggaggcaatgtccagaatctccggctggatctctgtcatcagacggcagaagtcagattcactgatcatcgtatcattgacacggaagcgttcgcgaaagtccgtgatatgagggctggtcatcagtcccacagagaatcttgtctgcaggattcgggagatcatgttggaaacggagccttttcccttgcttccggtgacaacgatgcagggagtaacggatttttgccaaagcagagatctcgtcagctcaggatgtctttttccggcatcctttgcggcatagtcctgatgtgtggaagctcgcagataggaagcatagacgaagtcttccgcctccttacgtgtagtgattttatgaaattgcagtgatgtttcggaagtgttattcatataaatacctttttgtagcctacaattttccagatactttagtatcatgtattttcgtacactgtgcaggcacatatttgcgcatgaaaaaactattttttacactaagtctttgatgtaaagtcagattgtatcgtctcaataatttttcccgcaacatttatgccggaagccttttcaataccttccagtcccggcatgacattgatttcgcaaaaataaggtttttctctgccaaaaagcagatcaattcccagaaaatccagtccggtctgctcgtaaatatctgcggctatggtacggatgccggaagtgacagggtaaggctctaccgaagcgcccagagctacatttgcacggaaatccccctgggatgtgcgctgcatacaggcaacggcttctccgcggatgctgtaaaagcgcagatctctgccgtagctttctgagataaattcttcgaagagccattccttggaggaagggtagttaagagagagttcctcataagaagctttatcccggatgcagacgatttcttctcccatggagctttccagtcctttaccgacaaagggaaggcccagttgttctacaatagaagaaaaaggcaaccgtgaagttcccagaagatatttcgggatcaaaaaggctttggaatgaagccttcgtacctgtttaaatttattaatatagatattataagcagttaatggattatagcttcgggtggcaagtgcatttatagcatccttttcccgtccccatttatagcggttgatgacaaaatccacgggttccagtattttaccatgatttataacaccatgcggagagaccacagtatcatggatccctacaatctgcagatccatatccagggcagaagcttcctgtaccagacggttgcaggtataagcgttagtcatagtattatatttttctatgatatatcctctgataggcataaggcacctcgtgatttcagtattctcatggttaacatagcaaaatgttgtcaaaatagcaagaaatatagttcttctattgaaaaaggactaatatcctgcgtataataagagacataagagcataaaagtgggatgataattccacgatatgcgaatattgggtagaattgtggtagtgcgtagcacgaagcaattcgtaggtatcaaagtcgggggcttttgaccccgacatcattaaaatatattaagaagaaacaaaagaggagacatacaatgaaattactcgaagagcgcattcgcaaagacggtacggtaaaagcagggaatgtattaaaagtagattcttttctgaatcatcagatggacattgatctgttcaatgaaatgggaaaagagtgggcgcatctgtttgcagaccgtaagattacgaagattctgactgtggaggcttccggtatcggtatcgcctgtgtggcagcccagcattttcatgtgccagtggtatttgcaaaaaagtcccagtccgtaaatattgacggtgaagtatattccaccaagatcgaatcctttacgcacaagagagtatatgacgtgatcgtttccaaaaaattcctgcatccggaagatcatattctgatcattgatgattttctggccaacggatgcgcactggagggtctgatcgacattgtcaataaagcgggagcttctgtagagggtgtcggcattgccgttgagaagggattccagaagggcggcgacctgatccgttccaagggtatccgtgtagagtcgctcgctattgtggaaagcatggatgacaagaccggagagatcacatttcgatcttaatagttagataagttagataggttagataggttagataactactcagaaccacattcgcaaacgagttaataaaaatttaatacctctcttgacaagaagtcagacaaatgcttatactgactaatgttgagagagtacaataaaggggttgtatgaaggtgtcatacaccctttttgcgttgactcaccggtttatctgcagatctgtgcccgcgctgctacatggatctgtaacgaagcagcagcgcagaaagaggagaattatgaaaaagaaagtcgtaagtttactcgcagctatggctctcgcagttactgctctggcaggatgcggatccaatgatgcagctaccaccggcacagatgcggcaactgttgcagctactactgaggtggcagctactactgaagcagcagctgatggcgaagctgtcagtggtgtaaaggcaggttttattttcctgcatgatgagaactctacttatgatctgaacttcctgaacggagcaaaggcagcttgtgagaagcttggcattgagtacatgaccaagaccaatattcctgaaggacaggaagcttatgaagcagcttgtgagcttgctgatgcaggttgtaatttcattttcgcagacagctttggacatgaggactacatcatcgaggctgctaaggagtatcccaatgttcagttcagccatgcaaccggaaccaaggctcatactgagggtctggacaacttccacaatgcatttgcttccatttatgatggccgttaccttgcaggtatcgttgcaggcatgaagctgaatgagatgatcgctaacggtgatattaccgaggatcaggctaagatgggttatgtaggtgcttatacatatgcagaagttatgtccggttatacctcattcttcctgggtgcccgttccgtatgccccagcgttaccatggatgtaacctttaccggttcctggtacgatgagaccgctgagaaggaagcagctaacaagctgatcgagggcggatgtgtactgatcagccagcatgcagactccatgggtgctcctaccgcatgtgagaccgcaggcgttcccaacgtatcttacaacggaagcactgaggcagcctgccccaataccttcctggtatcttccagagttaactgggagccttactttgagtatgctattaaatgtgtagcagatggaactcctatcgataccgattggtgtggtactctggagaccggctctgtagagctgagcgatcttggtgctgctgtagcagatggtaccgcagaagcagtagaagctgcaaaggctgatctgatcgcaggcaaggctcatgtatatgatatcaccacctttactgtagacggtaagaccctggacagctatgaagctgatattgatactgatcctgattatactcccgaccatgaggtagtaagtgacggatacttccatgagtccgatgttgcattccgttccgctccttacttcaatgtaagaattgatggaatcaacctgttggatgagcagtattaattgacttattgaaatagcccggacggcgcagcgtttattgccgcgccgccctttttctaccttatggatcttttgcttttgcggatggatgaggtagaaaaggggcggccagtgtgcttatgccaggtattaaaagacctgaaaattgcaggtcatggataaattggaaaggtgactaggatggaaaaagagacaaaagtagctgcggtttcgatgaaaaacattaccaagacttttggatccgtgattgccaatgataaggtaaatctggatatctataagggtgagatattatcactgcttggggaaaacggcagcggtaagacgacactgatgaatatgctctccggtatttattttccggatgagggacagatctttattaacggtaaggaagaggtcatcaaatcccccaaggatgcgttacggctgggaatcggtatggtgcatcagcattttaagctgatcgatgtactttccgctaccgagaatatcatcctgggtctggaaggcaggcttaatatcaaggaggcatcccgtaaaatagaggagatctgtgacaaatacggttttgaagtagatccgaagcagaaaatctatgatatgacggtatcccagaagcagaccgtggagattgtaaaggtgctgtatcgtggtgcggatatcctgatcctggatgagcctaccgctgtactgacaccgcaggagacagagaagctctttaacgttctccggaaaatgagagatgacggcaaggctattgtcattattacccataaaatgcatgaagtggaatctctgtccgacagggtggctgtgcttcgtaacggtcagtatattggaagcatgctgacaaaggataccaccgttacggaaatgaccaatatgatggtgggacatgcggttactttgaatattgtcagaccggaacctgtgaatccgaagccccgtatcgaagtacagggactgaccgtacgtaacgaagaaggtatcgttaagctgaaggacgtctcctttaccgccaatagtggtgagatcctgggaatcgccggtatctccggctgtggacagaaggagcttttggaagccattgcaggtctgcaggtaacagaagccggcacaatcagctatgtggaagatgatggaagtaaggaaatgctgatcggcaaggatccgttgaagatcgcagagatgggtgtatcgctttcttttgtaccggaggatcgtcttggcatgggcctggtaggcaatatggatctgaccgataatatgatgttacgttccttccgacagggacatacaccgtttacgaaccgaaagccttccaaacagcttgcaactgatgtggtagaaaatctggaggttgtaaccccgggtatcaccactccggtacgcagattgtccggtggtaatgtacagaaggttctcgttggaagagagattgcgtctgcacctaccgtactgttgacggcttatgtggtacgtggactggatattaattcttcgtatactatatatgacctgatcaatgaacagaagaaaaagggcgttgccgtgattttcgtaggtgaggatctggatgtgctgatggagctgtccgaccgtatcatggtattgtgcggcggagaagtgagcggtattctggatgcgagaaagacagacaaaaatgaggtcggtatgctgatgaccagagtaggaggcaaagaacatgaaggaaaagaataaagagcctttgtttcatatcgtaaaaagagatgcgcttccctggtataaatctctgggtattcgatttttggcaatcctgctggcactgatcctgtgcggtatcattacgacgatcaccacgggaatcaatcctttacaggtatatcagtccatcgttctgggtgctttcggatccgttcgcaagacctgggtcacttttcagaatatagcgatcctgcttttgatcgcattggcattgactccggcatttaagatgaaattctggaatatcggcggtgagggacaggtgctgatcggcgggctggcagcagcagcctgtatgatctgtctgggagataagcttccgaacgcagttgtgatcctgtgcatgatcgtggcaagtctggcagcaggagccatctggggcttcattcccgcatttttcaaggcgaaatggaataccaatgagacgctgtctacgctgatgatgaactacatagctactcagttggtggcattttatacgatagtatgggaggttcccaagggatccggtaagatcggtatcatcaaccagaacaccaatgtgggctggctaccgcagatcttcggctccaaatatctgttaagtattgtagtggcagtagtgatcacgatatttatgtatgtatatttgaactacagtaagcagggatatgagatctctgttgtgggtgagagcgaaaatactgcaaaatatgtgggtattaaggtggaaaaggtaattatccgtaccatgcttctgtccggtgcactgtgcggactggtaggcctgcttctggtaggaggcatcaatcatactgtgactaccacgattgcaggtggacagggatttaccgctgtactggtatcctggatgtccaagttcaatcctctgaccatggtattctccagcttcctgatcatattcatggatcgcggagccagtgagatctctaccaattttggactgaatcattcttactccgatattctgacaggtattatcctgttctttatcatcggctgtgagttcttcattacttacagactgcagttccgtaaaaaagcagaaaaggaggaacagtaatcatgtggtcatttttacttgcatttattccgagagcaatcgtacagggaattcctctgttatacgggagtaccggtgagatcatcacggagaagtccggtaatctgaatctgggaatccccggcgtcatgtatgtgggaggtatctgtggtgtcatcggatctttcttctatgagagatccgcaggagacgcggcgaacatgaatgggtttcttgccattgcgattccgatgctctgctgcctgttaggatccctgttgatgggattgctgtactgcttcctgactgtcaccctgcgggcgaaccagaacgtgaccggtctggcaatgaccaccttcggtgttggcttcggtaacttcttcggcggatccctgatcaagctggtaaacagtgatgtaccttccattgcactgtctgctaccagcagttatttcagtaagtcccttccttttgcgggaaaacttggctggtttggtaagctgtttttatcctatggattcctggcttatctggcagtgatcattgcgtttgcggcatcgtatgtcctgagtcataccagaacaggcctgcacttaagagcagtcggtgagggccccaataccgcagatgcagccggtatcaacgtatcccggtacaaatacatcgctacctgcgtgggatgtatgatcgcaggtctgggcggactgtactatgtaatggattatgcctgcggcgtctggtccaacgatgcctttggtgacagaggctggcttgccatcgcactggtcatcttcaccatctggagaccgaatatcagcgtattcgcatccttccttttcggcggactgtatatcctgtatctgtatctgcccaccggtatcgagcatatggagtaccaggagctgtataagatgatcccttatgttgtgaccttactggtactggtcatcaccagtatgcggagcaagagagagaatcagccccccgcaagtctgggactggcgtacttcagagaagaaagataataattttatagaaagacgattaaaaacggcgttttccggaaatttccggagaatgctgttttttagtgcacattttggaaaaaactcacagaaactttaggaaaacttttgattttattcggatggaatttacctgtgtctgttatgctgagatcaattcagagaaaataaacggaagggagaaaaaagatgaaagtattgatcacaacagactggtacaagccggccatcaacggagttgttacttcggtatgcaatctgcgggaggaattacagcaaagaggacatgaagtgaagatcctgaccttgtcccgtacagctcgttcctacgaagaagagggtgtgatctatatgggttccgtgaatgccggatatatttatccgggagcaagacttcgggtgtccccgggacgcgaactgtatcgcgggattatagagtggaatccggatattgtacattcccagtgtgaattttctacctttttcatggcaaaaaagatcgcagaggaatgtaagatccctctggtgcatacttaccatactgtatacgaagattatacccactatttttccccttacaagaaatggggcagggatatggtacagttcctgacgcgacagatctccgagaaggtggacagtatgatcgctcccagcacaaaaatagagacattactaaaagactatggcattcattgtccggtatcagtgatcccatcggggattgatctgagtaaatatgacgcgcagacccggacggattcccgggagagaatccgaagaaaatataaaatggaccggaagaccacagtgcttttatatgtaggtcgtctggcaaaagagaagaatgtggaagaattgctggagtaccagcagaaagttcaggagagcggcacaatactgatgattgtaggcggcggtccttatttggagactttacggaaaaaggcagcagagctgggtgtgacgggaagcgttatttttaccggaatggtatcacccgctgaagtagcatcttattatccggcaggagatctgttcgtcagcgcttccaccagtgagacccaggggcttacctatgcggaagcactggcagcaggattaccgttattatgcagaagggatcaatgcctgcgggcggttgtggaagagggaaaaaacggctggcagtaccggaccgaagaggaattcttgaaagacctgaagaactggaaggagaaagaagacgatgaacgcagaggaatgtgcagttatgcaaaacagtccgcagaaatattttcccaaaaaagatttgcgggaagtatggagcaactataccagcgacagatcgaagaaaaacaggtcgaaagagaaaaacacctggcaaagggccatcaatattgcatcctgggttagtctgatcctctgtggaatactggcagtctggggctatcagagcggcattttccaatcggtggagaccatgcagcagtttgtgaaccgcttcggaatgatcggtgcactgatcttcgtgctgatccagatcgttcaggtggtgtttcccatcataccgggtggcatcagctgtctggcaggagtgctgctctttggagtggtgccgggatttttctataattatataggaatcagtgtgggttcctgtattgcttttggaatagcaagaagtctgggaagaccggtgctgtacaagatgtttcccgggaaaatgattgaaaaatacctgacatggacggagttgaaggggagatttttgaaattatttgcactggcaatcttcctgccggtggcaccggatgattttctctgttatctcgccggaacaacgaacatgacatggaaacagtttgtgacagtcatctttctggggaagcctttctccattgcgctgtatagtctgggactgacgacactgttccaggtgattttccacctggtataggagagtatacttatgaaaatttatatatataaaggcggactttcactggtggcaaaaagcggcgtcggcagcgccatccgccatcaggagaagatgctgcgagcagcaaaagtgaccgtgacggacgtctggaaagaggcggatatcgtacagatcaatactgtattgcctgattcgccgctgatggcacggcgggcaagacggcaggggaaaaaggtcgtctattacggacattccaccatggaagattttaagaattcttttatcggttccaatctggcggctcctttattcaaaaaatggatccgccattgttatagacagggagatgtggttatcacaccaacggaatactcacggaaattgttaatgaaatatgatctgcatcgggagatttatgcactgaccaatggtgtggacactgaatttttccacaaaacagagcaggcaggtggacgattccggatattttttcatcttcctgtggataaaaaggtcgtgatatccgccgggcatctgattcacagaaaaggaatcgaggattttctggaaatggcaaaaaggatgccagacattatttttctatggtttgggggcgggaacaatgcgttgattccggcagagatcaaaaaggctgtggcagagaagccggaaaatgtgatctttgccggtttccaatcgtccgggatcctgcgggatgcgtactgtggtgcggatgcatttgcttttttcagttatgaagagacggaaggaatcgtggtattggaggcattatcctgtgagattcctgtgatcgtgagagacattccggtgtatgaagggtggcttaccgacggcgagcaggtgcgcaaagccagcaatctggattcctacgagcaggcagtccgagacatcttgtatgaagaaccgcgggaaaaagtaagacgcagaatccgggcaggcagggcactggcggaggaacacagcatgcgggcgacaggtgagaaactgtatcagatagagcagaagcttttgtagacatccctcttgcaaattcagagtctttatcataaaatgagagtaccttacaaaggaggtgcttacgatgaaccttgtaattactatcagccgaagattcggaacaggagccagtctgatcgcacaggagttgtctgagaagttgggggtgccggtgtatgataaggcgtacatagagcatgagctggatgatgacagttatgctacggaagcggaggttattaaggggttggcggaacatccctgtattattctgggacgctgcgcatctgagatcctgaaggatcagccgaatgtatttaacgtgtatgtgtgcgcagataaggaagatcgtatcgaacgtatcatgaagaaggaaagtctttcccacgatgaggcgaaggaaatgcttgagaaaaatgatgcagaacgcgccgcctattattatgagaataccggtaaggtgtggggcgatgtgaacaactaccacatgatcctggataccactaagctgggaatcgagaactgcgcggatattctgatccggtattttgagagagtggaaatcatttgatagaataaacttacccatgaaaagccctttcggacagcttgctgtcaagaagggctttttatgcgggaagtaaacgaacatgagcaagtaggacgatagtccggaatgcgaatgggcgttacgatttcgagagtacgcagtacggagaaatcgtttagactatgaatagtgtataaatgcgaaacagatgcccaatacggacatctgtttttgtatatacaagaatcggttattaatagatgcttgtacagaaatcggtatctggcaaatatataataataaaatcaatcaataacgtaacaacacaaagttaaaaatatatttttaaatataacaaaaaatgatatatgcaattaaaatttttaatcaaattataaaacgagagaaatacggaataaaatagcatttttccagaatttataggtatatgacaaaaatgtcacattaaaatacatcaattaacaagataagaacataacttgcttacagaaattatgagtgttaagatagtgcaatcagataagtaaaaatagtaaaaataacaggttttgaaaataaaaagtaatcatatggcaggaggatttccatgaacagcgcagacatagcagcaaaatatcagaaaacttattatatgccccccgaggtgacctacgactgggtgaagaaggacagcattaccaagccccccatctggtgcagcgttgacttgagagatggtaaccaggctttgatcgatcccatgagcctggaagataagctggaattcttcaagctgttggtaaagatcggtttcaaggagatcgaggttggttttcctgcttcttccgataccgagtacaattttatccgtgccttgatcgaacgcgacatgattcccaatgatgtgaccattcaggtgttgacgcaggcgagagaacatatcatccgcaagacctttgaagcggtaaaaggtgcgccccacgcagtgatccatctatacaactctacttccgtagagcagagagaacaggtatttaagaaagataaagaagccatcaagaagctggcagtagacggcgcccagatgttaaagaatctggcagacgagaccgaaggcaacttcacctttgagtacagccctgagagcttttctcagaccgaggtggattatgcactggaagtctgcaatgcagtactggatgtatggaagcctaccgctgaccgcaaggccatcatcaatctgcccaccaccgtacaggtggcaatgccccatgtatttgcctgtcaggtagaatatatgcacaagcatttgaaatatcgtgacaatgtagtactcagcgtacatcctcacaatgacaggggctgtggcatcagtgatgcggagttcggcgtactggccggagcagaccgtgtggaaggtactttgttcggcaacggcgaacgtaccggtaacgtggatctggtaactgttgcactgaacatgatgtgccacggcgtggacagtggactggatttctcccatattatggagatccgcgaagcttatgagaacttcaccggcatgaaggtacatgaaagagtgccctatgcaggagatctggtatttaccgcattttccggttcccatcaggatgccatcagcaaaggtatggcatggcagaaggaaggcaagaccggcaagcgttgggatatcccttatctgcccatcgatcctgcggatgtgggaagagagtacgaatccgatgttatccgtatcaacagtgtatccggtaagggtggcgtagcgttcgtattgaagcagcagtttggcttctcgctgcccgcagccatgaaggaagaggttggttaccttgtgaaaggtatttccgacagacgtcatcaggaattacttcccaaggagatctatgcgatcttcgaggaaaattatatttatccccgcagcatcttcaacattccggagtgccacttcaaacaggagaacggcattcaggcagaggtgactatcgagcagggcggagcttccagagccattactactatgggtaacggacgtctggatgcagtcagcaatgccatcaagacatactttggtattacctacgagttgtctgtatatgaagagcatgcaatttccagaggctccaattccaaggctgccacctatgttggtatcgtccatgacggtaaattctactggggcgtcggcgtagatgaagatattatcaagagttctatcgccgcactggtgtccgcggtgaataagctggcagcagaacagcatattacctccggcagagaagagcggatcgtggagatcatcagtttcatccagaagaactatgtggatgtgacactggatatgctggtagatactttccatctctccaagccttacctgtccaagtacattaaggaaaaggccggcatgaccttccaggaggtcgttcgggaagagcgcatgaaaaaagcaagaatgctcttaaaggagaccaatcagacggtggagaccattgcagccaacgttggttacgagaatgtggagcactttaaccgcctattcaaaaaggcatatgacatgactccggtacagtatcgaaaacagagcgcggaataaagtacgccgtggaactgcgccatgcacattcgtagacgtactgcgtctacttcatgtacggctgtcgccgtataaatccaaaaagaaaagcacgtcctcgtgagcaagctcccagggcgtgtttttctttttggatttgcatggctcgtagcttttaacataatgacaggtttggaaaacataaataaatagaaaaaaccgtttttttttattatgatgaaaacatagagcaagagaattcgcagtctggcattccgccggagcgtaacgaaagaaaacataaatgtaagaggcttacatcgtaagcagacaggagtagaaaaatggaaatgaaagagacgattctgaaaactttcgcagaagtatttggagatgcagagggcaccaaggcttattttgcaccgggacgtgtgaatctgatcggtgaacataccgactataacggcggacacgttttcccctgcgcactgaccatcggtacctatggtgtggcaagaaagagaaacgacaataagctgcgtttctattccatgaatttcggacatctgggagtgatcgaatcttctctggaggatctggtacccagcaaggaagcaggctggaccaattatcccaagggagtgatctgggctttcggtgagaagggcatgaaagtgacttccggtatggatctgctgctgaacggtaatattcccaacggttccggactttcctcttccgcttctgtagaagtgctgaccggctatattctgagagatttcttcggatttgatgtgaccaatcaggatcttgcactgatcggacagttctccgagaacaaatacaacaaggtaaactgcggtatcatggaccagtttgccattgccatgggcaaaaaggataatgctatttttctggacaccgcaactctggaatatgagtacgcaccgatccatctggaaaatgcgaagatcgtgatcgcatgcagtaataaaaagagaggactgggagattccaagtacaatgagcgccgcagcgagtgcgagactgcactggcagaactgcagcaggtagtgaagatcaagactctgggtgatctggacgaggagactttcgagaagttcaaagctattatcaagagcgatgtccgcagaaagcgcgcaaagcacgctgtatatgagaatcagagaaccgttcgtgcggtagaagcgctgaagaacaatgatgtgaagctgtttggtgagctgatgaatgcttcccatgtatctttgcgggatgattatgaggtaacaggtatcgagctggatactctggtagaagaagcatggaaggtagacggtgttattggttcccgtatgacaggtgccggtttcggcggatgtaccgtaagcattgtaaaggatgaggctattgacacctttatcgatcaggtaggcaaggcatataaggagaagatcggttatgcagctgatttctatgtagtagagatcggtgacggcccccagaccctgtaagaaattaagatccgacgagaatagagagtgcgatgccggagaaatccggtattgcagaatggagaaaaaatggatattcaggtattaattcgtaaattggtatcctacggagtacagacaggactggttccggaggaagatgtgatctacacgaccaaccgtttgttggagctgtttgaactggatgaactggaagagcgcgacaatgtgaccatgcgtgaggatgaactggaagaggttctgaagggtatgctggattatgcttacgaaaaaggcattctcaaggagaacagtgtggtgtatcgtgaccttttcgatacgaagatcatgggcatgctgatgcccagacccagtgaagtaatccgtcatttccacgaactgtacgagcaggtatctcccgaggcagctaccgactattattacaaattaagcagagattccgactatatccgccgttatcgtatctgcaaggatatgaaatgggtagcacccaccaaatacggcgatctggacattactatcaacctgtccaagcctgagaaggatcccaaggctattgctgcagcgaagctggcaaaacaggccggttatccgaaatgcctgctgtgccgtgaaaatgaaggttatgcaggccgtgtgaatcatcccgcccgccagaaccaccgcatcattccggtgaccatcaatggcagccagtggggattccagtattctccgtatgtatattataatgagcactgcatcgtatttaactctcagcatgtgcctatgaaaatcgagcatgcgaccttctgtaagctgtttgatttcgtaaagcagttccctcattattttgtaggttccaatgcggatctgcccatcgtaggcggttccatcttaagccacgatcatttccagggtgggcattacgagtttgccatggcaaaagctcctgtagagagaaccttctctgtagccggtttcgaggatgtggatgccggtatcgtggcatggcctatgtctgtcatccgtctcagcggtacggatactgatcgtatcattgcactggcagatgtgatcctgaacaagtggagagaatatacggatgaagaggcatttatctatgcctacaccgataacgagcctcataacaccatcactcccattgccagaaagagaggagacaagttcgaactggatctggtgctgcgtaacaatatcaccacagaggagcatccgctgggagtctatcatccccatgcaaagctgcatcatatcaaaaaagagaatatcggcctgatcgaggttatgggtctggcagtactgcctgcccgcctgaagggtgagatggcgcatctgaaggaagcaatcctcgccggtaaagacttaagagctgatgaggaattggcaaagcatgcagactgggtagacgagttccgtccgaaatacgatgccatcactgctgagaacatcgacggtatcgtagagaaggagatcggtctggtattcatgcaggtattggaagatgccggtgtctataagagaaccgaggaaggacagaaggctttcgaccgttttattaaatgcttgtaataatagttcagccatagaatgacagaaccggcgattgggtgcttgcacacaaagcgacggagagcgtgataacgcgactttgcgaatggcgcggtctgaacgtttgttgtaaaatgtttgttgcgaggaaaaggaattgtggtgacacaattcttcagactgtagacaaagctccttcctgtgagggagctttgtctacagtctgtttatttaccgttatcttctcttttccgaatcatgcctcttactttttatagtaccatcttcctgtatagggtgtaagtcgtcactgatggttcgtataaataattttacgcgtttttgctgtattttttaaggcgcaagatttgtataattccgataattgtagtatactgtaggaaaaaattttcgtaacacatcagttcaccatgtattacagaaaagaggttatatttcaaatgaaaaagcaaagcaaagtaaccagtcagtctgccatgctgcagcaaaacacaagatcaacctatcggatactgatcatcagcatcgttatgctgatcctgttcatcggatccaacatgtatctgagccggatcaattcccagcagctggaagctaccatgtatctgaaccagtatcgtctgggttccaagacgctgaccgctgccgtacagtcttacgcagtcaccggagaccagacctactatgacaattatatgaaggaattaaacgaggacaaaaatcgtgacattgcctgggaaggtcttcagaaagacggtctgaccgacaatgaatgggcactgttaaaccatattgctgaaatgtccaacggtctggttcctctggaagaagaagccatggataaggccggttccggagatacacaagcagctatttcttatgtatttggtgaggaatatgaatctaccgtacaggagatcactgcaaccacagataattgtatcaatgatatccaggcacgtatggctcagaagcaaaatactctgaatctgataatgatcactaccatggtgattttcattctctgcttcctgaccattgcccgcaagattgtcaccacactgacctttgcaaaacaggaactgctgattcccattgtaaaagtatccgagcagatgaaagtacttgcgcagggacattttgacagccgtctggatctgccggaggatgacagtgaagtcggcatcatggtgcaggccgttcatttcatgaacgacaactttaccaagatgatcaccgagatttccgagatcttaggtcagatgggtcagggcaattaccgtgtagagcctacggaagaatatgtcggtgactttgtacagatcaaggattccatggtgaagatcattgccgatatgaagaagacactgtccaccattcaggtcagcgcacaggagatcgatggtggttccgagcagctggcacaggcagctaccgatctggcagaaggctgtaccgcacaggcctccaagatttccgaagcatcccagatgatcgacgctatggcaaagagtattgaagaaaaagccagagttgcacaggagaccgcagatatctccaagcagtccgcacagacggttgctgatggcaatgccaagatgcaggaactgaaagtcgcaatcggtgagatcagtaaatgttccgaggagattcgttctatcattcaggtcattgaggatatcgcttcccagaccaacctcctgtcactgaatgcctccatcgaggctgcccgtgccggagaagcaggccgcggatttgctgtcgtagccgagcaggtcaagaatctggcggaacagtccaccgaggctgccggagagaccacaaagctgatcgagagcaccatcgatgctgtcaacaagggaatcgccattgcagaagaaaccgaagccagcatggatcaggtaatggaagaagccgaggcttctaccaagcgtatggatgatatggcacaggcccttcaggctgaagtgtccagcgtccagcagatcgatgaaaacatcgctcatgtggccggaatcgtggacaacaactccgcatcttctcaggagaccgccgctgtcagcgaagaacagtccgcgcaggtacatactatgttacagctgatgcatcagttccagatctagttttcagaatgataaagcctgagtgcttctaaagaagcctcaggctcagactgtagacaaagctccttcctgtgagggagcttttcttgtgtcatgactg

SEQ ID NO: 424 - DNA, 14126 bp, unidentified
  source 1..14126: mol_type = unassigned DNA
atgtatttaaagagtcttgagatccagggattcaaatcatttgcaaacaagattgattttaaatttcataatggcattaccgggatcgtagggccaaacggaagcggaaagagcaacgtaggagatgcggttcgctgggtacttggtgagcagagtgccagacagctgcgaggaagcaacatgcaggatgtgattttttccggtacggaaaatcgaaaaccgctcggctttgcgtcggtttcgattacactggacaacgccgaccacaaactgccggtggattatgaggaagtgacggtcagccgccgcgtctaccgctccggcgagagcgaatatcgtttaaacggaacttcctgccgtctgaaagatattcaggagattttctacgacaccggtatcggaaaagagggttactccatcatcggccagggacagattgaaaagatcttaagcggcagaccggaagatcgaagagaattgtttgatgaggcagccgggattgtcaagttcaaacgaagaaaagcggcagccgtgaaaaagctggaggatgaaagagcgaaccttgtccgcgtaaacgatattctctcggaacttcagcgtcagctggttccgcttcagcatcaggcagaacaggcaaagatctacctgaagaaaaaagaagaattaaaaaagatcgatctgcatctatttctgctggaaatggagcagcggaaagcagaacttgcgaatctggatgaaaaacgaaagattgccgaagaacagctttctgatataaagaaagaatacgagacgatccgcatccattatgaaacagaagaaaaagcgatcgaggagctggaagagcggatcgagcagatccgggaacaggagcgacaaagtcagttgctccaccagcagctcaccggtcagatcgaagtcctgaaagagcagatccgggcacaggaggatcaggaagtccgcttaaaagagcgaaagagcgtgatcgagagcgaactttccagaaaagaaaaacagagaaaagcggaagaacaggcgtttttgcttgcaaaggaaaaacaggagcaggtttctttgacggaagcggactatcgcctggaagcggatgcgacgacggcgatgctctcccatctggaaatgcagatcgaggacgggaaaaatgaaatcatttcacttttgaatcagcgtgcttcggtgaaaggaaatgttcagcgatacgataccatgcaggaacagatgcagatccgaaaagcagaagtaaccggaaagctccttcggattggcagcgaagatgctagatggcaggagacgcttcaggaatatcagactgtctacgaaacggtgtcggaagagattgaaaaacagcttcgaaagagcaaagagcaggaagataagattgaacagctccagcagaaactggcagggcagaaccgggaactggaacagaaacagtctttctatcaccgggagaaatcaaggcttgagacactgagcaatttaacagaacgctatgatggatacggaaacagtatccggaaggtgatggagcagaaagacaaaaatccggggatcctcggcgttgtagccgatctgatcaaagtagaatcttcttatgagacggcaatcgagacggcacttggcggcagtatacagaatattgtgacggacagggaagagaccgcaaaacgcatgatcgaatttctgaaacgtggcaaatatggccgggctaccttccttccgctgactgccatcggaagaaaaggaaatgcaggaaacaaagatgccgtgaaagagccggggattttgggcgttgcgagcactctggtccggacagaagagaaataccgtgcactggtggaataccttcttggcaggacacttgtcgcagacaatatggatcatgcgatcgcagctgccaggaaatatcaccattctctgcggatcgttacgctggaaggagagtctttaagtccgggcggttccatgacaggtggtgcctaccgcaacagcagcaatcttctgggacgcagaagagaagttgaagagctgcaaaagaaagtacaggcactggaaaaagaatggaaagaattgcagctggaagtcgatgaaaaccgaaaaaaaaggaatgaacatcgcgaaacagttgtaattctgaatgaaaagcttcagaaagcctatgtttctcagaatacggcacgcatggagatccgccagatggaagaaaaacgggaagaatccaaagaagagctgacaaggcttcaggaagaatctgcccagttagacggcgaattaaagcagatcagccgggaaaaagaacagatcgaagaagctgtgaaagagtctgaaaaaagagaagcacagctgcaggaacagatcctgggatggcagaaagaacaggaagtccagagggcggagctggagcagcagaatgcccgcattgaaaagctgcatctggagcttgcaaatgccggacagaaagaagaatttgcagggcagaatctcaaacgtatcgaaaaagaaatccgaaatttaagggaagaagaaaaagagatcgggcagaaaaagcgggaaagtctggatgtcattgcagaaaaagaagcacagatccggcagattgaaagccgcattgcaggtacgaaagaccatggacgcgatcatggcaggcagctgcagaagcttcaggcacaaaaagaagagaaaagtgcggcacagaaaaccttttttacaaggcgggaggagctttccgggcagatcgcagatctggacaaagaaaacttccggcttgcatccatgcaggaaaagcttgaaaatcaaaaagaagagcggatcagtcagatctgggatgaatatcaggtgacaccttcggaagctgctgcgttccggaacgaaaacggcatggatcagaagcagaccagaaaacggatcgaggagatcaaagcagcgatccgccagatgggcaacatcaacgtcaatgcgatcgaagattacaaagagatgtcacagcggcatggatttcttcagaatcagcacgatgatctcatcaaagcagagaaagctttagaagagatcattctggagctggatgaagggatgcggaagcagttccgggagaattttgccaggatccaggtggaatttgacaaagctttttgtgaattgttcggaggcggcaaaggaacgctggagcttgtggatgatgaagatattctggaggcaggcatccggatcatctctcagccgccgggcaaaaaactgcagaatatgatgcagctctccggaggcgagaaggccttaacggcgatcgccctgctttttgctatccagcacctcaaaccgtccccgttctgtcttttggatgagatcgaggcggcactggatgaggcgaatgtcagccgctatgcaaattatctgcacaagttgacaaaaaatacacaatttattattattacacacagacgcggaacgatggcagcggccgaccggctgtatggcatcacgatgcaggaaaaaggaatctctgcactggtatcggtaaatctgatcgaagaggcactggatcagtgagaaaggaaagaagatgggtgagaaaaaaggattttttaagcgcctagtagaaggactgaccaagacaagaaacaatatcgtttccggtattgattctattttcagcggattttccgcaatagatgaggatttttatgaggagatcgaagaaatcctcatcatgggagatctcgggatcaatgcgacaaccgcgatcatagaagatctgaaacagaaggtgaaagagcagcacatcaaagagccttctgcctgcaaacagcttctgatcgacagcatcaaagcccagatgaatgtcggtgagacggcgtacgagtttgaaaaccgtcagtccgttgttctggtgatcggagtcaacggtgtcggtaagacaaccagcatcggaaaactggcaggaaaattaaaagaccagggaaagaaagtaattctggcggcagccgatacgttccgtgcggcagccggagaacagctgaccgaatgggcacaccgtgcaggagtggagatcatttccggacaggaaggatcggatccggcagccgttgtatacgatgcgatccaggcatccaaagcacgtcatgcagatgtattgctctgcgatacggcaggacgacttcataacaaaaagaatcttatggcagagcttggaaaaatcaaccgtgtgatcgaccgggaatatccggaagcttaccgcgagacactggttgtgctggacggtacaaccggtcagaatgcacttgcacaggcaagacaattttctgagattgctgatattaccggaatcattcttaccaaattggatggaacagccaaaggcggtatcgccgttgccatccattccgaacttggtatcccggtgaaatatattggcgtgggagagagtattgacgatctgcagaaattcgatgcagacgagttcgtaaatgcactttttgatgtgaaagattcagaagaagaggagtaaagacatgcttacattagacaaatttgaagaagcttcagaaatcgtaaaaaaagcaacacaggagacaaagctgatctacagtaaatatttcagtgagcagacaggaaacaaagtttatctgaaaccggaaaatatgcagacaaccggtgcttataaagtaagaggtgcttactataaaatcagcacactgagcgaagaagagagacagaaaggtctgattacagcctccgcaggaaaccatgcacagggcgttgcctatgcagcaaaagagtttggtgcaaaggcagtgatcgttatgccgacaaccacaccgctgatcaaagtaaaccgcaccaagagctacggcgcagaagtggttctctatggagatgtctatgatgaggcctgtgcctatgcactggaactggcagaaaaagaaggctatacctttatccatccgttcgatgatccggctgttgcaaccggtcagggaacgattgcaatggagatcatcaaagaactgccgctggttgattatatccttgttccgatcggaggaggcggactggcaaccggtgtctccacactggctaagatgctcaacccgaacatccgcgtgatcggtgtggaaccggcaggggcagcctgcatgaaagcttcccttcaggcaggagaagttgtgacactgccaaatgtcaatacgatcgcagacggcacggctgttaagacacctggtaaaaatgtgttcccgtatctgcagaaaaacctcgatgatatcatcaccattgaggacgatgatctgatcgttgccttccttgatatggttgaaaaccacaagatgatcgtagaaaactccggacttctgaccgtggcagccctgaaatatctggatgtaaaagacaaaaaagtggtatcgatcttaagcggcggaaacatggatgtgatcaccatgtcttctgttgtacagttaggtctgatccagagagaccgtatctttaccgtatctgttctgcttccggacaaagcaggagagctggttcgtgtggcaaccgttattgcaaatgaacagggaaatgtcatcaaactggatcacaatcagtttgtaagcacgaaccgcaatgcagccgtagagctgaagatcacactggaagcatttggaacggatcacaaagagcgcatcgtcaatgccctcaaagagcatggctataatccgaaagtgattcgcccgaatctttaaaaggaggggagcaatatgaaaatagcagtagcgggaacgggatatgtagggctttccaatgccctgctgctctcccagcacaatgatgtgtgggcagtcgatatcctgcaaagaaagattgatctgatcaataaagggaagtcaccgatcgtagacagagaaatcgaagaatttctggcaagagaggatctgcacctgacagcaacgacagatgcagaaaaagcttataaggatgctgattttgttatcattgcaaccccgacgaactacgatccgaagaaaaattatttcgacacatcttcgatcgaaacggtgatcgaactggtacagaaggtgaatccggataccgtgatggtgattaaatcaacggttccggtcggctatacaaaaggaatccgtgaaaaataccatacagaccatattctgttctcaccggaatttttaagagaaggacatgcactgtatgataatctgtatccttcccgtattattgtcggatcgccggagaatcagcgtgacaaggcacatgcatttgccgcacttcttcaggaaggggcgatcaagcaggagatcccgacactctttaccgatcttacggaagctgaggcagtcaaattgtttgcaaacacctaccttgccatgcgtgttgcatttttcaatgaactggatacttatgcagaggtaagagggcttgacagtaaacagatcattgaaggagtaggactggaccctcgtatcggcacgcattataataatccgtcttttggatatggcggatattgtcttccaaaggacaccaaacagctgcttgcaaactatcatgatgtcccaaataacatagtggcagcgatcgtagaagcaaaccgtaccagaaaagattttattgcagagcgcattattgaaaaaaatccaaagattgtaggagtataccgcctgacgatgaaaaccaattcagacaacttccgccagagctcgatccagggggttatgaagcggatcaaggcgaaggggatcgaagtggttgtatatgagccggcaatgaaagaagaaacgttctttaactcccgagtgatccgtgatcttaaggagtttaaagaagtaagcgatgtgatccttgccaaccgctgcagtgatgagattgcggatgtcatggacaaagtctatacaagagatctgtatttcagagactaaggaaaaatgaggagagataaataatgaaattaattatacaggtgccatgttataacgaggcacagacgctggaaattgcactgaatcatctgccaaaacatatcgacgggatcgatgagatcgagtatctgatcatcaacgacggaagccgtgacgataccgtcaaggttgcaaaaaactggggcgtgaactatgtagtcaatttccggacgaaccgcggactggcaaaggggttcatggcagggctggatgcctgcctgcgaaacggtgcggatatcattgtcaatactgatgccgatgatcagtactgcggagatgacatcgaaaaactggtgcgtccgattctggaggaaaaggcagatattgtgatcggtgaacgcccgatcgatgatactgagcatttttcaccgctcaagaaaaagcttcagcatttcggaagctggaccgtgcgtgtggcatccaaatccgatattcctgacgcaccgagcggtttccgtgcttatagccgtgacgcagcgatgcgtctgaatgtaacaaatgaatatacctacacactggagacgatcatccaggcaggacgcaccagaatggcaatggagtcggtgccgatccggactaatccggagcttcgtaaatccagactgttttccagtatgtttggttatgtgaagcgttccatggtgacaatcgtccgttcctttatgatgtacaaaccgctgcggttcttcctcgggatcggcagtgtgctctttctttgcggggcactgcttggtgtacgatttctgttctattatgcggcaggatccggaaacggtcatgtgcagtccctgatccttgcaagtatcctgatgctgatgggcttccagaccggcgtgatcggactgctggcagacatcattgcggcaaaccgcaagattttggaagatgtacagtatcatgcacgtaaactggattatgacagagagaaagaggaaaaataaaatgacaatgacgaaacaggacaggatttgtatgatctcactgtttgcggtaatgctggtgcttatgggagtgccggcattatgtctgagtacgaacaccgttgtggatgaacttggtactctgactaacacagcccttttgaccggaagaaactggggaacagggattataagcaatggtggattttattatcgttatggaatggcgtttgtgtggcttctgccgtttctgatctttaaagatccaatcatggtttacaaagccgcatcttttgtgaatgctttgtttatggcaacgacaccggtgatggcttattatatcagcagacgttacttaaagattgaaaaagaaaaggaagcggctcttctggcagccggttctacgatcatcagcagcgtgatgttccaggggatctatcttcgcggagacatgatgctgatcgtgctcaactgggtttgtgcacttcttattttaaatgcaatgtatgcaaaaaccagaaaagagcggcagatctatacgatactgctgagtttctgtgcagtttatgcctatgcatgccacagcagaggaatcgttatggtgatcgcgacggcgatgacggtattgctgatcccgttttttacaaaggaaaaagagagaagacttccgtacatcagcttttttggcagcatggcagtctttcttgtgatcgacaagattctggtgcgatattttaaacgaaccatatggggaagcagagcggcacatgcgaccggaatcccgaaagaatctctggaactgctgacaaaaataaaaggtatcaaatcttatattcgaatggcggtcggatggctgtataattctttcagctcgactcttggactggtatgcgtgggtctgatcgcctgcgtgatcatcgtatttctgatgtttcgccgttcgaaaaaggtcacatcggaagaaggcacactggcactgtttggattcttatcttatgcaggaagctttgttctcggaacggtattcttcctgaagagcgtcaaaaagaacttttacagttcttacggaatccgcgtggaccgaatcgtatacgaccgctatgtctgctgtgcattcggtgttctctgcatggtggcactttatgttctggtctggaaaagagatctgtttggcattaaggcaaaactgctttctgtggcaggatgcggtgttaccctggtactgtttgccagaatcactgccccatatctgaacaaccagagttttgtgcggaaatatatgggaatgttagttacctttgttaagaccaatgcaaaaagcgtgacattcaaaggagatcatgtatcaagcggggtaatcctgtttggcgttgtggcactgatcctgtttttattgatcctgtttctgtgtcagaaaaagaaaggataccaggcatgtgccctgaccttgcttgtctcggtactgctctttggctacaatgtaacaaacattacgatttccgaaagcaatacaagagaagcgagaatttcttccgcctcaaatctgattctgtccttcggagatatctataaagaatattcttatgtatggacagaaaaaacagcggcaccgatcaaatcgtatcaggtgcgtctgatggattatcatctgatcagcaaaaattatcagggttttgacgaaacagacaacgtgtttgtgatttcaaaacatctaccggatgaaaaacagtttcagaacggtgagtactatctgatcgacagcgaagattacaacaaaaaagaagactttgtctatgtcaaaggaagcgaactgaaagatgcactggagaagagaggtgtttctctgagtgcttatacaggatgacagacgggaggaaagtatgaaagaagtggtgatcgccattacggcagccagttacagcggaaacaaaggagcggcagcgatgctgcaaagctccatccgtcagctttatgaaaaatatggaacacgtttgaaaatcaatctgatgtctgtttatccggaagaagataaagaacagatcccgtgggattttatccggatcgtttcctgtaaaccggaacagcttttgtttatcgcgtttccgctggcagttctctataaagtatttcattttctgcctccggtaaagagtctgcttttgaagaataaaattctgcgggcatattatgagacggatgccgttctggatgaagcggggatctcttttgtggacagccgcggatttgtgatgaatacttatggttttgtgtgtgcggccgtgccgatgctgatgggcacaccggttctgaaatattctcaggcaatgggaacctttcactctttctggaatcgttttctggcaaaatggattcttccgaagatgcggctgatctgtgccagaggaaagggaacccttgacaatctgaaagggatcggcattgagaagaatgtaaaactctgtgcggacggagcgtttacgatggcagatgatccatattatctgaaacaggttgaagcagaagcacagaaggatgcctttttcaatgataaagtggttggactgtcgatcagctcggttgttcggaaaaaatgtgataagctcgggattgattatccgaagatcatgacggattttattgaccgtctcaacgaggatggatggaacgtactgatcatcgcaaacggtgcgagaatacacagcgacaaaccgcgaaacaacgatcttccggtctgcgatgcggtctatgaaagcgtgaaaaacaaagagatggtcagatggtaccacaaagaaatgacggcagaagaaatccgtgcgtacatcgggaaatgccgttttctggttgcttccagattccatgccatgatcggtgctcttcagcagaaagtgccggtgcttctggtgggatggagccataaatatcaggaagtgctggatttttttgagcttgggcagtatgcgatcgatttttccgatctgacggcagagtccctgcaaaaggaatttgagaaattcattcaggaagaagagacgatccgcggcaagctggatgaacattatgaagaagtcatggaaagttccaagaaaaacattgtttatgtttctgagattgtagatgaaatagtaggagaatgatcggttatggaagaaaatacacaggtaaaaaaagaagacgcggaaatcctagaaaacgaacagaagggcggaaagaagaaatggatgaaatatgccaagatcggatttttactgctggttgctgtttttctggttcgctatttttataaaaattatgattcctataaaaatctggacgttgagatcaactggctggtatttacgggagcggtgctgttttatttcctttataaagtgacactggcttctttatggcactatatcacaaagttaaatcactgttcaatcaagtatttcaaggcaatcacagcatatctgtattccattctcggaaaatacattccgggaaaagtttttatgctgcttgcccgcgtgccggcatacgaagaaggaggagcaccgatccggaaagtgacggtctgctttttccttgagaatatctgtacgcttctcggagctgcatttttgtttttggtttcgctgttcttttttccgaacgacctgctcaatgattacaaatggctgacgatcggtctggtgatcctgttttttatctgcatcaacccgaagatcatcaactttttcctgaagatccttgagcggtttattaagaaaaaagatctttcgattccgatcacctatgggcagatgatcaaagttgtattgctgtttatctgcaactggctggtcgttggtgtcggattctatatgctggtatgctccatctatccggttccgacatcagagtttctctatgtggccggaatttacggactgtcctgtatcatcggaattcttgctgtatttgcaccgtccggtcttggcgtaagggaaggtatcatgctgcttggacttggtcttgttatgccaaaagaatatgctgtgattatttctattatatccagactgtggcagactgttgcggaactcattttgattgcaattgcttttattgtaaataagattatggaatttcggaaaaaaaagaagaaaacagcttgatctgaaataaaaaaagaaaaagccatcatgtcaagaaaaaatacttgacacggtggcttctttcgtgtatgataaccaaggtgattgcagtggaaaagattttagagcagacattattgtatgatttttatggtgaactgcttacagagcatcaacagaaaatatacgaggatgtagtattcaacgatatttcctgcagtgaagttgcagagaatcagggaatcagcagacagggtgtgcacgatctgatcaaacggtgcggacatatcctggatgattacgagacaaaactgcatctggttgagagatttgtaagtctgaaagaaaaggtggaagccataaggatggcggcagatgatccggaagaagtaaggaagatttcggatgagctgctgaaagaattataaaaccgactgacggtggaggttacgatggcatttgaaagtttatcggataaactgcagaatatatttaaaaaccttcgcggcaagggaagactgacagaggcagatgtcaagacagcactgaaagaagtaaagcttgctcttctggaagcggatgtcagctttaaagtcgtgaagcagtttataaaagcggttcaggagcgtgcaatcggtcaggacgtgatgaacggactgaatccgggccagatggttatcaagatcgtaaatgacgagctggtaaacctgatgggatctgagacgactgagatcgcactgcgtccggcaagtgaagttactgtgatcatgatggcaggtcttcagggagccggaaaaactacaacaactgcgaagctcgcaggcaaatttaaatcaaaaggcagaaagccgcttctggtagcgtgtgacgtgtatcgtccggcagctatcacgcagcttcagataaatggtgagaaacagggtgtggaagttttctccatgggagacaagcagaacccggtcaatatcgccaaagcagctgtagaacatgcaaagagtcacggatttaatgtcgtgatcctcgatacagcaggacgccttcatgtcgatgaagcgatgatggaggagttacagaacatcaaagaagccgttcatgttgatcagacgatcctggtggtggatgcaatgaccggacaggatgcagtcaatgtggcagacagcttcaatcagaaacttgagcttgacggtgtcatccttacaaagctggatggagacaccagaggcggtgcggcactgtcgatcaaggcaacctgcggcaaaccgatcctctatgttggtatgggcgagaagttgtccgatctggaacagttctatccggagcgtatggcatccaggattttaggcatgggcgatgtgatgacgctcatcgagaaagcacaggccaatatcgacgaagacaaagccagagaaatggaacagaaactgaaaaaagcacagtttggtttcgatgattatctggagagcatggctcaggttaaaaatatgggaggcatatccagtatcttaagtatgatgccgggtattggcaataaagcagcagatatcgaggctgcggtggatgagtccaagatggcacgcatcgaggcgatcatcctctccatgacaccgaaagagcgttccaatccggatctgttaaatccgtccagaaagaaacgtatcgcaaaaggtgcaggtgtggacatcagcgaagtcaacaaactggtcaaacagttcgaacagacacgcaagatgatgaaacagttccctggtatgatgggaggcaagggtgcaaaacgcggcaggttcaagcttccgttttagcacataaagaatgcagagaagctgccaaaggcaggttttcatagatatcaaagatataaaaatactgaggaggtgaaagtaatggcagtaaagatcagattaagaagaatgggagaaaagaaaaatcctttctatagaatcgttgtagctgattctcgttccccgagagatggaagattcatcgaggagatcggtacctacaatccgaacatcgaaccgagtgaattcaaggtagatgaggagctggcaaagaaatggctggcaaatggtgcacagccgacagaggtagtaggaaagctcttcaaaatcgccggtattgaaaaataa

SEQ ID NO: 425 - DNA, 13831 bp, unidentified
  source 1..13831: mol_type = unassigned DNA
ttaatcatccagaacagaatctaaaatcgcaatcattttatccacatcgcttttttcaataataagcggcggaataaaacgaatgacatttgcgcctgcgctcatgaaaatgacgcctttttccaatgcctttgtaatataaggaccggcaggaacggaaagttccaagccacgcatcagtcccataccacgtgtctcaacagcaatttcttttttctccaccaatttctgcagacactcaccaagatactctccaacttcttctacatggtttggaatctctctcttttcaaaaatttccaatgtctttgctactgctgcgcaggcaagtggatttccgccaaatgtcgtgccatggtctcccggcacgagacattttgccacttcttctttcgcagcaatcgcacctaccgtaattccatttccgattccttttgccatcgtcacgatatccggcacaatatcgtatttttggtacgcaaacatcttaccggaacgtcccataccacactgaatttcatcacaaatcataacgatatcattttcatcacacaatttacggattccctgtaaaaattcagcgtttgcaggataaattccaccttcgccctgaacggcttccacaatgatggcatatgtattttctgtaaccgctgcttttacactctcgaaatcgttgtaatcagcaaatgtaacaccctgtaacatcggttcaaaaggctctctgtattttgccgtaccggtaacggacaatgctcccatgcttcgtccgtgaaatgctttattcatcgagataatctcatgacgattttcatgcccctgcataatggcatattttcgtgccattttcaaagcgccctcattggcttccgtaccgctgtttgccataaatacacggtcaagtccggttgcctttgcaagacctttcgctgcctgcaataatggctccgaataaaaatagttagaaaaatgaattcctttatcaatctgtgctttcaaagcatctgtgtattccttatctccatagcccaatgcacaaacggcaattccggcaccaaaatccaaatattcttttccgtctgtatcgtataatttcacgccatctccatgatctaacacaaccggataacggttatacgaatgaactaaatacttctctgattcatctatcatctgtttcatatcacatgctccttcctaatcctgctcatgcggatacaatgttgtgtggttatcaataattgctgtaccaataccttttttggtaaagaactcaagtaacagacaatgctgtctgcgtccgtccagaatatggacacggcttacaccttcttctaccgcttccacacagtttcttattttcggaatcataccaccgccaatggttccatcctcaatcaactgttttgcctcatcagttgtcaatacagaaatcaatgtttccgggtctttcgggtctttgcagacaccctcaatatctgtcataaatgccagtttttctgcatgaatacactttgcaactgcacttgccgcatcatccgcattaatgttatatgcctgataattttcatccataccaatcggcgcaataatcggaataaaatctttggcaatcaaagtgtcaatcaaatcggaattaacagattttacttttcccacaaaaccgatatctcttccaccggctgtttttttctcacagagcattgtgccgccgtcttttccactgatgccggctgcctttacgccaagtttctccatcatctggactaaatgcttatttaccttatttaaaaccatttctgccacttcaatcgtatcggcatctgtcacacgaagtccttctacaaattcactctcttttcccatatagccaagccatttgctaatttcttttccgccgccgtgaacaataatcggctgcatgccaaccaatttcaacaaagcaacatctttaatcactgattcctgcaatttttcatccagcatagcgcttccaccgtattttacaactactttttttccgttgaaatcacggatataaggcagtgcctcaatcagcgtttccgccttaagtacaacttctttcattttatcttccatctttttgtcctctctaacttctgtaatcgccatttatttttacataatcataagtcaaatcgcatccccaggcaattgccgatgcatccccctgcttcatgtcgcaaataaatgtaactgcatcttttcctaataaaatagtcgcctcatcttcactgtaatctgtcggcacaccatcttttactaaaacaatctgctcatcctcagcttctaaaatcaaatcgattacatccgggtcaaagtctgcaccggaataccccagtgcgcacaaaacacgtccccagttcgcatccttgccaaacaccattgctttcacgaggtttgaagtcacaaccgatttactaaaaatctttgcctcttctttattcttacagtgaactgctcttacttccatcagcctcgtagcgccttctccgtccgctgccatctgttttgccaaatccgttgcaacaaaactcagtgcctctttgaattttacatatccattcgttcctgctttgatttcaacaccggattcgccattggcaagcaccagatatgtatcatttgttgatgtatcgcggtcaaccgaaatcatattaaaactatctgacacaatttcggaaaccatttcctgcagtaaatcatgtgaaatttttgcatctgttgtcgtaacgctaagcatcgttgccatattcgggtgaatcataccggagcctttgctcatgccaccaactgttacggttactccgtccacctcaaaactggctgccgcttctttcggaacagtgtccgttgtcataattgccttagccgcaagcagacctgcttcttttgtatctgccagtgcatcctttaaaagttttgcacctttttgtagcggttctttttttatctgcattccgataacgccggttgaagctgtcaaaacctcttttgtcgaaacaccaagtgcctctgcaatttgtgaagccatgtactcattaatttctttaccttcgcctccggtacaggcattggcaattccactatttaatacgaccgcatgaacatcctttttgctctcaacaatttctttatcccaccaaaccggtgctgcctttactacattcgttgtaaaagttcctgcacagaccgccgggctttctgtatagacaagggccatatctgtacggtttttatatttaattcctgcctctgcgctcgccgccataaatccttttgctgctgtaacgccgccttctattgtattcatcatattttcctcctttacggaaccatcggtacaagccggagcccctctgcctcatcaaatccaaacatcagattcatgttttgaactgcctgtccggcagcaccttttgtgatattatccattgctcccatcataatcacgcgatgcgtgcgctcgtcaacttttacatttacatcgacaaagttgcttccctcaacccatttggtctccggacacacaccctcatccagcacgcgcacaaaatattcatcttgatatgctttcacataagcctctcgaatctgctctcttgtcacaccttctttgtattttgcatatgccgtaaccaaaataccacgattcattggaatcaaatgcggagtaaaattaagtgtaacatcttttccgctaatataggaaagctgttcttcaatctccggtgtgtggcggtgcgtggctactccatatgccttaatattctcatttacttcgcagtaaagatttggaacttttgcacctcttcctgcccctgatgttccggattttgcatcaataattaaagtatccatatcaatcagtccttctcttgcaagcggtgcaatcgaaagtgttgaacaggttggatagcatcccggattagcaattaaacgtgcctttttaacctgcttgcggtttaactcacacaatccgtatacagcctcatccaaatactgagggcttttatgtgtgatgccgtaccatttttcataaaccgcaacatcttttattcggtaatccgcactcaagtcaatcacctttgcctgggaaaggatttcgtcatccagaacacctgccaaatacccctgcggtgttgcggtaaatatcacgtctgcctcttttgccaaagtatgtaaatcatcacttttacaaatattttctacaatctgaaaaacatttccaaaaacggaactaaatttcttatccacatagcttctcgaaccataccatacaatctcaacttctttgtgctgcaataataatcgaaccaattcctgtcctgcgtaccctgtagcaccgataattccagcctttatcatagcatcctccattccgccgtactttggcagctcactctttttattcatcatttatgcatatttatacatattatacacaaacctcaattattatacatcttttccaataaatatgcaatacctaactagaatttattcgttattctttgaaaataattgattttatgcttgcataatattcacttgtggtgtatattagaaaaaggttaataccaaaaaatacatacggaggttctattatgaaagaaaaagttattttagcttattccggcggtctggatacaacagcaattattccatggcttaaagagaattttgattatgaagttatctgtgtctgcattgattgtggacagggtgaagaattggacggtctggaagaaagagctaagttctgtggtgcatccaagctttacattgaggatgttgtcgatgagttctgtgatgaatatgtagttccttgtgtacaggctcatgctgtatatgagaacaaataccttcttggtacttcgatggctcgtccggttattgcaaaacgtcttgttgaaattgcaagaaaagaaggcgctactgctatctgccatggtgctaccggaaaaggaaatgaccagattcgtttcgaactcggtatcaaagcacttgctcctgatttgaaaattattgcagcttggagaagtgataaatggacaatggattcccgtgaatccgaaattgaatattgcaaggcacatggaattgatcttccattctccgcagattccagttacagccgtgaccgcaacttgtggcatatcagccatgaaggtcttgaattggaagacccggcaaacgagcctaacttcgatcatcttctggttcttggtactacaccggaaaaagcaccggatgaaggtgaatatgtaactatgacatttgaagccggcgttcctaagagcgtaaacggaaaagaaatgaaagtttccgatattatccgcactctgaatgaattaggtggaaaacatggtatcggtattgttgatatcgtagaaaaccgcgttgttggaatgaaatcccgtggtgtttatgaaactcctggcggaacaattctttacgaagctcatcagcagttggaagaattaatccttgaccgcgatacaacaacattgaaaatggatatggggaataaacttgctcagatttgttacgaaggcaaatggttctctcctctgcgcgaggcagttcaggcatttattgagtccacacagaaatatgtaaccggcgaagttaaattcaaactgtacaaaggaaacattatcaaagccggaaccacttcaccatacagcttgtacaatgaaagcattgcaagttttacaaccggagatttgtatgaccatcatgatgcagaaggtttcattaacctctttggtctttctaccaaagttcgcgcaatgaagatggcagaagtagaaaagaataataagtaaacaaccgtattgttgtaaataataaaacagccttccatccaatgatgtgaaggctgttttattatctttttatatcactgatatatcagaagattttatgcatcttcattggtatcttcttctgctaactgttcgtattcatccgtagaaccaaactcagcaaattcagagaagtccccatcctcatatgatgctgccgcttcatcttcctctacatcagcagatccctcaacttcatcattctccgtttcaactgcttcgtcgtcaacagtttcactttcctctgcatcgtccgaaatcgtaagataaacgtcatcatctaccccagtttccacatcctctgctgcttctgtttcctcataagattcagattcttctacgacatcttcataatcaacggccgctgaaacatcctcatccgcctctgtcacaaatttagcaacttcagaatccaaacgacggcttacatcctctgttacacgaatgcttgtctgaatatccatcatactatccgtcaatgtagttacagactcagatacaccggatacctgattggaactatcattaatcgtctctgaaatttcatgtatcagtgttgccatctcatgcatcgtatctttcaatgcggttgcactgtcagcaaactgaagcatcaatgtatcaatacgatttgcatcgtcgttatactggttaccggtatttacaagattatcataatccggcatgacctcattttgaataaacgtcagcatcttattagcattgtctgcaagctctcctactgaagaatttacttccaaactgatatcctgaatgttatttgctgtctcacggctcgaatctgccagtttacgaatctcatcagccactacagcaaatcccttaccaacctcgccggcacgtgctgcttcaatggatgcattcaatgcaagcaggtttgtctgagaagaaatctccaaaatatcatttgtcaatacattaatcttttcaacatctttactcttttcaagagaactctgaagcagtgtattaatttcacttgccatctctgccgtcatcttacggcgtttctgaccactctcctgcaatgcattcgcacggtctttaatttcctttgcgaaatcagaaccattatttgcctcaccggcaatatgctccattgcttcataaacacgtcctgcctggtcattcaaatggtcggcatggtttgcaacctcttccattccggcagaaagtttttccattacctcagataccagtttgatatcgccattcgatgtatttacaccattaaacacctgctcaacattaccctgcagctcaacggcatcggatttgatttccataataatgtcgcggagtaaatcaataaacttattaattccgacaaccagtgttcccacttcatcttttgtttttacctgaatctgggatgtgaggtcaccgtggtcttgttcaatacttcgtacaataccgttcaagtgacgaattgcatgtttggttggacgaaggattgtcgctacaaccattaaaatacagaatacaatagaaacaaccaacaaagcaatcaaaacaacaaatgctaatgtactctgtgatgcagctgcactaagtgctccctgcgaatcctctactttctggctgttcaccttctgcatgtcatcaatagcactctgaaatttcttgtagataggctctaccgcttcattcaaattcttcatgccattcagttcataatcatcaattgcctttttcgatttctggtaagactcactaaatgttgcatacgcagctttatagtcttttaaagcatcggcttcaccactgtcagaactcttctctgcaataacagaaatattcttatccatgcgttctgtggcttctttaatatcctttgataactgttttaaatcatcgtcatcaaatgcagtcacatagcgagccagcttatactgaagcaatataaaatctgactccatctctcctgtcttctccgttatcgtcatgtaattgtcgctaatcgacttggttgcccggttcatctgtgcaatctttgaataaatcaatgtagaacacagtccacatacaattgcaagaatacaaaacggcaccatgattttcaatccaattgacttcctcataacaaatctcctttttatgtaattatatagttatacactctattcagattataacatcataccttaaaaaaaacaagaaagaatgtcttaaatcgacactctttccctaaaaaaattcattattaactttttatttattaatgtctctcacatcatatggcgtactctgatatacataatagttaagccagttactgtagaacaattgaccggcagaacgccagcggacaaccggctttttctccgggtcatcatccggaaaataattagccggaatactcggattcattcccttatctaggtcacgaaaatattcttttgccagtgtatctgaatcatactccaaatgtcccgtcataaaaaactgtctgctgtcttctgtttttataaccgccacacctgctgcgtctgatacggcaagcacttccagctccggaattttctcaacatcttctctgtttaccgtcatcgcacgtgactgcggacagtcaaaaatatcatcaaaaccgcgaaacagcggagaactttttttcagcacccgatgtttgtacacgccggataatttttcctctctgtcgactctctcaataccatagtgataatataaaccggcaaatgcagcccaacacatgtaaagagtacaatgaacatgcttctttgaccactccataatgtttgttaactcatcccagtaatccacatcttcaaatttggtatagtcaagcggtgctcctgtaataatcataccatcaaaattacggtctttgatgtcatcaaatacacgataaaaggtttccaaatggcttggtgccacatgcgtcggcttataactgctcgtctgcataaactccacatccacctgcagcggtgtattggacaatttacgcaaaagctgtgtttctgtctcaatctttgtcggcataaggtttaaaatcaatacatgcagcggtcgaatatcctgatgcattgcacgatactccgtcattacaaatatattttcattttccagaattttctgggcaggtagtgaatcctgaattttaataggcacaattaccactcctaacttatttgataatatttgccattgtaacacaaccagatactgtttgcaaggcttgcggttattctctcatgcatcctgacataatacaaataccgcttgcacctttacgcatgacttccggctctctctcctttgtcatgccgccaatagcatagacaggaacctctgaattatcgcaaatatttttcaaaaatgataatcctctcggcggtaaatcttttttgcagtccgtagcaaatatgtgaccggcaattacaaaatccatcgaatatgcctctgcctcttttaactgctccagagaatgaatagacgtactcatttccttcacagactttctaagattttccctttccttttgagacatctgtgccataaccgaaagcggcatatgcacaaaaggatgaaaaagagaaagtgccgccttgtaatccctatgcaaaatacattttttccctgccaaatttgtgattttcaaaactttcttagcaagttcttcatattcctcatgggataaatctttttcccgcaaaaggatggcattatattcatcgccttgtgcgatctgccggattctttccaagaaatccccctcacacagatgacggtttgttactgctattctatacataaatataatcactcataaccggctgaagtccatgctccaaaatcgcatcataaacttcctgcacatttctggtgtcatcaatttcaaactgttcgtcgccctgctcttctccgcttctgccaccaattccgacatctacaccggcagatatctttgtcgcacaaatttgaatcagattatcacggacacgtttacattcacgagtggaaaccgtaatggaagcaaacggcaaaagcagacggtaagcacacacaacctgtaataactgcgcttcgtgtacatccatcggattaattctgtcattattaatgattggacgaagtcttggacaggaaaatgcaatttctgcctgtggatacttgcgctgcaataaataggcatgaattcctgttgcaaatgcatcttttctaaaatcatcaaggcctaacaaagcagcaaaaccaacgcctcgcattcctccctttaaggcacgttcctgtgcatttaaacggtatgggaaaatgcgttttttgcctgccagatgaagcgtttcatatttatccgaattataggtctcctgaaatacggtaacataatcggcaccacattcatgccagtatgcataattctctgaattagtcggatatacttctaagccgataaccttgaaatattttcttgcaatcttgcaagcctctcctatgtattttacatccgacattttcccgctctcaccggtcaaaatcaaaatttcctgcaaaccggattttgcaatttcaaccatttcacgttcaattccctcggcatcaagtttcgcacgacggattttattatggcagttaaaaccacagtaaatacaataattctcacagtaatttgcaatataaagcggtgtaaacatcataatggaattaccaaaatgtttccttgtctccttctgtgccatctgtgcaatttcttccaaaaaaggaagggcagccggtgacaaaagtgctgcaaaatcttcgggtgtacgattgtctttataaatcgcgcggcggacatccgcagctgtataagaatcataatcgtaggcattcattgcgtccactaccgttttctcaacatcggaatccaaaacttccattccctctaaatatgtcatgtggtcaattcggttttctttcatatcttccagaattgtttcacttaatatactctcatttactttatccatgtcgtcctccaactatctttatttcgttttaaaactgccatcctgaatatagccggtcagcggtgaagatgcacttcctccacgctctaacacgcgtcctgtaccggcaagataagcctttcttcctgcctcaattgcaagtttaaatgcctctgccatagccgggatatctccagctgtcgcaataccggtattcgccataattgcggcagctcccatttccattgcagcacatgcttcagatggttttccaatgccggcatccacaataatcggaagattaatttcatcaatcaaaatctgaatgaattcttttgtacaaagacctttgttcgagccaatcggtgcagccaaaggcataatcgatgcagcaccggcattcatcaaatcacgtgccacattcaaatccggatacatgtaaggcataactacaaatccttcttttgcaagaatttctgtcgccttgatggtttcctgattatccggaagcaaatatttggaatctctcataatctcaatttttacaaaattgccacagccaacttctcttgacaagcgtgcaatacgaactgcttcgtcagcatttctcgcaccggatgtattcggaagcaaggtaacaccttccggaatataatctaaaatatttgcacgtccatcctgattcgcacggcgaagcgccaatgtaataatctgtgcaccggcattttcaaccgatgccttgattaaatccagtgaatattttccggagcctaagatgaaacgggaagaaaactcctgtccaccaagcataaaagtatctttattttccatgttcttatcctctcaatctttgtatttgaatttacattttacatgtcaggggtttgacagggttgttttatcaacctccaccaacaaaacttaccacttcaatcacatcattttcttttatctgaaccgtttcgtaatctttctttggaataatctcaccgttgatttcgaccgcaattttgttcttctcaaaattttgttttgcgataaaatcttccagtgataatccttcacagtctgaaacctggtttccattcaagcaaatcatatcgtctctcctttctcttctgatacaacaaaaggataccacaaaaaaagtccacacccgaggtggtgtgccccttcttgagatatcctcaatctactctcaactatatcatgaatggtagggggtgtcaagtgggtttgttggcagtgtttgttgcccctttttttgttttccgtaattccggcagaaaagttttgcgtctcgtgggcactcccgttaattgagtgcgtagcggtatgggcactgaaactaccagtgccacataccgacgtactcaaaacccacgagccacaaaatttttctgccggaattactggaagccaaagaaactggcagcgaacatttaacttaaaccatatcttatccatcctcacaacttccaaaaaaactgtatgtttgaagacagaaaattttcttcttctctttcgctttgtcaataagaattatatgttatggtttgtatcaaacaattaatgttagtttttcaagattccaacaattcacaaagaaaagatttatgtctcatgggtacgaatgcgcgggtatccggcttgcgtattttgcatgccgatacccctgcgtattcgtcttagcgggagcgcccatgagacataaacttttctttgtgaattgtggaaactgaaataagcatccataaatatttatcacaaactatatcaactgtatcttacactaattcatagcagtgtcgagaagaattatatttctaactgcttctactgagtcagcaacaaagtcagctccggcctcttccagttcttctctactgccgtaaccaaataatacaccggcgcaatcgattccgtttttctttgccccgatgatgtcatgggagcggtcgccgaccataagaattttcttattattatattctgccggaatctgttttagggcgtaagcaatgacttctgctttgtctgtgcgggttccgtccatatttgccccggcgatataatgaaaataagttctcagtttataataatcgagaatttttttcgcatatatctctggttttgaagtggcaacgagacagagaatcccctgttttgttaaaacacgaagaagctcttttattcccggatatacttcattttcgaacattcccttttcttcataatattctctgtaataggaaacggcctgtatggcctgttcccttgaaaaagaataaaatttctcataagactcgtgcagtggcggtccaataaaacgataaagagattcccgtggctgtccttcaattccatattttttcagagaatacatcaccgaattggttattccaagtccgggatttgtcaatgttccatctaaatcaaatagtacaatgggatatctcacttttttatctccttcttccaaagtttagtcatttcttctacaacctcacgaatcgattttccttcgcagtctactacataatcagcatatttttcgtataacggttttctttcctcatataaatccagtaaagtctgttctttgcggatagaaacgccgcgctccgacaaatctcccagacgatttttcaactcttcataagataatttcaaataaaaaaccgcaccgatttcatgcagatgctgcatagcttcctttccatacactgcacttccgccggttgcaataattgttcttttcacatcaatagatgcgtttacttgattttctatctcattaaatccgtcaagtccttctttttcaataatttcatgaagaatgcacccctctctctcctgaatcaccaaatcagagtcaagaaaagagagtcctaatctttttgcaagtacaacaccaactgtactttttcccgctcccggcataccaatcagtacaatattttctttcat

SEQ ID NO: 426 - DNA, 13277 bp, unidentified
  source 1..13277: mol_type = unassigned DNA
ttacttcttatcgttttcgcgaatctccacccggcggatcttaccgctgattgtcttaggaagctcttctacaaactcgatcacacgcggatatttataaggagcagtcactttcttcacgtggttctgtaattccttaatcagttcttctccggcacgtgctttatagtctttggatagaacaatcgtagcttttactacctggccgcgaatctcgtcgggtactccggtaatagcacattccacaacagccggatgagtcatcaacgcactttccacttcgaatgggccgatgcggtaaccggaactcttgattacgtcgtctgcacgaccgacaaaccaaaggtagccgtcctcgtctttccaggcaacatcgccggtgtaataaataccatcgtgccaagcttcatgagtgcgttccgcatcccggtagtattctttgaaaagtccgagaggtttacctttgctggtgcggattacaatttgtccttgttcacccgcttcaacagagcgaccttcatggtcgatcaagtctacatcatattgaggattcggcagccccatgcttcccggtttcggttccatccaaggcatggtggagatggtgagggttgtttctgtttgtccgaaaccttccatcagtttgatacccgtcagcttcttgaaagtttcaaatacggcagggttcaatgcctctccggcaatggtgcagtatttaagtgaagacaagtcgtactttgtcaggtcttcgtgaatcaagaaccggaagatggtaggaggtgcacagagagaggtgacatgatattcctggattttttccagaatagctgccggggtaaacttctcgtggtcgtagacgaagatattggctccggcaatccactgtccgtagagttttccccatactgcttttccccagccggtatcggcaatggtgaggtgaagactgttctcgtccaggttgtgccaaaaactaccggtaacgatatgacctaacggataagtaaagtcatgtgccaccatcttaggttcgccggtagtgccggaagtaaaatacatcagagagatgtcatcattagtattcgcatggcgcggacgtacaaacggagcagcattttcgataccctgatggaaatcttcgaagccttccgggatttccggaccgacactgactaacttttcaaccgtgggacattcgggaagagcatctttgatatgttgcaggatgattccttcgccggcagctacgatcattttgatgtcggcagcattgcagcgatagataatatccttcttggtcagcaagtgagtagccggaatgacagttgctcctagtttgtgaagagcgatggtgctataccagaactcataacggcgtttcagaatcagcatcaccatgtcgccacggccgatacccaggctctggaagtaagaagcggtcatgtccgtagatcgtttcatgtcggcaaatgagaattggcgactttcgcctttgtcatttgtccaaagtaaagcgttcttgtcaggttgttcggctgcccaggcatctactacgtcataaccgaagttgaagttctccgggacgtttattttcaaattcttgttgaagtcctcttgtgagctgaaagaggtctgtgataaaaatctttctaccatgatgttgttacataattactgccagaaaacgtaccgttttgccatcgagcgctttcatgccatgtggaagtttagagttaaaataaatactgtctccttgattgaggatgatttctttgccttcgatgttgataagcatacgtccttcgatgacaaggttgaattcctgtccattatgtttgttataatggatcggctcgtcgattgctttcggttcaacggtaacgatgaacggatcggcggtacggttcatgaatcctgaagccagtgactggtatttataagctttggtacgttcaatgctgatacctttgccggcacgagtcacaaagtagctgctcattttaggttcttcgccaaacatcagagcgtcgagggctacattatacgtacgggctattttttgtaacatgctgacagagatgtcgtaatctcctgtttccgcaagccggtattcttcagcagaaatgtcactatcgcgggcgatatcctctgcggtcagttccaatacatcacgtaatccgcggaggcgttctgctatctgtttaatttgttcattcatacaaatggttagtattttatgattaataattctatggtgttatttggaagctttcatggctttgataatagcagaggtgaagccgttgtgttctaattcattgatacccttgatggtgattccgcccggagtggttactttgtcgatttctacgctggggtgggtgtcgttgttctgaatcagtgcggccgctccttttaaggattgggctatcatctgcatggcatctttagggcggagtcccatttcgattccggcttgcatggctgcctgaatgtatttcagtacgtaagcgataccgcaggatgccaatgcggtggctgccgctattttatcttcggggataagcatcactgttcccatctcgctaaataaccggaggatgaagttgtcttgttcatcattcgtgttgcgcgcggcaacaagcgtcatgctttccagttcgctgatagcggtgttcggaatcagacggaacatgggcatttccggtgctacgacataatgagccagttcttcaaaactgatgccggcagctacggagatgagtatctgtttgctttttaatttcaactcgcgcatcaccgattccataaaccacggtttgacggcaaggatgacaatgtctgctcctgtggctgcttccagattattgttggtggtggagatacccggaaattcttttttcagtttctctagttttccggcactgggattggatacaatgatatccgaatcgtctatcagacttccttttgccaggccacgggctattgaaccgcccatgtttcctgcaccgataatggctattttcatatacgcttgtttttaatgagttgttacagacaaaggtaacagttaattacgaaaaaacaaaaagcagccagaataagaaataaatttctaataaaggctgcttttatcgttggctgtttattaatcaaatgagcggttagagtacttttttgaaccgggcgaggaactctttcgcttcctccatgctgagacagagaggaggtaacaggcgaagtacattcgtgccgcttgctccggtaaatacatgctcgtcatagatgagacggctgcgtagttccttgatcggttcttcaaattcgaggccgatcattagtccgcgtccgcgcacttctttgatttgcgggaattttttcagctcttccagtaagtaatcacctactgccttagcattttctaccagattttcctgttcaatgacatccatcacagcgagagctgccgaacatgccaggtgatttcctccaaaagtagttcccaactggccatataccggtttaaacatcgggctgattaagacacctgccattggaaagccgttaccgattcctttggctacagtgatgatatccggcttaatgtcattatattgatgagcgaagaatttaccgctacgcccgtatccgctctgaatttcatcgagaatcaggatcgttcctgtttcgctgcaagctttgcggagttcctgcataaattcggtggttggtatcttgataccgcctacaccttgtattccttcaatgataacagcgcatgtgtctcctttagacaattcctgtttcatcgcttccacatcgttgagtgggagataggtgacatgaccgttattgttgataggagcgataatagaaggattgtgagtcgcttctactgcaagagacgtccgtccgtggaatgctttattgaaagatacaatcttagtacgtccgttgtggaaagaagcaagtttcagagcattctcgtttgcttcggcaccactgttaatcagaaacaggctgtagtcttcgtaaccggaaatctttcctagtcgttcggctacctcttgttggagcttattgataacggagtttgagtagaaaccaagtttagccacctgattactgatcatcgctacatagtggggatgtgcatgtccgatggagataacggcatggcctccgtagaggtccagatattccgttccgtttttatcccatactttacagccatcacctttgacaatgttgatattgtataaaggatatacgtcgaataaattcataattcttctgtttttaaaaagctgaaggcttcaaacgtagtcctacggtttcttccagattgaacatcaggttcatgttatgaaccgcttgtccgctggcgcctttcagcaaattgtcgatacaagagataatcaatagtttgtcaccgtgtttctccagatgtatcaggcacttattagtattaacgacttgtttcaagtcaatattcttgtctacgatgtgtacaaaggagtcttttgcataatattcctcatacatacgaacgatttcttccagtgctactttggttttgactaccatcgttgcaaagataccacgagcgaaatcgccacggtatggaatgaagtcgatctccgcatcgaaactattttgcagctgtttcagtgattgcttgatttccggaacatgctggtgctcgaatgctttgtacacactcatattgttgtttctccaactgaaatgactggtagcacccggtttcaccccggctcccgtacttcctgtaatagcatttaccattacatcatcagtcagcatcagattcttggcaagcggaagcaaaccaagctggatgcaggttgcaaaacagccggggttggctacgtgcttcgccgtacaagtggcacgacggttcagttccggcagaccgtagataaagtcgtggtcgtcacttttgatacggtagtccatggagaggtcgataatcttcaggttttccggtatgttgtgactttccatgaatttctttgtatctccgtgggcggtacagaagaaaagaacgtcgatttcgtccagaggtaactggtcggtgaacgttaaatccgtttcgccatacaggccttcgtgaacgtcggtaattctgtttccggcattactgctgctgttgataaatacgatttcagtttccggatggttgagcagcagacggattaattcgcctgctgtatatcctgcgccaccaatgattcctgctttaatcatatctcttcgtctttgtggttattatagtaaacacgtagcggagtagaagtcactttgataaagccttttgcgtcttcggctgtccagcctttctgcatttcaccgtattctccgaatttagtcttcaccagatcatcttccgattctacacctacggtagagaaggaaagagggcgaagctcgaggatagctgtaccgtttacgttgcgctggctttcctgcaacatggcttcgatgtcacgcatcaccggctccaggtattgactttcgtggaggaacataccgtaccagttagctacttgatccttccaatattgttgccatttgcttaatgtatatttctcaaggaaacggtgagcgccgataatcaacatcggggcggctgcttcgaatcctacacggcctttgataccgataattgtatcgcctacgtgcatatcacggccgataccgtatgctgcgccaatctcttccactttctggatggctttgatcgggtcgtcaaacttctcgtcgttgacagctttcagttcccctttttcgaaagtcaggcggagctgttcgctaccttctttttcaacgtgcttgaggtaagctgtttccgggagtccttgcgcggagtcgaggatttcgccaccacagatagaagtaccccataagcctacgttataagagtatttcagtttggtgaagtctgcactgaaaccatgcttgttcagatagtcgatttcttcctgacggctcaatgccatatcacgggttaatgtgatgatttccacattgggagccagtacgaggaaagtcatatcgaaacgaatctggtcgttacctgcgccggtagaaccatgtgcaatggcgtctgcaccaatttcgttagcatagcgtgcgatagccaatgcctggaaaatacgttcggaactaaccgaaataggataagtaccattacgcagcacatttccgaaaaccatgtatttcaggctcttttcgtagtattcctgggtaacgtccagcgtcacgtatttcactgctcccagtttataagcattttcttcgtttgttttcagttgttcttcgctgaaaccacccgtattggcacaagctgcatatacttcgtaacctttttctttggcgaggtacatgacggtgaacgatgtgtccagtccgccgctgaatgccaccactacttttttcttcttttcttccatagtgctgtatcttttaaatgttatttctttcttgttcttttttgatgttccgcggctctgtcggatcgtacagcatggctgtgcagatgcagaacttgcggtttttcgctaccagaatatcatggttgatacatccttcgcatcctttccagaaagcttcgtcgtctgtcagttcgttgaaggtgacaggcacataacccagttcggtgttcattttcatgacagctgctccggaggtcagactgaatatttttgctttcggccatcggagacgtgccagttggaaagaagcctgtttgatgcgttttgccagtcctaatccacggaaatcgggatgaacgatcagaccggaagtagccacatattgcttgtttccccatgattcgatgtaggtgaatccggcaaaagtatcgccacaaagagcaataatcgccttaccttctttcatctttgtcgctacgtattcgtgtgtacgttccgcaattcctgttcctcgtacggcggcagcatttctgatagtttccaaaatagtgtcaacgtaaacctcatgtgaggcgtcggctaccataacatctatttgttgagtgtccatttctttattatataataataggtataattattcgatattgggaatgatgagtgacaaaagctgacgtattttactggttgcaactccttcacgcaacaccaacatgatcgtatcgtcaccggcaatggttcccagaatttcactgaattcattgttgtcgatgtcataagccatgctgctggcataaccgggacgggtgcggataacggcgatgttaccggaaaactgcaaagagataaatccgttgttgcgtaacatttcaccggcactctggtcggtagaacgtttatacataatgttgttcggcagtacatatacgtactttccattcatactggcagccttggctactttcaattgtttcaagtcgcgggaaagggtggcctgtgtcagttcgaagccttcgcggttcagctcttgcagcagttcttcctgcgaaccgacctccttgcttgagataatcattttgatggcgtctaaccgatttgctttcttcttcattgtataattattctaagaatggcgcaaaagtatgcattattttggagaaaagatgcataaaaccaaagtttttttgcataaaagtgaaaatactttagaaagggatagtgatataatcaggatatatgtgggtatatgtaacaaagttgtttctttattgcttcattttgtgctgactttttttattgtctattaaaaaagatgcaattgtttgtttagggatttttaaatatataaatttgtaaagtgaataaggagacaaatcgtatgatagatgaagatattgagctttattctctttttagaaaaggagatagaaaggcttttgatactttatttttgaagtattattccatactatgtgccttcgggaagtactatattcctatagaagatgctgaagaagttgttttggatatcatgacatggctatgggaaaacagagaattccagatcatagaaacttctttgcgaagttatttgtttatggcggtcagaaacagatgcttggatttaataagtaagaatcagacaaaaagacgttgttatgagcatatgtttgctaaagaaatgcagacaagttttgaagatcctgatttttatgtagtggaggaattgatggcgaaaatagaaaaggccgtgatgcgattgccggactcctatcgtataacttttgagatgagccgttatcaagataaaacatataaagagattgcgaaagaattaaacgtttccataaaattagtggagtatcgtatccagcaagcattgagacttttacgtgtagaactaaaagactatttaccgttgattacaatcatattcccttattttctctaaggatagccgattcgtttttgagtcttaaaataaaaatgcagcttttaattaaaaaagttgcatttttgtttaggggctaattgaagtattccgtcttcttaataaaatgaacataaaagatgatggaattacatgaaaatatagatgaggctcttttactcctttatttttccggtacactaggagagaaagaaaaagaagaggtagaaaattggatttccctctctgaagagaacagaaaaatagctaaacagatttgttacatacaccacgtaacagatataatagataccgtgaagcagatagatcctaaacaggcattggtgaagctggataagagattgtcaaaaaggaagaaaataaactggtgggaatgggggataagagcagcagctgtgttatttattcctttattcttatctttcttctattttgtatttaatcaagataaaaattatgatcgttatgtcgaaattcggtctaatccggggatgatgacaaaagtggagttaccggatggtacttgggtatggctgaattctgcttcttatctaaaatatccagtgtcttttgaaggagaatatcgaaaggttgaattgctcggagaagcttatttttcagtacaaaaggataatggacggaaattcttagtcgatgtaggaaaggggattgaattagaggttttaggtactgaatttaacgtggatgcttatccggatgataagtttgtagctgctactttggtgacaggtagagtaaaattccattgtcagcagaaaggcagggaggttacttatagtatgcaacccggacagaaggtgatttataatttattggatgagaaacttttgtgtacaactacttttgttgaatctgatattgcttggaaaagtggaaggatcatttatcgagatactcctcttgaagatgctttaagaactttgagcaagcgttttgacgtagagttccgtattgttaatccattattaaagaaatattgctttacaggtacttttattaatcaacgtctggataagatcttggaacacttcaaaatagcttcaggggtgagatacagatatcttgaatcggcattggacaacggtgttgtgaaagagaaaacaataatagaaatttattaaacaaaaaagaactatgaaaacactccctccttaaacaaaaaatatgggaaaaatatagcactattcttcccatataaaaaatcatttagccttacttgtttgccgacaagtgtagttaactttatttttaatttaaatcacaacaaatttatgcaaaaacattgtagtatccaaattcttgggattaaaaggctactgaaagcaactttaaaaggaattccattgcctatgagattattaattattatgctatgtgtttcgataggatgcattcgtgcgacaaatacttatgcgcaaaatgcgatccttgacttgaaagtcaataatcaaacgattgaaaccgtcttgaaaataatagaatcgcggactgactttgtattcttctttaacagtcagcaggttaatgtacataaacgtgtctctattaatgtcaataaacagaatatttttaaaattctagatgaggtttttaagggaagtgacgttgtttattcagtgcttgataaaagcataattttgtctagtaaaagatttgcgcctgatggaaatttgaagaagattacaggtaaggtcgttgatacgaacggtgaaccgttgattggtgttacaattgctctgaaaggaagcaatagaggaacggtgagtgatgtaaacggaaatttttctttaaacggagaagaaggaaagcttaatgtgttgaatatctcatatattggttataaagaccaacaggtaaaagttgaggatggtaaaactttgattattacattggaagaggataccaaggttttggaagaagtagttgttgtgggatatggtacacagaaaaaaatcaatttgacgggtgctgttgctgtggttgacgataaacaagtaatcggacgttcggccgataatttgtctaaactacttcaaggagctgttcctaatatgaatgttactgtttctaacggtcgtccgggacagggtggtagcataaatattcgtggtatcaattctatcagtagtagtgccacgcctttgatattagttgatggtgtagaaggtactatcgatgcagtgaatcccaatgatgtggagtctattagtgtattgaaagatgcttcttctgctgctgtatatggggctcgtgcagcttatggagtaattttggttacaacaaaatctggtaatgatgataaaacacgtgtttcttataacggacgttatagctttggctcacctacagtttccagagattttgagactcgcggttattattcggcggctatcaatgatatgttttattctacctatcaaggttctaactatacgaattataatgatgaagattattatgaaatgtggatccggcgtaatgataaaacggaaaatccggaacgaccgtgggtggttatcaaagatggtgaatataaatattatggtaactttgattggtataactacttcatggatgagtctcgtcctacatgggaacacaatattagtgtcagtggtggcaataagaaagtgcactatttcctttccggtgcttattatgatcagaaaggagttattcggaaaaatatggatagtttcactaaatacaatttccgttccaaggtaagtattgagattgctccatggttgaagataagtaataatacgtcatacaaaaaggattcttatccatttccggggccaggtgctattaacaatctttttgatgcgataagtaagcatgccttagcttctattgttccaatcaatccggatggtacatatatggggaatgcaacagttattacaggaggatatcgccctgctaatgatcttagtgcaattcttgaatacggtaaacacaagaatgaggatactaattacttttttaataccacctttgaggcggtaatgacacctgttaagaatgtaacggtgacggctaattattcgtttgctcaacatgaatatacggcaatgaatcgtagtgctaattatccatattcacgtgtacccggagaagttctttggaaaacagatggttatggccttaatactctttatgaacgttctaatcatgattggtttcattcatacaatatttatggaaattatacaaatacatttgccgatgtgcaccatgtaagtgcaactgccggtgtcaattatgaaactaaattttttaaagacatcaaaatacaacgtaatgatttattgtccgaagatttaactgattttaatttagctaatggtgatgaaatgagtattgcgggtggtaaaaatagatatgctcttttcggtcttttttatcgtttgaattatgactataaaaatagatatttatttgaatttagcggacgctatgatggtagttcacggtttgcccggggacatcgctatggcttttttccttcagtttctgccgggtggagaattaatgaagaaaagttctttgcaccattacgtaaacaaattagtaatttgaaattacgcttttctttgggagcattaggaaaccaacaagtcggatattatgactatttgcagactatatcttctggtggtacaatttcttatgcttttggtgataaaaataaagcgtcaggtgctagtatctctgctccgaatgcttctgatttcacttgggaaacggttgttacaaaaaatatcggtttggatctcggactattgaataatcgtttgaatatgacggctgatatatatgtacgtgatacgaaagatatgttgatggcttccaaggatcttccgaatgtatatggtgcttcttctccaaaaacaaatgctgctaacttacgtacgaaaggttgggaagcatcgattagttggaatgattcttttaatctaaagggaaaagcgttccattattctgtcgtactaggcttggctgataatacgactaaagtgacaaagtataacaatgataacaaaacattgggcactccatatgaaggacaacaactgggagagatttggggatatgttgttgatggtctcttcaaaactgatgaagaagctgaaaactatccggtaaatcagagttacgtaaataatatattgaatatttctgtaaaatctcaaggtctccatgcgggggatgtgaaatatgtggacttggatggcgataatattatttctcctactttatcggcaaacgatgtgaaggatcagaaagtgattggaaattctttaccaagatatacatattctgtcagattagctgcagattggaatggaattgatttttctgctttgttgcaaggcgtcggtcgccaacattggtatcccaatggtgaaactagtctgttctggggtccctatgcccgtccttattgtacttttattccgaaggatttcttgacagatgtttggtcagaagataatccggatgcttatttcccacgtccgagaggctatgtggcattggatgttaatccacgtgagttgtctaaacctaatactcgctatttgcaaaatgtggcttattgccgtcttaaaaatgtaacagtcggttactctttgccacgtacttggctaaaggctttgcatatggaacgtgtcagggtttattttagtggagagaatctttttacattcagccctttacatagtaattatattgatccggaacatgctggggcttctacgagctggaaaagtggtcatacgaacgtgacttcttatccaatgagtaagacctattcatttggaattgatgtgactttttaa

SEQ ID NO: 427 - DNA, 13885 bp, unidentified
  source 1..13885: mol_type = unassigned DNA
taagataccacataatcttccacatagattctgcagtgcttgtccgcctctccgatctgcgttatgttcttcggtaattccatacaaaaaacacctcccatgccgtttctatcagttatcactaactatagcatccgcacaggaggtattttagcgttctttgtcgcacctcttcaaaaacagttcgacaaagtttgcaccatattctatgtattcttagctatgcttcaaacttatatacggtaacagaatcgtattctctgccgttctccccgccaaatacataggaggggaaattctcatgatgaatggtatccgggaaatactgggtctccaatgcaaaaccgcagcggttgccgtaggtcaccccatcttttccgggctgtacatcaataaaattgcctgcataaaactgcactcctggcagggtggtgtatgccttcattactctgccgctcttcgggccttttactgtggcaatatgccgtaatgtaccgtcatcgttccatccatcgatcacgaaattatggtcatagcctccggtcaggagtaactgctcataatcttcccggatgtctctgccgatcttcttgggctgtgtaaaatccatgggtgtgcctgctaccgcacgaatctcaccggtagggatcgatcctgctgccaccggagtaaagtgagaggctctcagccacagttcatgctcttcaatgctgcctgcaccgtgaccgtccagattgaaataggaatggttggtcaggttgataatggtcttcttgtcactggaagcatggtaatgcagagtcagctcattctcttcactcagagagtaggttacggataccttcttattgcctggaaatcccagctgcccatcctcatcctccagagaaaatgtcacgctgttctctccgatctctgcatcccagagtctcttatggaatcccagttgcttatgggtatgtaaattgttggcaccgtcatttttgtccagctgataagtaacgccatccagcgtatactctgcaccgccggtacggttcgcacaggggccgatcaccgtgccgaaaaagctgtcgttgccgtaatagctctcaccattgtcaaatcccagcaccaggtcgtccgccttgcccgcggcatccggtaccagtacgcgcaccagagtagcgcccagatctgtcaccgctgccttcatacccttactattactcagggtatacagcgagatctctttcccttccgggcttttcccaaataaactttttgttactgccattgtctttccctcccacttttatccatttttatttcatgcatactgtctataattccactctgccctctaaagcgcggagtaatgttacctcatcaatatattccagatctcctcctacagggacaccactggcaattctggtcaccttgattcctgtgggcttgataagcttgctgatatacattgccgtggtctcaccttccaggctggaattggttgcgataatgacctcctccacatcaccctgcaggcgttccatcagttccttcagcttgatgtcaccgggtcccacacccagcatcggggaaatggcaccatgcagtacatggtacacgccctcatatttgccggtcttctcataagccgccagatctctggtgttctcaaccaccataatggtacgatgatcccgtctgggattcgcacacaccgggcagagttccttatccgtcagagtatagcattccttgcaatagcggacattggctctggcttcgatcatgacgtttgccagtctgtccacacggtccttcggcatattgatcaggtgaaaagccagtcgttgtgcggacttactgccaatccccggaagggctgccagttcttctattaatttattgatctgtccgctgtagagttccattagaaaggaaatcctcctaatcctccggtcattttgcccataagttctgcattggcttcatccgccttgcgcagtgcttcgttggctgctgccacgatagcatcctgcagagtctcgatatcctcgggatccacgatctcctctgccagcttgatggatgtgatctcttttttaccgttgatggtcacttccacagctccgccacctgcggatgcggagaactccttggtctccagttccttctgtccttcttccatctgacgctgcattctctgtgcctgcttcatcagattattcatatttccgggcattgcgcctccgggaaatccacctctttttgccatgttgctgtttcctccatattatttataattgagttattattctatcttaccttatctgcaagtctgccgcaatcccaaattcacgcaggatcactcttcctcatcgatctccatgttgatgaccttactgagatccacatagttgtcttcgaattctctgctgctttccaccgtctggatcgtcacttcaatctctttgctggaaaaatcggacaacagcatttccagctgctgcttgttctgctcgtgagcttctcctttgaaataatcggaagccagtccgtcctccaacaccaccatgagcttgttgtctccacccagacttaatcgggcgtttttcagatacatcttcatgggattctcggcatttccaacgatggccggccatttccgtacgatctcctggatatcctcggggaccgccttcggcaactgtggcttcggctttgccacaccggcctgcggcactccctgtgctccgggagctccggcaggcatctgggccgccgtgactacaataccgttctcgaccttttcctccacctggcggattctatccagaaccgcctcctgatccgtctccatctccggcttgcacagcttgatcagcgcgatctctaccagaatacgcttctgtgccgcatagcggatctggccggacagttcggagaaaatatgaatatagcggatgatctggtccatggacagcatggaagcttcttccttcagattcgccagattgtccgtagacatgtctatgacatcctccagattatccgctgtctgtaccaacatcagattccgcagataccaggtaaagtccgtgacaaactgtaccagctccctgccctgcatgacgatctcttccaacagttcaatgcagcctaacacattccggtccatgacgaagcgcagcaacctgctgaacacttccgtatccactgcccccagcacatccagggtcatatcgtaggtcagttctttgcccagatggaaggcaatacactgatccaacaggctcaaggcatctcgcatagaaccgtccgctacttttgcaatgtagcgcagagctctgtcctccacctgtacctgctcggtgtccatcagttccttcatacgatccgtgatggtatcaatggagattcgtttaaaatcatatctctggcagcgggacaggatcgtaatggggatcttgtgcacctctgtggtcgccagaataaaaataacataagagggcggctcttccagcgtttttaacaatgcgttgaaagctccgggggagagcatatgcacctcgtcgatgatgtagaccttgtattttccctccgcaggggaataggatacctcgtcgatgatctcacggatattgtccacaccgttgttggaagccgcatcgatctcgatgacattcatgctggctcctgctgcgattgccttacaaatacggcattccccacaggggccgtcctctgtggggtgttcgcagttcactgttttcgcaaaaatcttggccaccgtagtcttaccggtacctcttgttccggtaaacaggtacgcatggccgatccggttcgcccgcagctgattcttcaatgtcgtcacgatatgatcctgacccttgacatcggaaaaagcgtccgggcggaatttccggtatagtgctgtatatgacatgttttttctctcttccttgtaactattcagagccatcaaatattagcagatgcttggcgaaaataattactcattcattttctgtcttaatcgccgaagcagatgcccagcagcttcgcttcctgtacgatggtagcatcgggatccacggtctttaacttgcccgctacatcctctaacggaacccttacgatctcacggttcttgtaacctaccatgaatccatactgattatccaggatcagcttgcctgcctcggagcccagacggctggcgaatactctgtcatacgggcaggggcttccgcctctctgcatatggccgggtacggtgacacgtacttctctgccggtcttctcctggatctgtgcagccacttcgtaagatacggaagggaacggatatttttccatctttttcttgtagtcttttttggtcagggcagcatcttccctggaaatcgcaccctcagccacggcgataatggtaaaacggcagccctttttgtccctgtcttcgatcttctcgatcaccttatcgatatcataagggatctccgggagcaggatgatgtccgcaccgcctgccattccggcattcagggtcagccaccctactttatgtcccataacttccacgataaatactctgccgtgggaagctgctgtggtatggatgcagtcgatggcatccgttgcaatatccaccgcactctggaaaccgaaggtcatatcggtgccccacaggtcattgtcgatggtcttgggcagggtcacgatattcagtccttccttgcgcaacaggttcgcagtcttgtgggtgccgttaccaccgagaattaccaggcagtccaactgcagcttataataattctgcttcatggcttcgactttattcagtccgttgggatccggatcctggatcgtcttgaagggggtacgggaggttcccaggatcgtgccgcccttggtaaggatgccggagaaatccttgtctgtcagcatgcggaaattaccgtaaatcagtcctctgtagccatcgaggaagccatagatctcgacctcttccttactgttcgccagggtcttcaccacacctctcatggcagcatttaatgcctggcagtcaccaccgctcgtcaacattccgattctcttcatcgtaggatcctccgttttctatatttcattattttctcttgcgtttgctgtaactatgcaaaactgtcttcgttctgccaatacttatttctattttaatacatttattttcatctgaaaatagtttgttgtaatttccggcagatttctcccctatggcaaaacaaacctcagaagcaccgggcctctgaggttcgcttatcatcttatcatacgttatttgaatttaaactttcctttgatcatggtcacgtagacagctgcgccgccaccgccgaccactacggctccggctgctgccgctgccgccacgcggcctgcgttcgttcccttaccggaggtctccgttatctgctctgtgccggattcctgagagtcggaagtctgggcggtcatggaatctatccgctcctcctgcggtgcttctccactcgattcctgcgtgtcctgtgcctccccggagggctttgccgcatcttccttactgttttcgtccgcagcgggtgttgtcgggggcacgggaattacagaaggctttaccacaccgggtgtggcaggcgttgccgtggctgcgggaggtgttgccgcgcccgtggccttctggtccgtattggacgcctgactgctgtcatcgtcgtcatcatcgtcatcgtcgttactggcagcaggcttcttcggtgcgatctcataaccgcagacggtacagatctccgcccgttctgtggtggccgcgccaccggatgcatgcttttccgtattgctggtgattccacagacaccacacttatgccagtgtccggtcatatcggacagatatccttctgcccagctatgatccgtcttcggaagaacgatctctgtcgctgttatgctcttgcttccgtccgcggatgcaaaatacagtccgcagacgtcgcaggtccagtattcgatacttccctctgcctgacaggtgggttccacccggtcgtggcggttcagcgggccgtgaccggagttccatgtcttcgatacggcggggcttgcgttataatcatcggtttccgcatagcggatccgtgcagtcaccttctcgttgtgaccgactccggtggatttggtctgcccccagtccgttccatcaaagctgaattccacgtcagtgcgatctgtggtgatctgcgccgccagatcattgccgctgacggtaaaggtcatgtcaaaggcatccggatccggggtatcctcgcggtctgctcttgcggtgcgaaggatgtgcacacaaacatggaaattctcataattctgtgactgtaattcaaccaataatgtggcagtcttgccgatatcttccacagtattttctcccagggtaaatatcagctttccttccgaatattcaaccttggaatctgctgccaaaatgttccctgaatcctctctcgttataacagtcattactgtttttcccagatcttcgggcagccccggtatttgcacagccctctcttccttggctgcccagctgtattgcagttccagatcttcaaggttccaggccgatgtcggttgaatcatcaatttcaccggtttcgtcaaagattgatagtattctggatacttcggaataaatgtcgccgtgtaggtctcgctgtcgccgacataaggaaccttgtcatcatcgctctggatctgccaggttccgtcgatcgtctcactccccagttttgccgtcagtcctgtcactgtgagttcactcagcttattgccataggttccacaggcaatgccctccccttctacagtaagtggagccggggcgatgtcaacgatcagattcttcgtcttctcagagaagaaagaattgtcatttcctttgtagacgagggtaaacgtggtcgcacctgcagtccgcgcattgtaggttgcggtgccgtcccggaattctgccgcatttaccaccggggtatcctcgatccggatctcaaagctgccctccgtatcttccgcagagatgttctttccgtttgtcacaaagtttaccagtgcctttacattaaaagtaatatcttgtccataggtgggaatagcgttatctgttctctcgaacagcagacccgtggtgtactttacaccaactgcgttattctccccaagagaagggtagtaggcgattcccttctctttgtcgttggctttctttgtccagagttcggtgttaaagtcgtatgttttgagttcttcgaaaaagctggaagaggtcagttgcagggtcgtacgccccaaattgcgtttatcatctgctttacatatatcgttattgaaatagcaattcgttgtaccgtaatctccactgttcactattcctgcacaatctttatcacttgtaacagcagctatactaatgcaatgatcaataactttaaatggactataaccacagattcctgccgcagaatcctttccctgtacgtctcctgcaaaaaagcactgggaaatcttagtatattgtccaacattgccgcagattccacctgctgtatacccttttaccgttccggtaaaggagcagccataaatttcgcccacagacaagctttcgcaaattcctcctgcctcggtattcgaagcaatcactccgttggcagccaaaagcattactttaccgctttcgctgagctggttttgcgtgtagccaatctgggcaaacaaaccagaactataaacatcattttcttttgtcatatccacatggcttatcgtatgtccgtctccactgaattttcctgtgtacggagttcctggatctccaatggaactgagttgtactccactcacatcaatatcgttccccaggacataatttgcactccattttgcttcatccctcacctgtccgatggctgcgaattcctccgccgtggtgatcagggtatagatatcccagtcgtcgccattcgttgtaacatagttgtataccggtacgggagcagtcttcgtctctttgatatctgccacctttgtcagattgatgtaagtccctgtggctgtaccgaatctgccctgtgtagcctttgcagtgctggtatcgacactgccctctttccagattgtagaatccaagccatccggaagtgcaccgcaaagctgccctgccgttaatgctgttccagcgtcaaagcctccggtaattgcatccatattgtaataacaatttgaaatatgccccgtactactagtctctgtttttcctacaattccgccaaaagattctcctccactgactttccccagatttacacatgcagtaaccctcgcagacgtagtggcatcaccaaagatgccaaatattccaccacaggcacttcgataagcttcacgtataatcgttatctcaccggtattcaggcaattctcggcaatactacccatcccggcaataccaccaactctccctccccctgttaccttactactattgtaacattgcgagactttaccacccgaatatcctccaatcttaccgcaaataccgccaacatctgtttcgccgtttattgtatttccaatactccgacagttctcaatatttatttcttctgcccttcccacaattgctccaacaaatttttctccgtgaatatcagaattcttaactgtaatattttttatggcactataaacattatgtcttgtgcatcctccaaacaaaccgacacaatccaatgcaccacttattttcattcccgtcacagtatggttattgccgtcaaaattccctttaaaaggcttcctagcgtttcctattggtgtccattcctgattgttaagatcaagatcatttttcagaacaatatattctccatcgtaccagtttccggcattcacattttttgcaaaatacgcaagttccgccgctgtctcaatttgaaatggattatcttgtgtaccctctcccgcggcaaacccatctgcaatcgctgtaccatcccaggtatctactgtttctccttccgctctcgcactcaccggcacagcgatccacaccagtgccgccagtgccagcagggccagcctcatcttcatgctccatgcttttgtacttttcttcataaccctcatgcctttctatatcctgcaaaatttcacatatttcccaaccctttgcagatgtaaaatccaattttgtttttatactatccgtatcatttattataccaaaaaagcaaaggcaccgtcaatattttccatacgattcgtctcatatttttataaaattttgttaaacaagtgcgcccaccgcaaaatcgagcaggctggctcatcgtatacgcaaaaagagtgaccggatctctccggtcactcctcgttgccttctctgaaaaatatatccagttttcccagacatttgatcaatgtcttcatttcttcctcgtccagatcccgaatgatcgtatggatcattttcctgtggaaatctctgtgatggaaaaaagcttttctccccttctctgtcagggtcaccagcactacacgtttatctctggtgctgcggttgcgggtgagatatccttttctctccagactgttcatattcgtggtcagggttcccacggtgacatgcagttccccggcaatcctggacatgctcttgggttcctcgataccgatagcctccagaatgtgtatgtcattatttgtaatatccttgaattcgtctgttatgaccgcctttgcctctgcgtccatcacgttatggaacagattcaccagcaattcgttcagcatccggttgttgctttttcccatagtttcctctacgatatctggaatttctctgtcgtatgccgcgatccttcgaagctgccttctcggacgcatatccgagggcttcctgcccttcgaatcattttcagtataccgtctaccaggtcatcacgcaagccccaatcgtaagcccggcgccgaatcccgccagaacgatgcggtcaccgcggtgcagctttccctgcctgtgcagttcatccagcaacaccggaatggaggcagaggacagattgcctaccctctccagatttgtaggaaatttttcacgatccgcatgaaggcgtttcgccactgcatcaataatacgtgcgttggcctgatgcaatacgaacatatcaatatccggcacagcaagtccggcatctgacagtgcttcctcgatgcactgcggcacccgtctggtggcgaaccggtacacttcctgtccatccatctgaatataatgttctctgtcatccgtctgctgtttttgatccgtttttgccgccgaagcccttgcatacggggttgtcaattctctcgctccacattgcaggactccaccgccggtgccgtcggagtgcagtgcccggcccagaatgcctgctggcggtatccgtttctcctccgccgtctcctgcatccctttccctgtctccggcaaagcgttactgtattccaccgcccgggactccgtcctgcatctctctacaactaccgctccggcaccgtctccgaacaggatgcagctgccccggtccgtccagtccaccagcttggacaaaacctcgctgccgatgaccagcgcattttccgcaagtcccgtccgcagataagcatccgcagtattcagggcaaataaaaatccggaacaggccgcattcacatcaaaagccaaagcattcaccgcgccgacagctgcctgtacctggcaggcacagcagggcagatactgttccggagaacaggttgccaccaggatcagatcaatctcttccgctctttttcctgcctgttccaacgctttacgggctgcttctgacgcaagtgtcacaaccgtttcgcccacagacacatgacgctcaccgataccggttctctcccggatccattcatccgaggtttctaccatctgctccaattctttatttgtaacgatcctccccggaagcgcacttccggttccggtgattcttatggtcctcacgccatttcctccatgatatccactgttctttctattttctgcgcccgccaggcattgctgccacagaacaacagtccgttatccacatctcccgttgccgcattgatcaacgctcgggtgatgcaatacggtgctgtcttcggatcgcaggtcttaatgcaatgtctgcatccggtcataaaccgttccccggccgccaccttttccagaaaagcattctgtatagctctgccgggcattcccaccgggcttttcacaataacaatatcttctttctgcgcccggagatactcctgcttgtacgcctccgccgcatcacattcctctgtggtcacgaaccgggttcccagctgtacccccgcagccccgagggacaggcagtgctccagatctctccggtcataaatacctcctgctgcaatcagtggaattcccagttctgctgcctgccggatcattgccgtaagttctctctcatagttctccggtgtgtaagcatccagttcttcccgtttaaatcccagatgacctcctgccaacggtccctctgccacgataaagtccggctttctgtcgtattttttcatccagtatttcgtgacgaccgacagggcacgggggctcgacacgatcggcgctaacatcgtccggtggctgcgcccgggcattccgttttccgtctctgccacaactccgggcagatccagcggcaagcccgcaccggagataatgcagtctgtaccagcctgcactgctgccctgacataatcctcgtagtgttgcgttgccaccatgatattgacaccgacgataccgccttttgcgatctgccttgctttttctatttcttttccgatagtgcgcagattacaggcgatgggatctctgtcaaaatccggctcccggaaaccgatctgggcagtagaaatgatgccgatcccaccggcagctgccactgctccggccagcccggacagactgattcccacacccatgcctccctggatcacgggaatatctgcatgtaattcccccaggatcatttttccgtgcttcatcccacatcacctctcgttaccgctttaatacttgcggaacctttcataacgttcctctgcgatttgttcaccggtcatgccggtatatttttgcagaaattccttgatatgttccttgagatacccgcctatggcttccacggtactttggtctgccccgccgtattccggtacgatccgctcgatcacaccgaggcgtttcagatcctcggatgtaatattcatgacctcactggcttctctggcacggtcagcatccttccataatatagaagcaaagccttcgggagacaggatcgagtatgtggcattttccatcatccatacctcattgcctaccgctgtagccagtgccccgccgctgcctccttctccgataaggatgcacaataccggtacttttaaggctgacatctccagcagattccgggcaatggcctcgccctggcctctctcctccgcctccacgccgcagaaagctcccggcgtatttacaaagctgataatgggtcggttgaatttctccgcctgcttcatcagacgcagtgccttacgatacccctccggcatgggcataccgtaattgcgtctggcacactccgcaaaatccttgcccttcacatctgccagcactgtcaccggctgcccgtccaggaatgccaccgcacctaccagtgctttatcatccccataataacggtcgccgtgagcctccactacataatcgaaaatgtagggaatatagtcggtcgctgccggtctgtccactctccggacggtcttgaccttttcccatgccgttctggggagtgtcagtattgaccgttccttcacgatctccgtaggttcaaaatggaagtcaaaatttttcttaaaatccgcataattcccctcactgcaccgatgcgtcgtgatcaggaaatataaggtcttcttcagattctcccggcggacgataccgtccacaaaaccatgctcctgcaaaaattccgctgtctggaagccatcagggaggcgctgtcccagagtctgcttaataactctcggtcctgcgaagccgatcaaggctcccggttccgccatgatcacatctcccagcatggcaaaactggccgttacaccacctgtagtgggatctgtcaaaatagtcgcatagagaagtcctgcttctccatgccgtttgatcgctgcggaggtttttgccatctgcatcagtgacacgattccctcctgcattctcgcaccgccggaacagcagaacaaaaatacaggcagccgcaattctgtcgccttttcaattgcctgggtgactttctcgccgaccacatgacccatactgcccatcataaatttggattcgcagatgccgatcacagccttttccccgtagatctcgcattcacctacggtcacagcttcttttacgccggatttttccctggcctccgacagcttttcttcatagccctcatatttcaatggattgctctcttctatctcctcgaaccagggccgaaagcttttccggtctgccaccatgcggatccggttgtgggtcttcacccggaaataataaccacactcatagcagacatatttatttttcgctgcccggtctctgtttatcattttcttacatttcgggcatttgatctctgtttctgtatctacacttcccatacctgcacgtataatccaattatcctcttttgagggtaatggattattctcctttctc

SEQ ID NO: 428 - DNA, 38874 bp, unidentified
  source 1..38874: mol_type = unassigned DNA
  misc_difference 11079: note = a, c, g, or t
  misc_difference 11080: note = a, c, g, or t
  misc_difference 11081: note = a, c, g, or t
  misc_difference 11082: note = a, c, g, or t
  misc_difference 11083: note = a, c, g, or t
  misc_difference 11084: note = a, c, g, or t
  misc_difference 11085: note = a, c, g, or t
  misc_difference 11086: note = a, c, g, or t
  misc_difference 11087: note = a, c, g, or t
  misc_difference 11088: note = a, c, g, or t
atacacgggaaacgacacccttgttaccatgacgtccggccatcttatcaccaacagaaatcttacgtttctgggcaatgtaaatacgaacagactcatttacaccaggagataactcatcgccatcttctctggtaaatactttggcatctacaacaataccatatgcaccgtgcggcactttcagggaagtgtcacgaacctcacgcgctttttcaccgaagattgcgcgaagcagtctctcttctgcggtaagctctgtctctccctttggtgtaacctttcctaccagaatgtctccggcacggacttcggcaccgacacggatgattccgcgctcgtcaagatcctttaatgcatcatcaccgacacccggtacatctcttgtaatctcttccggtccgagctttgtatcacgagactctacttcgtattcctcaatatggacagaagtatatacatcatactctaccagacgctcactcaaaagaacggcatcctcgtagttataaccttcccatgtcatgaagccgatcagcgggttctttccaagtgccagctcaccattggatgtggatggtccatcagcgatcacctcaccctttgctactttctgtcccttgaacacgattggtctctggttgtagcagttggactggttgcttcgtgcaaactttgtcagaatatattctctgcgatttccgtcctcctcacgtactacgatacgattagactcagaactctccacgatacctgcttcttttgcaagtacacagacaccggaatcgaccgctgtctttgtctccataccggttcctactacaggtgcctcggtggtaagaagcggcactgcctgacgctgcatgttagatcccatcagtgctcggtttgcatcatcgttctgcaggaacggaatcagtgctgtagcaacggagaacaccatctttggagatacgtccatgtaatcgaatgcagtcttatcgtactcctgcgtttcttcacggtaacgaccggatacggaattacgaacaaaatgtccatcctcatccagtttttcgttcgcctgcgctacatggtaattatcttcctcatccgcagtcatgtatacaacttcgtctgtaacacgaggattgtctttatctgatttatcaatcttacggtacggagcctcaacaaatccgtactcgttaattcttgcgtagcatgccagagagttgatcagaccgatgtttggtccttcaggcgtctcaatcgggcacatacgtccataatgggaataatggacatctcgtacttcgaatccggcacggtctctggacaaaccgccaggtcccaatgcagaaagacgtctcttatgtgtcagctcacccagtgggttgttctgatccataaactgtgacagctgggaagatccgaagaactcttttaccgcagccgtaaccggtttgatgttgatcagactctgtggggaaattccctcaagatcctgagttgtcatacgctcacgaaccactctttccagacgggaaagaccgatacgatactggttctgtaacaattcaccgacagcacggatacgacggtttcctaagtggtcaatatcgtcatctgttccgatgccccactccagatgcatattatagttgatggatgcgaagatatcctcttttgtaatatgctttggaatcaggtctgcaatatctctcttaattgcagcgatacgctcttccaatgtctcgttttcttccataatctgctgcagagccggataatataccagttctgtaacaccaatagccttcgggtcctcaatttcaggaatccagcttctgatatctaccatcatagaagaaagaacttttacgttacgtgtctctgtctgaatccagagcgccggaactgcagcattctgaatctgatctgccagatcacggtcaacagttgtgcctgcctctgcaattacttctccggtagaaggatccagtacatcctctgccagaacctgtccgttgatacggttctttaaagcaagcttcttattaaatttgtaacgtcctacttttgccaagtcatatcttctcggatcgaagaacatggcagtgatcagactctccgcactttctacggaaagcggctcacccggacggatctttttatataactctaataaaccagcctcaaaacttccctgtggctcacgctctgtgatcgccgggtccttctgcagggatgccagaatctttggctcctcgccgaacatgtcaatgatctgctggttggtacctacaccaagtgcacgaagcaatacggtaatcggcactttacgggttctatctactcttacactgaaaacgtcattggagtcagtctcatactcgagccatgcaccacggttcgggataacagtacatgaataaagagttttacccactttatcatgagcaattccgtaatagataccaggggaacgaaccaactggctgacgattacacgttctgcaccgttgataacgaacgtacctgtctctgtcataagaggaagatcacccatgaaaatttcatgttcgttaatctcatctgtctctttgttatgaagtctaaccttgactttcaaaggtgctgcatatgtcgcatctctctctttgcattccgggattgtatatttcacatcgtcttcgcacagtgtaaaatcgacgaaatccagactcagatgaccactgtaatccgtgatcggggagatatctgcaaatgcttcttttaaaccttcatccaggaaccactgataagaattcttctggacttcgatcaggtttggcatctgcaaaacctctttctgtcttgagtaactcatacgcaagccttttccagccttgactggacgtattctgtttttctccattgacgtttcacctctcgtttttatttcaatctagtttttcctaaaaaagagcatggaaatgcctagtgcaccacaatagtgcaacttatactatacaataaaatcaagggaattgcaagaattatttttgagaactttttcagatagaaagaggggatacagctaaataaaataacccaacagaaatgcaagcatctctgccgggttattattggtttctcgtcgtttacgcacagactactttaatgtaacctttgctccttcagcctcaagtttagccttagcgtcttcagcagatgccttgtcagcctgctccttgattaccttaggtgcgccatcaacagcgtccttagcttccttcagtccaagacctgtgatctcacgaacaaccttgataaccttaaccttgttcggtccaacttctgttaactctacgtcgaactcagtcttctcttcagctgctgctgcgtctccgcctgctgctgctactacaacgcctgctgctgcagatacgccgaactcttcttcacatgcctttacaaggtcatttaactctaatacgcttaactctttgatagcatcgataaactctgctgttgttaactttgccatgattatttcctccgttataattttatttttaataattattctgctgctggtgcttcctcagccggtgctgcgtctgctgctgcatctgctgcgccacccttctctgcgatctgattaagaacgcgagcaagatttgtgataggtgactgtaagcttccaagtaatttggaaagaagtacttctctgcttggtacacttgcgatctgcttcattccctctgcgtcatagtatgttccttctacaacgccggccttgatctcaaggcttggagccttctttgcgaactctgccagaactctggctggagctgtagcatcttctgtagatactgcaaatgcgttaggtccttccaggacatcctttaagctctcgaactctgttccctcgattgcgcggtttactaaagtatttttgtatactttgtaagttacgccagcttctcttaaatttttacgaagctgtgtatcctcagcaactgtaagtccacggtagtcaactactacaagtgactgtgcgtccttaattgtttcagaaatctcctgaacgatcggctgctttaattctacctttgccacgattcatttacctccttattttatttcttgcatatagcgtgaggtataataaaaaccctccgccttacagcagaggggtatcattctttatgacgattatcatcaaaaattccctcggtaggtggatttccctttacgctgtcgcaatatgcgatagcaccttactgtcttcggcaatatgctttgttattataatatgttcttatgcgaatgtcaagtattttccgcattttgcttgtgtaagtctgatcatacatttcatcatttcatcaggaaccgtttccggttcccgacttctgatttttctattactgagcaatctttacaacgttaagctttacgccaggtcccattgtagaagttaatacagcactcttaatgtactgaccctttaagcttgaaggcttagccttgttgattgcgcccataagagactggaagttgtcgttcaactgctcacttgtaaatgaagcttttccaactggcacgtggataatatttgtcttgtccaaacgatactcaatcttaccggctttgatgtcattaacagctttggtaacatccatggtaactgtaccagcttttgggtttggcattaagcccttcggtccaaggacacgtcccagacgtcctacaacacccatcatatccggtgtagcaactacaacatcgaagtctaaccatccctcgttctggatcttcggaattaactcctctcctccaacgaagtcagctcctgctgcctgtgcctcgtctaccttggttccctttgcgaaaaccaataccttaacggtcttacctgttccgtgtggcagtacaaccgcaccacggatctgctgctctgcgtgacgtccatcacagcccgttctaagatgaagttcgattgtctcatcaaatttcgctgtggcattcttctttacgaggtcgattgcttcagcaacatcgtactgagcacttctatcgtatgcctttacagcgtcctgatatttctttcctcttttcatgaaatataaacctcctggtggtaatatcgggtgggaaatcaattaccctcccacatttcttcttaaacttagattagtctactacttcaacacccatagatcttgctgtaccagcgatcatgctcatggcagcttcgatatttgcagcgtttaagtcaggcatcttcagctcagcgatttcctgaacctgtgcctttgtaatctttgcaacctttgtcttgtttggttcaccggaaccagacttgatcttgcaggctttcttgatcagtactggtgcaggaggagttttagtaataaagctaaagcttctgtctgcatatactgtaataactacagggataattaagtcgccctgatcggctgtctttgcattaaactgctttgtaaactcaacgatgtttacaccgtgctgtccaagtgccggtccgactggaggagcaggtgttgcctttccagcaggaatctgcagcttaatgtatccttcaactttctttgccattggaattgcctccttaattcatcttctttacatctgcgaaacttacttctaccggtgtttcgcgaccgaacagatccacattgatcgtaaccgtctgtttgttatggttcatcgctgtaatcacaccgcaagtatctttccagacaccgccgataacaacgatcatgtcgccttccgcgaaatccaccacaacgttttcagctttgattccgagcggtctcatttcagcatctgtgagtggcaccggtttgcttcccggtccaacgaaccctgtcacaccgcgggtattgcggacaacataccatgtatcgtcattcataatcatatgaatcagcacatagcccgggaacattttcttggaaacctgttttttcactccgtttttaacttccgtcacttcctcaagaggaacacggacctccaaaatctggtcttccagatgtctgttctcaattgtcttgtcaatattcgctttgactttgttctcataacctgaataggtatgaactacataccagttcgcctctgccataaatcactatgcctccgttaaaatttcaaaccaacaaggaaattcacaccgtgctgaattgcccaatccagcagtgcaataataagaccgactacaacggatgtaacaatcactgcaatggtctgtctgacaactgatttctgttccggccagatgatctttttgaactctgcctttacaccgtcaaaccagcttgtctttggagccttttcaacgttttctgtctgtcccatttcataactcctttgctctgtacggactatttggtttccttatgaactgtatgagtcttgcagaatctacagtacttcttggtttccattctgtccggatgagtcttcttgtcctttgtcatgttgtaattacgacgctgacattctgtgcaggctaatgtaatctttgtacgcacaacttccacctccgttattaattttcgtgttttgtcccgcctaaaaaaaggcataaaaaaaagacctacttccaagctttcatactatatcatgattttccatgtccgtcaacatcttttacaatggtttttatggttttttgcagcttttacgccaaattgtgaatttttagtaaaattttaccatatacaagggtatggaaaatgcggtatgatgccgatatactattcaagcagaatctttttgggtgcaaaggatatgcacctcacaggagaacaggtctgttactgtcctgctctcaatcctcaattcacggaagaaaggaggggaatctcaatggcaaagattgataatgcctacgcttattatatctcgacgtatgcccagaaaacggtttcacgttatgattcacacaagaaaagtgaactgcgcaaagtttataataaaattgtcaaaataaataaagattcgcctctttataaaattccgaatctcaccgatgcgaaaaaatatgccatagacatcaaggaaaacgcgcgctccattcagaacgttgtggcatctctttccgaccagtacggttcatttgaggattcttttaagaagaaagttgccatgtcttccgatgacgaaaaagtcagtgtgacctatatcggcgacggaagtgaagaaagtaaaaccaataactttgacattgaagtgcagcggcttgccacaccccagatcaatcagggacgttttttaaaagacaatacactgtcgatgcgtcccggcgcatattcttttgatctgaatacgtctggtgctgcatatgaatttcaatataatatcaattccgacgaaaccaatctggatgtgctggacaagctggccaggcttgtcaactcctctagtctcggaattaccgccgaaatactgtccgatggaaacggttcgagtgcgctgaaactgacttccatacagaccggtctggcagataacgaaaccgaacttttttccattgcaccggatgccagcacaggttccacggaaatcatggatcagctgggaattgaccgcatcacttcccctgcacagagttccgcctttacactgaatggcacaagccactcttccctgaccaacacattttccatcaatcaggtatttgaactgaccttacatcagccaaccgatagtgagaaagtaaacattggatttaaaacagatgcggatgcaattgcggacaatatccagtctctggtggatgcctataattccatactttccaccgcagccgtgtatgcagacaccaatgccagtgccggaaacaaacttcagacagagattctttccatatccggttcaagccggagttctttacaggacatcggtctggtcacaaacgagaacggctccatctctattgataaagaagcgctccgtgaagcagttgttccggaacgtgatcagaatacatttgaaactttatcccaatttcgggattccatcggaaaagaagcggaaaatatctccatcaatccgatgaactatgtcaacaagatagtcgtggtctataaaaatcccggtcacaactttgcaaccccatacatcacatccatctattccggaatgatgctggacaaatatgtataacaaaaagagcattccagctgtaaccatacagcgaatgctcttttttgtatctttctagaagcctatcccagttctttttcgcacatttccagtgcagaagcgatcacagcgtccatatcataatacttatactctccgagtcttcccccgaaaattacatttttttccttttccgcaagttctttatatttctgataaagagctccgttcttttcatcgtttaccggatagtacggttcatcccccggtttccactccgaactgtactccctcgaaattacagtcttcggtaaatcatgtccctcatcatccttgccgaattcaaaccatttgtgttcaatgatacgtgtccacggcgtctgggcatccgtataattgactgctgcatttccctggaaattcggagtatccagaagttctgtttcaaaccgcacggaacgatattccaacgcgccgagcgaataatcaaaatacgcatctaccgctcccgtatataccgttttctcagccagagccttcagttcctctttctgctccagataatcaatcccaagccggacttcgattccctccagcagatgctcaaccatctttgtgtaaccgcccatcggaattccctgatacagcgcattaaaataattgttatcaaacgtcaggcgcactggaaggcgcttgataataaaagcaggcagatccgtacacttacgcccccactgtttctgtgtatatcctttgatcagtttctcgtaaatatcggttcccacaagactgatcgcctgttcctcgagatttttcggttctgtgatgcctgcggcttttttctgctcctcaattttcgccgctgcttcctccggtgtcaccacaccccacatcttattaaaggtgtacatattaaacggaagcgagtatagttcccctttgtaatttgctaccggtgaattcgtaaagcggttaaattccgcaaattttgtaatgtaatcccacacctttttattgttggtatggaaaatatgtgcaccatacttgtgcacatggattccctcaatgtcctccgtataaacatttccggcaatattcggacgtttatcgacaaccagaacccttttcccacttgttgctgcctcgtgagcaaatacggagccatataatcccgctcctaccaccagataatcatacttcatttctttctcctttgttttattatcagttcaatcagccataacaaaatgcaaccacataaaacacctatggtgttggtcagcatatcatctacttcacaatacccgcgtttcgtcacgtactggctcagttccgtcagaaccgaacagacacctccgagtacaacacatttccacatcggccgcagccggtgaaaacaaagcggtaccagaattccgaaaggcactgtcataagaatattttcaataaaaaatgcatgggtaaccacgctgtatccccacgtggaaaacagatccagattcatgcacccgtttctggaaccgggttctctggaaaaaaaagtaatctgtatcaccacaagtatataaatcgcaaaaagtatacgaaaaaaccggacagatgctttttttccatcctttttttcagaaagtacaattgttacaaccagcccaagtaccacaataaccagtgcccatggcacatattgaagtggctgccgcatatctgccaaaatttgttttataatttcacaccacataaattttattatagccatggttcaaaaaagatacaagtatatttctttatttctatgtaaaactgttgcaggatagtgtaatataaaagaaaaacctcggaaggaccatctgttattatgatcacaataagtttatgtatgattgtcaaaaatgaagaatcggttctggcaagatgcctggattccgttgcttccatgatggacgaaatcatcatcgttgataccggctccacagatcgcaccaaagaaatcgccgcacaatacaccagccggatctatgattttacctggtgtgatgatttctccgccgcaagaaattatgcgttttcgcttgcaaccatggattacatctactgtccggatgcggacgaataccttgatctggaaaatcaaagacgttttctccggttaaaaggtgctcttcttccggaaattgaaattgttcagatgaactatatcaccccaccggatttcaacaccgtgcagaactgcaagaaagaaccacgaccaaaactttttaaacgcctgcgcacgttttcatgggttgatccggttcacgaaacgatccgcaccgatcccgtcatctatgacagtgatattgatattctgcaccgcccacatgccatgcatgccaagcgggattttgccatgtttgaaaaagcatttcgtgaaaatcatgtcctctcggagaaaatcacgcgcatgtatgcaagagaactttataaatgtggggatgaggaagattttctacgcgcggcggattatttttcgttacactatgaagcacacgctgatgcagaatccgcgtgtattctggcacacgctgcccgtatccaaaattctgtggatgatttcttttcgatctgtctgaaagatatgtgcggttcttcctgctccgaaatctgttatgagctcggacaatactaccgggaacggcagaatccccaggaagcttctctgtggttttataatgctgcatttgagacacagcctgttctggatattgaaatttcaggaaaaaaagcattgctgcgactggcggaatgttaccgcacgctggcagaaaatgaactctgtgatccatgctctgccggggatcttctctcccgtgcttcggaatatgaacaacaggcacaagcgtgggaactgccggaagaattataatttgcgaaagaataatttataaaaaaatgccnnnnnnnnnncgctcttccgatctcggtgcagctgcaccggcaaaaattttgattagtttaaatcaatccaatctttatctacccaatatcctctggtctgattccatcttcgatattgtaatttagtttttttgtaaagccgaaattttgtaacaatctcatccgcacacggtgcaatccctatatcatcattctgaatagtctgtacctgcgactccgattcaacttctgcagcactcacactcacagcaggcgcaacaacaaataatgatgcacaaaccgttgctacaattaaaagtttctttttcatgttatcttcctccttttcgaatattaaactcatttttctccaaaagtttcactgttttcttatcgataggaaaatttccttcttcacaatgaagataatactccccattcttctcatacatatatgcattcttctggtttatttccaaactatcgcccttcaaaccataggtactctctggcacctcatatctagactgaagtattattgaataagaaagcaccaacagtgcaaccgcaatcaccggaacaagaattcttccaatacgcgaactgctttgctttccctccgcgaccagacgaaatcgttcgatcagatgatccgaatgatcttcaaacaacggcatggctcctgcaggttttcgaaattctttttcctgcacacttgccttatactcttttaatatcaccgtcagatagttaccccgctctgccgatttgagtttctttgtaaccgtctggtcacaacggatctcaatactctgatacatatctccttttaaaatatacacaaacgggttccaccagaacacgatacacataatgttgatcagctgtatcgtcagtatatccttattatccaaatgtgtatattcatgtagaataatataatgcaattcttcacgcgaatattttttgtccggaatcaatatccgtttctcaaaaatccctatacaacacggtatttctaccgcggctgtctgtacgatcttaatgttccgcttttctttatccgtacaaatttcatctaaaatattatttaattctgtatcttccgttttttccatctctgaaaaatacgacacaactctgtgatactgtatcagataccgcgtcaaaagaactgccatgaccactccccatgccaccacaaatatatgatagacatagatttcgtgccctgccacacaggttatttcacacccgaatatctgatacaggaaattatacaggctgcctccggataccactttcgtccatggcaattccaccgggacggcaagcctgatcagacaaaacaaatataaaatgatgattcctgtcatactggataaattcagcagaaccgatcgttttctgagaatgtagcacagtacaataaaaatgttacaccaaacgaacgtcatccaaaccgaaaatatcgttatttgcattcttattcctcatcatttttcagagtatcaataatctcctctaactttgcaataacctctgcatttttttcttttgcctgcttatcttttgctccgatcagagcagctgtaatgttcgcaatagaactgctgtcaattccacgcttaatcaatacagatgcataataatcgtcttttgacatagacggagcgagtttacgtgcataagtcttgacggttttctcaagtcctacaacttccagatagccatccgttgtcagagactgaacggtcttaaacaatgtaacattgttccatccgtcttctgccagacgctctgccatctcgttggcagtcagcggctcattgaccttccacagaaaattcatcaattcttcctgtcttactgttaaataatctttgttcttcatgtttcttcctccgtagttttataattttatatgtagtaactatcattctctgacattacatatatcccccactctgccttatgtgtcttttctacactagacagcctactttatcctatcatatttgaatcataatttcaattgcttctgacaagaaatatgccattttagataaaaaaagaatagccgttttcgcaaacagctattctctcttctcagaaacatttatttttgataggtgtatgttccaaccgaatacttaccgtgcagatgtagcgtctttcggaacctttgccgtatatattattttatttgtatccgtagtaactgttgttgtcatctttgaaaatgtggtatctttatctgcattccttcggtattgtaaatgttgcagccttattaaaatttttataggttaccgttgcttttgcctgcgaataaacaagtttcagatcctgtcccagcttctgatacagcgccgacatatacccgttcataaacgctttcatatccgccgtggttctgactggacgacaggtttttttatcgatccaacaggtcactttgattgccggcaacgtattgtaatccacagcagctgccgcattgatctctttgctcattcccatctggtccaaaaatttcaccacatcggagccctttacctgcgccgaaatctgaacggtattgatccggttgacttttattttctttttcacaatttttgcatccgaatacatggaaatatccatacctttgatctgattggtatagtttaaaatccctgttttctgatatccggaaccattggaagaaatgtactcccacagcaatccatccgcatcttttgtcagataggcaaccgcctggttcttagaactcattcctgcaagtactgtggttgtatctgttacgctttttaccttcagaggactgttgtatacgctttgctttaccaccgtcttattttgaatgatctgcccttccattgtcatcttctgatcggttgtctgcgtaaaatcatatgattttaagtttcgcaccgctatatccatcttttccaaatactgctgtgcagacagcgatgccgcacttacaggtgtaacagctgcaaatgtgctgagtatgacagacagtaccaaaatgaccgtaatttgttgtttttttaatgctttcatcgttttcgttctcctttctttatgtgtcgggcctggacgctggttttatctcatccttttttcctataccatgcacctgtcaaaattaatattactgtttaataaaaactctgtatagtcacttggatttttcaggatacaataaatcattggatcttatgttgtggtactcacaattgagaacttatctggtagccatcggtaatcagcgtacctttataaccctgtagataatatcgggcctccatcccgatcactgaattgtattcacaaaagaaatctctacttgttttgcattccattctgtcttctccataggttctacgttgtgctcccttgcattcattccatagtgaagttttatcggatttgcagtatgattaattttatcattccgataaactgtatatactttcacatgttccggttctacatggatttccaatactcccaccaatgtgattttttcgcacatcaacgagttttaattgagtttttaaaaagactccactcaatcatattttcagcgtattcattactccagtacttgccattaaaagtaattgagttttctattgagttttattttaccccaaactcaattatcactcaatccatcaaatataacatatctagccgccggtcctttgccatttaagttaattaacttctcacttctcatcttgtcaataacacttcttgcctgttgtttagtaaatccacacatttcctgtattttagcagatgttatctggtcattcgtctgtaaatactctaaaatcatatttttagccttgatatactggactgttttatctcttgtatattccacatctgactttaatgcttcataaaccttagctgtcagcatgtattcctttccaacaatctctattaatccactactaatcagttcattacatgattttttcgtttcatccagagatttttggacttttctcgacaactctgataactgttcccttctgttatctaaaagatctcttaatatcatcatctcagccaaagacataattttactatttttatcttgtacttctgtaataaacttaacaaattcagtattatctattgcactaaatattgtaagcgaaactgcatcattaaatgatctatatcttggatatggcttgcccattgaaaccatgtccttataaataatatctactccctgacctgtcctctggacatacttcaaattttgaagtgtctccgctattagtttattcctgggaatcgatggatgagttataatattatcctctgtaattccatcaagaaatcctcccggattttcaataactattcgatctgggtattgttttacataaaccgcagcattactctggtagtctctatgagacaacgcattaagcaatgcttcctgaaatactctttcagggaaatcctcaacttcaagtctgaataatcctacctgaatattttctatcttactgtatgcctgtacccgctctgtcaacttgtcgataacgcttatcaacggcaacttcaaatctagccttgcatcatattcctccaaattatcagctgaataatgtaggtatataacttccgcctgcggtaacaatctttgaatagatgcttcttttccaacgaacagtaacccagcaatcgtcagtctttctacatttccatcatattttacaagttgtaaatctcttaaaaactcaatatcctccaaatccggcaatgtagatttagaatctctgactctcagcttttcctttaagctgtacacttccagtttatttacatcatccagagtactctctccaataattcttcctgaaaaatccggattctgaacagaagaatatacagcacttaattcatcaggatatgctggctttgaatttctccccaatcgtttcaggcatctaccatccgtagttgtatatgtctttccatctgctttaactgatattgcaataacgagctttccctcatactcaaaatctgatatttcggtgaatagtggtggaatggttctatcataaatcccctctataattcgttgcccatcatagtttctatcacatcctgtaaccacaaccggattatcttctactccaaaataaacagttccacccttgctatttgcaaatgctatcaattcatcaaccgcaagcgatataatttccttcatatttcttgcattaacccaagacttaaattcaactgtatctgtttcctctttatgtaatatttctttaaattcttgttcagtcatttacattacaccttacttctctatcattatcgccaaatgtgatctccatcaattcacctgctatatctttgctcatgactctcataatactattatctatcttatccttcgccagcagattaatattcccataccatactacttcctggtcaataacagcaaaacggtcacaatattcttctactgtttttatataaaagccagctttacgcatatcttcatgtagctgcatccaatatgctgcatcaccaaatccatatgaatccggcatccatgtaactattgtaatctgaactcctgcctcctgtttttcctttagcatgctgattaattcataaactttttgtccgctgatggctgggctggaaatgattatatttttattggcatcaagtagatccttatggaaagtttctctataattatctcccccatatattgcattaactatctgtttatcggctttcaagccactagaaagctcgtagccaatctgtttatatgccttcagccgcttcatatacatattatcaaacattgggatatgattatccacataatcatatattattacattttctttacctgcataatcacgattcaatcgtcctgcatactgttcaactaccccacggaatgatatgggtgttgccataaaaagtgtatccagtcttggaaaatcgaaaccttctcctaccagggaacctgttgctactaatatcattgattcatcattcttgacctcatgcattagtttaagaatctttctttgttcttttttagaatttgtatattccggtgacacttggaacggaatatacaaagagacggtctgaaagcattgcgttcataaattccagttctttctgcttgtctttcagaagctgtacctcggtctcttttttccgaacctgattctgcatgattctcataacttccatcatgttttcacggctcatgttattcagctgttcctctgtaaaaaacggatccatccggcaatctccaaactcttaagtgataattcaagtataacataaaaaagcctgttacttcgagaaaaatcaacgttttactgtaggaatatatatcgatatccacgagtatttcgtattttttgcgaattgacaaatccgttctttatacaacaatctttggatgacgttcttcaaaagctcccttcggagtaagtgaaagaccatcacacagccaatgcatttctttcatggtcactttctgtaattcatccggggtttccggccagtgaaaggaatccctgtcaagcctcttcatcagaatccagaaaccagatccgtcccattgcagaatcttaatagaagtccgcctgcggttgcagaacgcaaacatgcagcgcgaatagggatcaagtttgaatttcagcttgataattgcagccagtccgtgatagctttttctcagatcggtagctccacaggcaaggtaaacggttgtgccacctgccagatcaagcatgatctttcagtccctgtatgagaacatgaaaaagttccggtgggcattccggcatcacttcgatccgaatagcgtttgtgataaaaatgcggactggagacgggctgatgttcaaagtctcattctttgaaatttctttttctgttggcatttttgcaaaaatcatatctgtatccgattgttcgtccaatgttttcagtttgcgcatccagtaattcattgtagagactggaatgcgatgttcctgacaccatgtttttaatactgctttaatcccatcacatattccgagtctttttcttactatgcaaatcataagtacagtagcgaagaggcaccaccatatgatatatgtataatgaattttccatatctatcacccttatccctcatgttcaaaaaattcttgacttttttcctgccattcgctattctgagttatttttgctttttggggggcgaggaaggaaagaaggagtgagaatccaaacggttcatagagagcagtcaggatgtttgtgatgatcttgccgagtaaatcaatcgtttctttcatcgttatttatagatcactgaacaggtcggccttatacacgccattcgccaacattttcttgaagctgtctttcactgctgcgacatcctcatggtaggtcatgccgtaccaggtgtcgttggtcttcagaaccttcacagacatcttgccctgctccagcagctcaccgatgaagatggggatcagatactcggctttctgaggattacccggtacttctttctggaaaaactctttgaatccgtcctccagtacatccagaaaatcaggagtcaagccccacatattcatggagaccagagaatacacatcgactgccacaccatctacctctgctccatccgcagtctttacgatgttcttggtctccacaacctcagtcaagttgttatcctcgtccatcttgcagataccacgagtcacaccgccattatcagacagggtattcttcagcacaaagccagccatgcaagactcaccgccatttaccagatactcgtggacggccttgaagccttctttgccatagtaatcatctgcattgatcacaatgaacggggtatcgattacttccttcgctgcaagcacggcctgtccagttccccacggctttgtacgtccttccggcagagttcccggaatatcgttaatgtcctgaaaagcgtaatccacagttacattatgagcagagcaaatagctgcgatacgatcaccgatgacctctttgaattccttctcgatatcctcacggataataaatactacatggttgaagccagcctcaattgcatcatgaatggaataatccatgatgatatgtccagtatcatccactggctccaactgcttaatccctgttccgaaacggctaccgataccagcagccatgataagtaatgttgtgttcatatctctccttattgtgttcatattgctttaactgagcatccttaacacatacagattcgtaatttctttatgttatactttctttagaaaacttttagaacatatttactcattttattagtatttcaaagggtctgaccccaatgtctcaactcctttgtatattctccgtttcgtcctcttctcaattcatatgtaaactctaaccctgaataagttttaaaaatgtttccttgaaaaaaacatactgcatcccataagttttccccagttgacttcctttgtaaagtctcaaacaaattctgttcattcatattttatatagcttcccttttatcttaagatacaagaatttcaaaaaaagttttatgttctttaactttaaaagttctacgatatctacattgggcaatatttcagccagctcattggttttattttctcgaataaggatctgattcaagtagctaaacattgtttcaaaatataaaaatgatgttttctttttactttgttctgtacaagtaaagtcctgcttttttatttcctccatcactttatatttcgatagatatttgtccagtcgattattattaacagcactaccctctctattccgataataatacagtttttcatttgaaactgcaattgtactacaatttttcaagtactgtaatacaaacaacaaatcttcccagaccactatatttttcagaaatttcaaattattattttctataattcttttttgaaatatcttgttccataaataaccatcataattggagccacacaatatattttctatcacaccagacgcattaacaccggaaaatccataaaataattcagattgatcaaagtatcctgtttttccgcaatcctaagaatccattcggcacaattttcaccacatgcagtacaatctatccataactctggctttttgtaaataaggataagagcctttaccccgccagacaatcttgttgtcggaataattccaagaacaggactttcaattgcatgggatgacaatacctccaacttgtctaccgcccggaccatctccttaacaaaagggtcatcaaaccatttttttgaataggtatgattaaaataagtatcggggtcgctaattgcttcatcgacctctccataaacaatcgttaacataattatctctcctgacgcatatacagttttatttaattactaaaaatccgttatactttgcatatagtataacggattaatattaaaaatacaattttgtttaaacagtgatacgaatccctgccctgaaaacaatcttctatttgtcgaggctctcatatatcttctctgcatcatagtccggtgctgctttttctaccgcttcatatatcgggcgcagggtatccacgctttcttccaagtcttctgccacggcctccatcgtatagcctttttgtactttttttactgtaatctttattattttaagtatctctcctcttgaaataccgcgcttttctccgcgcttttctcctcttttttctcctctcttttccgcctttttttctctttcttcagcaacttcctgtgcatacttttctactgcctcacacataagttttctcccacctttcgtctccttgaaatgtttcactccatctgccaatgccttattttctatcttttccgcttcgctttgatgaaaatctcttatcaaccttccgacttcatcatcgcctttatattttccatttacatatataatatgtgaaccatccgaaaacaactccccagtttcctctatatgtctattgatatgatacactggcagcccttttccaaacttatcatgcttataaataaagatcacataggaatccttcaggtctctgaacttctgctttttctttaacatccgggcgtctgtcatgctgctgtgaaaacgggcacgtctgatatgcgctccctctgctccaccttgtacctcaatgtcaatttcctgtccgtcttcttcctctgcatgcacatctaaggtaatatttcttccgtttgtaactggatttttgaaattttcctgccccttgacacttaccaccttaatctttcttccaagaatgatctgcaacacgtattctgttgcttcgatattcttatcaaacacccggctcatcagatcatcatcaaacagtgtcaactcatctatgattttgttgatacgttcctcgtttgccatcccacttctccttcattataattgcattttattatttttacaatgtaaattataggtgctctttccccatatgcgcacctatttatcgaacgttcgttctattttatcaaaacatatcgcagttggcaagcgccctttgcaggaattataaaataattttagccgcctaaaaattaattatccttgaaagcagtaaaatatcaagctctcgcaattaaaaaagagattttctaataaaaatatgtaaacctatgaactacttactttgcctttccctcactcccaaacaacgaaatcttctttttaatcagttccttaactgcctttcttgcctccccagctgcattctttggatcataaatatccggtgtctctgcatagcttttttttatagcttgtgtccaaatacatcttaattctgtagctatattaattttgcaaataccatttttaatacaacttctaatttgattgtcgttcaatccagatgccccgtgtaaaactaatgggacatcaactttttttctaatttgatccaacctatttatatccaatttaggggttgatttatactttccgtgcgcagtgccaacagctactgccaatgaatccacctttgtatttcgtacaaaatcatttgctgtttcaggatctgtatacattaattcttccacccttaaatctcctggtttcccgccaattgcccccagttcgccttctacggtaatatcaaaatttccacataaagcagtaactttcgctgtcaactctacattttccaaatatgtaagtttagatccatctatcatagcagataaatagccacttttaataactccaataacatcttgatagctttcgccatgatctaagtgcaaagcaactggtatttctgaattttcacaagttgattttaccattgaagaaaatatatttgaagacgcatatttcaatgtattaacagaagtagccaaaattataggtgattccatttcttccgccgcctcgattgctgcctgaacaaattccatattttcgatattaaacgctcctatcgcataaccttcgctctgagcttttagcagcatttttcgtgtatttacatatggcattccactatagctcccttctcaatttcaaaatttataaatcatacttttccatcaacatttcaagaattgccagatcactatgataagtcacttttaacatattttcaccaccttccaaaaaaaatggttttattccatattgttcatacataatacgcgtatcgtccgtataatcaaaatattttccagacgtatatgcttcataaaataagtcaaaatcaaatgccaccggtgtagatagtttatataattcatttctatttaaatagcttccatctctctttaccacagtactagttaatggcaatgcatacgtagtacttttatgttcatccttaataatcttctgtatttgttctagtgtaatcaatggtctagctgcttccaatataattactctttcatatgcttttcccttttcttttaaatacgtcaacccattaattacggattgagatcttgtaatccccccctctgtatcaacccctacaacaacaatatcctcatctgaaataaatttgcataatttatcatgaacatgtttccataatggttttcctttaatttccaaaaactgttttttccccccgaatcttgttccttgtcctcccgctaatacaattgcacatacatcactcatttttacttcctccttcaaacaaatttaaaaaatttttttttgataatttatcatattttgtgtaattgttacttaaatcaacataaactccaccatgattattatttccaaccacaaatttcatatactcaccatactgttctttcaaaatcagatcatactctttaggcacagatatactaatatcctcaaatggtacttctatagtttccctaagccattcaggctcaaacaaaacatttcgtaaagaattagtcacttcaaatgaaacattctggtatttgaattgttcctctaaacttcgataaatagaacaagttttttcaaactctcgaaagagttttctttttcctccataaatatttaactttacttgataaaaaaattttaaaataacataaattgtatggtcatacattttcgccacatgtggatgttttctccccatatagtattttggctttgtcattttagagtatgtcaaaagaattctgctatataaatctcttttctttttttcatcatttggtatcttgtccaaaataaaaatatctataaaaacgcctctatgatatttttcaccataatctccaactaacagacaagttgtatcattcattctcaattgtgcatgggatctcacaattttgtcagtcaatgcattttggaaaaaaacttgcgaacagaattgattggataccttttctaatttctcatactcatctctagtcatcataatatctatatcatcatcccatggaatataccccttatgtctaatagctccaagtaaggttcctccacatgcataatatataatgttattttttttacaaattatttgaaattctttcaacaactttaactgtacattccaaatttttttcatatccatagatatataatatccatctctcttttcagcatctaaattcatttcaacttcttcccttcttgttcttaaaatataaaactccccgcctaagctcaataagcatccactcatctttttctatcattaatgcaatcaaatacgttgcaattcctatcacaacctgacaaatcaaaaccataagttttgacacatgcagataattttccaaacctatcaccacaaaaaacatcaataatcccgcaactatctttttatacatacaccttaataaatttccaagtttcataaacccattacaattcttcacatataaaaaagtaatactcaattctgcaacaacagaagcaaatgcagctccattagctccatattttccaatcaagcacaaatttaaaattaaattaacagcagatccacacaacaaatatttcgtactatcattccgcctgccactgggagtataatattgtgaccctaggcaattgctaattccgataattgttataattggtgcaaaaatatataagagagtaattacttgatcatatccttttccaaaaaagagtggaaccaaaatctttgcaactccagctatcccaaacccacatccaattgtcataaacaaaataaaatctatcgatttacttatacgatctcttatttcttccattttattgtctacaaataaataggatattcttactcctacaactgcattaaccgcattaaacgaaacactctttgccatattaataatctttgtagcttgttcataataaccattctgtgcatcattttgtgtaattaccccgattaatgttttatctaagactgtgtaaattgaagtagcaattgttggaataaagtacattaacatctgtttaaaatgatccttaagcattaacgatttaaaagtaattttacatacatagtgtggcaaataaatccacatcgataaatttgccaacattgttgttatagccataattaagatatacaaaaccaaatcattttcatcttttacaaacataaaaatagcaacaattccaattgttttaaacaacatattgcatgtaactgtcgttttaaaattctctaatccattataaaaccaactgatatcaaacattgccccaaaaatatatggaatcattgcaatgtaatatatttgatttttcttatcgaaaaaaatcaacccaatccatgctagtaaacatacaatacaggttaatacggttatcaactcaatttcataaaacttcttgctatatgcttctttattatctctggcttgcgatatttctcgatttccatagctcgcggttcccagtgctgcaaacaaaaggaaataggattgtattgacccagtataactttgtattccaattccatcaggacctaagactcttgatacatatggagcagttataaatggtgttatcatggtgaaaatttgaaacatcatgctatatacaaaattatactttaaattattctttgaaaccttcactttttgttttattctccatattctattaaagtaaaaagagcaaacctgttttcatatctttgattttattctctctattctcctttacccaatacaaatctagtattttctaaatattgatctgtatgggaatacctgttcagccccattcaaaacataaaatataaacaacacaccaaatagtattatacttgccatatacaacaacattctttcttttttgttgtttacatatttgcgtatcgcatttggaatcaatataaactgcgcaaatgaaaaaattcttacaactcggtaagctgccggaacaattccatctaatgcacacacacataaaagtgcacattgactcataagcgtaatattccactcaatttgatccttgcctgttatactctgaaatactttattatttttcttttcaatatacacaaataaaatcaagatcagaaattgcattagaatataataccttcctatcgtattacctgtatatgccgacaactcctgtgcctgaaaatatagctgtaatcttggaatatatctggcaaagagctgcacaattcttcctccgataatctgcatcactccaaatgccactattgaaacaattaaatatgtaactgcagataacataattctatctgcaaaaaataataataaaaaaatcaacgatacctgatgcatcgatgctgaaagtaatacccagactataaacgctagttttctgccctcacacagacattccattgcaagtaataaaaatgcagatgcaagtgactgtcttacattatttaatgatacaaaatatgcaaaagtcagatacagcaataaaatagataacgcatatacttttgattccctataaatctgtcgatacacaattccaacaaacaaaatagaacaaattacgattatccactgtccatcgttggtaaaaaatgaaactattttatttaataaataaaaacctatttcataatatcccctatctcccctggcaatactattaaactgcggaatataagtataggaataatcggttcctaatccgtagcgtaacgaagaaaccagcaatggaaacaataggctgatacttatcatcccatttcttttgatgtttttcatgtaaatagtgctcttggattttttctttttcttttctgcataaggtaccaaacaaccacttatgaccgaaaaaataatcataattgcatatatcatctttgactcccacgttttatccaaaaacgaaacctgttagtaaatcttcttctcacaagccgaatacgatcaaaaacaggtaattccatatgaatcaccggtaaatgttttaccaccaatttatttttaattacccagacattcaacaaccgctccgacaaaaagccatacaatctttgctgataagtatttaactttgctaggtctacttgtttttccagcacaaataggatcgaaaacagccattcacaatatgcatcaaaaatttctcttttgcaaaaaagcatattgaacaacgatgccttattttcattaaaataacgatcatatgtttctatataatctggatattttgtttcaattatctgacgtaatttatcaaaaatttcttccgtacaacaatgaagcaaaatttcttcttttgcattttgcttaaaatactctacataaggaagaactatatctacacttttcaagcaattcaataaatattcatatgaacagatatcggaaattttattactaagattgtttcttccaaaatatcttctataatgcaccaatcccttatatgaatcatctgtatttttccaaatccaataaaggcctgtcagctcacaataatttgcatttttccctgaaatatgattacctatattatccctcagatacccatatttttcttttccctctgcaccaacctgtaatgcacagtacccattcagatttggcacattaaactttttatgtgttgcaatataaatcattagactcctattatcctctatatagtttcataaaaccatttaccgtatctacaatatcaaattttgcatttttcagaatatcataagcctttattcgatctcttttttctttcccataatgaataatggtatccaaccattttgacacatcacgggcatcaattccaagataacttaccgcctgtgtaatttttgcttccctcgtaatcgtatccgaaaagataacaggcaatccagatgcctgtgcttccactccaacaattggaagtccctcaaaatgggacggtaatgcaaataaatccatcgccataaacaattcatgaaccttcttactaacaccataataaatgacgtaagagtccaaaccacaggcatgtactttctcccgaaaagctttttcatttggtccttctccgaccaacaacaattttgcatgtaaaccgcgctcccgaatttgtttcaaaatttccagaaagaagtcatgatttttctgataacaaaaccttccaacgtgaccgatcaataattcgtcactaatttgtaattgtttacgcaccatttcacgtacagtctgtgaaaagcgaaatttctgtaaatcaattccattttgtatcaaagtaatctcttttgcggcaatatttggaaacatccattctgcagcaatatcagaacatgccacataatctgtcccgatccatttaagcaatctgcgacatcgtctgtgaatccacgcctttaaccatcgatgatttccatcaacacctgctgcatgcgaatgtaatataattttagtgactcccgcagttcttgcagccattccagataccatcagcttattcgccacatctgcatgaatatgtacacaggtataattttgttcacgaatcagttttttcaaatgaaaaaaacaaatgaattgcttaagccacttatttccatcatatcccacatagtatacctttgaaccacatttttcaaaactttgtatattttctttatccgtaaacttttcgattgcagctatatcaatctgcatatccttcggcttattttttacaacattttttactaaagaaaacactcctcccaaatacaaatcatcgacatttacttccaataccttatcgctcatattctttgtatcagcctttctattctgtttttccttcccacaagccacacatgaatccccgctttatgcgcacctatcatatctgctttgatactatctccgatgtgaatcatggattttaaatctatttgccagtccttacacgcaatttgaaataatttccctgataacttattttctccatatgtgtttgatacatatagtttctcatagtcattgatcccgcacctttgtaacattgatacaatcacggtttccggaagatacatatctgaaataagcagaactctctttcctttttgtatgcactgctcataaaaaggaaatattgtttctttcttatggcagttttccaattctatttgcacttctgtcttttgtaacaattctactatatcagacttatatgtatcaaccaactcctgataaatttgatctaatgtaatctcacaagatttctctcgggcctttttttctgcacgtatcctgttttcgagaaattcccggcgatgttcttttcccaaaactttctccccaacaatttcaaatatatcagttggttttgatacgctgcgttcaatcagggtatcaaatatatcaaaacttatcgtatcaaaatgtgttaaaatataagcggcaattacttgattcattttctaaatatcctgtaaatataaaaataaggaaacggtatcttgaacacagatttgagaaatccagttttccatacactattgcttaacgcatgcattaactccctcggtttgtattgtactaactttttctgactcacataatattctttttccccatctgtattgtaaaaaaaagaaaacaatttaaccatttttaatgtaggatttttcccaatggcaatcaacggttgtgcaaactttacataatcctcatcctcttttaaataatttttcttttgttcaatataatcaagagccccctgctgccattccttaatacaacacaccaatttctgttcttcttcatattcatagtgggcgtaaaccggccaaatcttatctcctacttgcctataactgtccgttgagccttcggtactctgtaacattctttccatgatccctaaggaacataaaacactctttctttgttttagattttgtggattatataaatatccactacaaaatccacaaattggaaattgaggagagattccaatataatatccataaatttttaaatccaatccattatattttgcaatctgttctaaacaatactgcattgacccatgccagccaatatcaacaattgcacaagatcctttcattccaatttgttcaatataagctagcagcaattgcctttgttgctgtgatttttcgtaaatttgttctttcagacatatataaatttgttcaacttctttattatttttcaatccatcatatgcataatcttttgacagttcccacttatgcaattccgccagatgttttctctctgttgcgtcgtatccataatattccaataatttagaaagtgtaacatatttctcccatcccaaatactgcaacgaatcctgatacccacttgttgtatacagcaacgcttgtctcagacttttgcgtgaaaaatggacatattgtgtgtcaaactccgcatcgtatcctaattgctgaaatgccagatccatcatatatccatctctggaaaaaaaataaacgcgatgtatctgtgcctttttcagacttgtatacaaccatttggtaaatccatagagaaatggcccaaaataatcgattccaaactgataatatggtgacaaatttttcacagatgtttttttaaaaactttcttcatatttttttccaataaattttgcctctataaaagaaacaattttccttttccaattaattttttccgtatatagataagaaagttcttttatctgatctttctctacctttttgtcccttacctgctgttccaaccaaacattaaaaataatctcgctcactcttccataaaatctgctttgaaaagaagaaagattatcttctcctattttctgtttcaatgtaaacaaaatatcaaacaaccatgtgcaatattcattcataagttgtctgctcataatacacatattaaacatataaccataggtgcgatttacaacggcatcaaatgtattcacatattctggatacttttcctttaaaatttcttttgtcaaatccaattgttcagcataatgtgtatgtgcataatgcgaatacaaagtttcaatataatattttcttttctttggaacaaatatctggtaacattccagcattggttttaattgcctataagttaaaatcccgtcaaacggattccttttttttgttccaaaatagcgtctgtaatgtaccaaaccgatataatcagaatctaaatttttccatgcccaatataaacctgttaattcgcaaaatgatggattcaatattgaaatattttctccagtgttatccttgatatatcccaaatccaactcatttccatcggaatcttttttcccctccgcaccaacatacaaaggaatgtacatcgcgtctgacggcattttatattttttatgagttgctacaacaattttaactgaatattcactcattaatataattcctttttacaatacatatttttttaaaatttttatttttcgcatgatccaggatgctaaaaatgataaacatacaaaaatcaaacaaaataacagtgtcatcactggataaattttaaaacgaattggtgtaatctttaggaatcgatacacaaactgaataaataaaggatgtattaaataagccccaaaacataatctatctactctccaaagccagaatttctcactccattccttagatacaaacatcaaaaatactacagctgctaacacaccaattactggactgtcatatgaagtccaaacttttggattccaactcatgctatttaaaatccaaatcaatgccacacaaattattgcaattattccgattagttttctattaactttctctttatttttgaataaccaatgtcccaacaagacataaaaaaccggatataaaaactggctgttaaaagcaattttcaaattacttaatcgagaaaataacggaaaacaaaaatcaagaacaaatagtgcacaaagtactaattgtatttctccctctgaagcattatcaacaaatttctttaacacgggcattattaaataaattccgattaaagcatataaataccaaagatgtccaaaacctgtatctgataagaaagctaaaatagccttatccaataagctaattgatagtccatctgccattactaattttaatgcagcatacggaataccaaatacaacaagagcaagcaaaattctccttgaatacttaaagagccactcactggatttaacatgcatttcttttctcaaaaacagcattcccgttatcataaaaaataccggtactgcccaatacatcatttgatatgatgcattaaagaaaatcttttgcattttgctcaaatcaaatagttcttgattttcacttaacgtactacatgtatgaagataaattacacaaattgttgcaaatatccgtagatagctaatgcatgactgccaattattgttttttccatggtacacatcaaacaatttttcatcatttttttccatattttaccgctcacatcgcaccttcatgtctcagcacgactcccactgttttgcacaatattttcacatcaagttccaggctccagttcgcaatataactgcgatcaagtgctaccacctgttcaaaatccgtaatctcactgcgcccgcttacctgccacatcccggtgatccccggtttgattgccaggcggcttctatggtgcagctcatatttcacccactcatcttccgttggtggtcgtgtacctaccagagacatatcccctttgagcacgttccagaactgtggaaactcatcgatagaccagtcgcggatcttatttccaagccccttttttatcgttccgtccggcagacgcctgctgccgatgatgcgcgggtcaaaatccagtttaaacatcattccgtccgatacacggttttctgcagcaagtgctgctttgcgctcctccgcatccagatacatactgcggaatttatagcacgtaaatttcttgccattctttccgatcctggtctgtccgaagaagatcggaccgggcgattcatgatagatcatcggtgcaaggatcagaaacagaattcctgtgaggatgcatccgacgatgcctccgagaatatccatcaaccgtttgagaaacaattcccaggtacttacggtacggatgcttgtggtcagcaccgtgtatcgtccgagattttccacaaactgtttgtttgccgccagatccatccggttggcaagcttcagatgtaccgttactcccatctccgtcagctggtcgatccatctgtctacccgcggatcatttggctgcagatcgataaatacttcatccacccatgcatggcacaagtaatccataacagattctccctctgccacaaatgggatgtcccccagtttttcgggaagtgttttcttttcattgacatcgatcacagcgattcctcgaatctgaaacagttcatagctgtgatgttggatatcttcccgcacctgtggaagattggcccagtcggtcaatatcacgatagaattctttcttccaagccgcagattccgcaatacatgccgtttccagagaattcttgtcccataactgattatagcataaaagatagcggtcagaaacagtgtaatacgagaaaaatcacccgcatctttcacaaagaacagataaaacacggcaaacagtatcaccaggctgacctgacgcatggttgccgccagttctatgagcagtccacgtttcagaacgttcttacatgtatttaaaaagaacatcatgcatacatcaatcaggatcaacacgatggcaaggtttccatacacggaattggaatataaattcagattccggtgtctgacgagatatgccaggaaaaaagaaacctgcagacacagaatatctagtatcacaaaatcaatgtgtttgatccagctgttttttgctttctgatacatgatgtctcctttctttcatttttatgattcttattacttttgttcattcccaattttttctatgggaaagggcacagcagaatcaactctgtgcgcccttttcaagaacccgagattatttagaaactttctttacggttcctttgaatccggctttcttcagctgagccttgaatgctttcagctgctttgcagacataccggaaaccttgattgtcatctttttggtgtctacacccttaaatgcagtcttgtcaacctttacggaagcagacttgatgacgattgtctttacagactttgcacctgtaaatgcctgagcgccaatggtcttgatgctggctggaagtgtaacagttgtagcttttgtagcatttgcaaaagtctttgctccaattgctgtaaccttgtaagagactccatctacaacaaccttagaagctactgtaacactcttctttgttgtctttggtaaagcctttacggttgctgtaccgtttgctgcggtacttacctttgcgccattatcagccttgacgtttgtctgtttttccggagctggagctactgttgcagaatctgttgcagcataagcagtacaaacagatccaaacatcatagtagcagcggtaatacctaccagcaccttcttgattaatttgttcattgggatataatcctccttccctgattatttatgtgaaaaccctttcggggaatcacctatttctgctctgtgccatagccataatatccatgttttccatagtagccatagccttttccataataactcttgccatagtagttgccatatttgtgataatatccatttgcagcgcctttggcacggctgagtgcaatgccgacaaccggacacccggcacgctccaactggcggatcgaattacgaaccattgcctttggcgtttctcctgcgcggacaaccagcagtgcgccatcacacagcgagccaatcttttctccatccgataccagattcaatggtggagcatcaataaacgtataacgataattttcatccagttcctcaaatgtacttgccagtttctgtccttcgagaagcatggacgggttaataatattttctttattcggaaggagatctcccgctccgatattggtacgcaacacatatttgtccagcgtatcgtcacttgccagataatcggaagttcccagaatttttccattgtcttcccggacaatctgatatttgtcaaccataacactcttgcgcagatccatgtccacaagaatgctcttgctgccggcttctgccatctgccgccacagctgcatggcaataaaactttttccctcatccggagcgctggatatcaccatgatttttttcactttgcttccaagaaagctcacattgacgcgcagacggtttagtgcttcctctaccgcatacggaagtttcggcatattctggactgtcgcacggtttttcggtgtaaattccattactttttcttccttcttttctttttctctttactgatcgctttttctacctcatcagaaatttcttcgatatccccctccggaataacggtaaacggcatgataccaaattctttttcgacatcctctgccgtatttaagctgtcgtccataagcatacgtaccacgaagatcacggctacaagaagcattgcaacaaccgctccgagaataatatttttggcaaggttcggcgaactcggttcatctggaaccactgcatattccgcaatggtcggctgtgcattctcagatgcattcataactttcggaatataggttaccgctgtatctacaagttcattgaccatcgactgtgcaagttttggatcattgtcctccaccgacacggcaagtaaccgtgaatctccaacaaccgagatgcttactttcttcaaaagatcttcatattccatatccagattcaggttatcaatcacttcattgaacacgggacggattttgatcaattcggtatagtcctgggaaagggatgttccgatattgaaatccgacagatcaagcacacttccactggatgcggaaatcatatacatttttgcagttgccgtatattttggtgtgatcagaaaatgtgtgatggagcctgcaatcactcccccgatcacaaatgcgagaatcagccataccagctttgcccgcagcagataaaaaatttcaagcagatcaatttcggtttcttcgctgttctgctctgtcagttggttttcctggttcattcgttactttcctttctcttgcaccagtggatacagttgtttcatggatgtctccagtgaatcttcatccatataaaactcccagtgctttttcccatcgtgcagcttttctccaattttggatgtaccgtcgattgtgataattcctttgtcagtatatccctgcatatcctttaacagggcagttagatcattcatcttaatatctgtcgtcgcatacgggcgcagccggtcatataatttcacggtcgcattgacatcccccgcattctgtttttttatctttttcatgaatgcgtttaaaaagatctgctggcggcgcatacgctgcgtattgcgatcgtcatccatggcataccgggactgcatgagcagttctgcctgccggtccgtcaaggtaagcgttgcacctttcttcatagccggatccagcttggtcatatcatcttctagtgtaacggttactccccccacctcatgattcagaagtggcatcgcatccatttttaatgcatagtatccatcaataggcagccccccaagcattttggatacggtctcaaccgtattgtcacagcttgcagccttgtcctttccataccagtgtgccgtacaaagctgcatctgtgcactggcattggcacttccgtcttgcaaaagcattggcacttcagtgatggtgtcccggttcagctgcaaaattccatatgttttttcttctttgtccacaacaacaagcatcagtgcatctgccatcgagccatgatattcttctccctcggcatcttcgtttccgcttttgtccgttccgataaagagatacgtctgaaccggatgggcaaatttccaggtctttttatgcagcttgatcgagacgggtttttcctgaaattctttccagacacgctgcgtttcattttctgtggctgcctgccggatacacacgtcgtgccgatccatcccacggatgataaaatatacagcaatgattacaagtacggcaatgataatttctataactgcacgcatggtcttctttttcccgttcactgcagtacctccctggtcaggcgatccgttttctggaggaacgcttcgccaaatttcttcacaagcacaatgcgtccctcggcaagatttggatgccgggtatccatgttgtgacaatcactgccaagaataatggttgtggcttcttttgcaagctgaaacgctttatgcctctttttccagttcagaaatacgcctgcattcatctgcctgtataacggaagttccatgacggcatcccagatttcttttttcttctggaattcgtaataacgctcaatatgggcaaggacaactttcagtttctggtgccgtaccagtttctccacatctgcataaatggcagaatcccactgggcaaacggcatttccagaagaagtgtctgtgttccttccacacaaagcttcgggatcattccagcacttccgattccttgaaaatagtaaacttccgctgccagatacagcttctggtcaaaaccattttcttccatcgcagtttttaatttttcatagcttcgctgtctgcgcagcaaaaattcctccacagaatccttctgtgcataaaaatggggagttgctacgatttcatcaacctgctgctccctctgcgctgctaacattcttagtgacatttctacattccggcttccgtcatctattcccggaagaatatgtgtgtgaaaatcaatcggcattttttctctttgctgttcataattattctataattatatttgcgacaaaaatattttactccatatcctggtcttctcacagtaggtttacccgcgaaaattggcgaattttcccgtttttccgtttgtaaacgcacaaatactcaagtcctaaacgcgcctatattttacgtttgaaaagtgtttattatattttaataactgatactatctttatataggaaaattggtaatttttgggaatacagaggattacgaaatgaataagaaacgggaaccttatgatagaattgcagttggcgagcgaatccggcgcaaacggatacagcttggcctatcacaggatgaactggccgtccggatcaaccgtgcaacaaaatactgttcggatattgaacgcgggatgtgtggcatgtccattgaaacgatgctggcgattgccaaatcgttagatatgaatttagattatatgatgtttggagaaatctctgaaacggagcgggaatggcagcaaaaagatgcaatgacactgatccatataatcgaaaaggcgcccgcctcccaaaggaattatgcgatacgccttctcaaactatttattgctgcaaccgggaagttgcctacatagacccgttctttttcacgacttccggtaccgtccggaaaagtattttcacatccagtcccagactccagtttaaaatgtaataccggtccagttccacaactttttcaaaatccgtaatattgctgcggccgctcacctgccacattccagtgattcccggtttg

SEQ ID NO: 429 - DNA, 22606 bp, unidentified
  source 1..22606: mol_type = unassigned DNA
ttccacatcgacctccaaagttatcttatgctgctctgccagacgatataaccgctctttttgcggtttcgtcgcgggcgtatctctttttacctgaaaatgtaatggttgcggctcaaataaattattctttgccgattttccgacagcttctgtcgatgcctgtccaccggtttcctccctgtaaaacagttctatcagctttcggaacaaccggtccgttgctttcgcatcctccagagcccggtgtgcatgatgcgggatctcataatactgacacagataccccagattacgatgaggcagttccggcagatatctccgggcaatctgcaaagtgtccaccgctgatctctcaaaagtaatcttccggtccactgccgccttttttaaaaaagaataatcaaacaaaatgctgtgtcccagcaacggtaattctcccataaattccaataattttgggaaaacctcatccagctgaggtgcatccgcaaggtcttcgtcccggattcccgtaagttctgtgatccgttcttccaatttccgccccggatccacaaacgtagaaaattcttccacaatctgtccctgctccacacggattgctccgatctctatgatccgatctctcttgggattcagtcccgtggtctccaaatctatactgacataagtgtcatacatactgatctccattttgcagccggttcctccgatatattctgactgcatacctcaatttttatgaaccgatcttctcctgtacttatagtatcggattcctgatcacctgtacctttgcctcataatttaatggattccgttcttgataatcaaacagaacataatgaggttccggatagcggaacggttctaagtgtgtcattcggcttaactgtttccagtcatactgatcataggcaggaagataatgtctctcctgctcttccgtctggtaaaaacggcggatattctgtttttcctcttccgtgatctctgccgcaaacgcaggcctgctcttcaggttctcccgaaggtacatatcatacgtcagaagttctctgtaaatctcacggttggccggatctttcatcgctgcgaactccaataagatctgataccggtaggctctggcggggctgtttgtaaaatatccctgttcctgataataatccgccagtgcctcatacatggcaaacggaccggaaaatgcattttccaatacaggcagggtatgagtaaactggccactgttataatacagctctaccatctcttcgatccgtttcagtctccggatctctccatagctgatccagttcgtgtacaacacttcatagggcggcagttccagatagcgaattccatactcctgtgcatgctcatgcatatcggatccctttaataccttcaggaagcctaactgtaactgctccggctgcattgcatacaccctgtcaaaggatctgccgaagctctcataatcttcataaggaagacccgcgatcagatccaaatgctgatgtatattctgtcctctgtgaatggccgcaacaattttctccagcttgtccacatccatgacacggtgaatggctcttatcgtctccggattcgtagactgtaccccaatctccagctgtgccagtcccggacggaagcggttcagcaggacaatctcttcttcgcgcaaaatgtccgcggaaatctcgaaatggaagttggtgacgccattgtcatgtttgtaaatatactcccatatctccatggcatgtttgtgatcacaattgaacgtccggtcaatgaacttcacctgttttacgttttgatccaggaaaaactgcagttctctttttacgacatctatgtcacgtagtctcacttttttatctatggaggacaggcaatagctgcaccggtaagggcatcctctactggtctcataatagatgatacgattcgtaaaaggctccatatcctcatagagaaaaggaagtgtggtcaagtccgtcagttctcggggtgccgtataaccggaggcaagacacagaccggggatctgtccaaagcgctctgccacagactttcctgcaagcgttcccgttcgatctgctgcctgctgttctatgctgtcgggttcgggttgctgttcggactgtccggtgctttctgcttcccgcacatattggcccagtacctcccggaaggtaacttctccttctcccaccatgattccggtaacctgagggaactcgcttaaaagccccggtccatcataagtcacctccggtcctcccagccagatctccgtatccggcaggatcttcggcaattccgtcagaatttcccggatcagcttccagttccagatataacaggaaaatcctattacctttggctgacgcttccagatcccctccagaatactttccagagattcattgatggtgaattccgccagttccacataaggctgtaacttttctcccacacctgcccgcaggctgtaaatagaaggattggaatgtatgaattttgcattaatagctgttaataagaatttcatgggattattatactaagaaaaaagaattgtgtcaccacaattccttttcctcgcaacaaatgtacaacaaacattcaacaaaaatatgattataagctctttacaaaacgatcgaacgccttctggccttcttcagttctcttatagacaccggcatcttccaatacctgcatgaataccagaccgatctccttctctacgataccgtcgatgttctcagcagtgatggcatcgtatttcggacggaactcgtctacccagtctgcatgctttgccagttcctcatcagctcttaagtctttaccggcgaggattgcttccttcagatgcgccatctcgcccttcaggcgggcaggcagtactgccagacccataacctcgatcaggccgatattctcttttttgatatgatgcagctttgcatggggatgatagactcccagcggatgctcctctgtggtgatattgttacgcagcaccagatccagttcgaacttgtctcctctctttcttgcaatgggagtgatggtgttatgaggctcgttatcggtgtaggcatagataaatgcctcttcatccgtatattctctccacttgttcaggattacatctgccagtgcaatgatacggtcagtatccgtaccgctaagacggatcacggacataggccatgccacgataccggcatccacatcctcgaaaccggctacggagaacgttctctctaccggagctttcgccatggcaaactcgtaatggccaccctggaaatgatcgtggcttaagatggaaccgcctacgatgggcagatccgcattggaacctacaaaataatgagggaactgctttacgaaatcaaacagcttacagaaggtcgcatgctcgatcttcataggcacatgctgagagttaaatacgatgcagtgctcattataatatacatacggagaatactggaatccccactggctgccgttaatggtcaccggaatgatacggtggttctgacgggcaggatggttcacacggcctgcataaccctcattttcacggcacaacaggcatttcggataaccggactgctttgccagctttgctgcggcgatagctttgggatccttctcgggcttggacaggttgatggtaatatccagatcgccatatttggtgggagccacccatttcatatccttgcagatacgatagcggcggatataatcggaatctctgctcaatttataataatagtcggtagctgcctcaggagatacctgctcgtacagctcatggaaatgacggatcacttcactgggtcttggcatcagcagtcccatgatcttcgtatcgaacagatcgcggtataccacgctgttctccttgagaatacctttttcataagcgtaatccagcatgcccttcagaacctcttccagttcatcctcgcgcatggtcacattgtcacggtcttccagctcatccagttcaaacagctccaacagacggttggtggtatagatcacatcttcctccggaaccagtcctgtctgtactccgtaggatactaatttacgaattaatacctgaatatccattttcttttctccttacagtgtctgagggccgtcaccgatctctactacatagaaatcagccgcatagccgatcttttccttgtatgccttgcctacctgctcgataaaggtatcaatagcttcatccttcacaatacttacggtacatccgccgaagcctgcaccggtcatacgggatccaatgacaccatctaccttccatgcttcctctactagagtatccagctcaataccggttacttcataatcatcccgcagggatacgtgggatgcattcatcagctcaccaaacagcttcacatcattattcttcagcgcttcaaccgcacggatcgttctctgattctcatataccgcatgctttgcacgctttctgcggacatcactcttgataatagccttgaacttctcaaaggtctcctcatccaggtcgcccagcgtcttgatcttcactacctgctgaagctctgccagtgcggtctcacactcactgcggcgctcattgtacttggaatctcccaggcctctctttttattactgcatgcgatcacgatcttcgcattctccagatggatcggtgcatactcatactccagagtcgcagtatccagaaaaatagcgttgtcctttttacccatggcaatggcaaactgatccatgataccacagtttaccttgttgtatttgttctcagagaactgtccgatcagcgccagatcctgattggtcacatcaaagccgaagaaatccctcagaatgtagccggtcagcacttctacggaagcggaagaagaaagtccggaaccgttaggaatattgccgtttaacagcagatccataccggaagtcactttcatgcccttctcaccgaaagcccagatcactcccttgggataattggtccaattcgcttccttgctgggtaccaggtcatccagagaagactcgatcacgcccagctgatcgaaattcatggaatagaaacgcagtttattgtcgtttctttttcttgccacgccgtaagtaccaatggtcagtgcacaggggaatacatgtccgccgttatagtcggtatgttcaccgatcagattcacacgtcccggtgcaaaataagccttggcaccctctgcatctccaaatacttctgcgaaagtcttcagaatcgtctctttcatttccattttctactcctatctgcttactgtgtaagccccgtccatttatatgttcttactcttgtcgctccggccgatgccgcgatacgaattctcttgctctatgttttcatcataatcgaaaaaaacaaatatttctacctatttttgtttttcagacctgtcattatgttaaaagctacaagccatgcaaagacaaaaagaaagatacaccgtgggagcttgctcacagaggtgtatctttctttttggatttatacggcgacagccgtacatgaagtagacgcagcgcgtctacgaatgtgcatggcgtagttcccgggagcttgctcacagggacgtgtctttgttttatttttatacggcgacagccgtacatgaagcaggtgctttagcgcctgcgaatgcgcatggcgcagctccttggaacttgctcacaaaggcgtatctttctttttggatttatacggcgacaaccgtacatccgcaggcacttcagtgtctgcgaatgggtatggcctaattcttatttctcatctttatttccaaacagcttctctgctgctccggccgcgcccataataccatttacggcagggttcttcagtgcaccggctaccatgttcacctgagtagcggcatccgtcgctgccagcaggctgttacgatactcttcgttgacttcatgtgtggaagcatactcaatatagcttgccaacatatcgaaatctttgttgctgtcatatacaatgcctactaccacatacagaaccacacaggcaatgcccaatacaacaaacacaacatttttcagtatgccgcccaaagctacaaataccagagtaccgatcacactcagggttaccagcaattcagatacagcggcatcttttacggattttaccagaaaagtcctgccatcctgtaacaacagagatacgccgtcataataagtctccttggtcatctcgccgtattttgcaaacagataaccctctaacaacagattgattcttctgtaagctttcttgatcatactctgtgcaataccggatacagacttcagtccggggatcttctccagcatggctgccccggtgaaaataccctggcacagatgatataaaatatgagagaactctctggtctggctcttaagtgcagacaggcttccaccttgcttctttaccagttcaataccggcatttaccacatcctcgggcatctcttcatccatcagagcttttgctgtcataacacgttttgcatactcggtatacccgtctacccagctgaggatcactaatcctgcaaaaaatgctaccactcccagcagggtcaatacgttgatctgtgtcatcagtccgatggctgccacaatgacacctgctgccatcacgccgtaataaattcccagtcgctggttgaatttcttttgtactgcctttgctttctctctgttattcattatcttgtccctccataagttgtggtcttattctatgaccacatactactttagtataactttactgtcataaattgtcaatattcagcatatttttatacaatgataaaattatgttatactttgtttacccgataatcaacacttaaaaagccattcctaaatttaatttgctgaatagactcctgttattccgcactctgtttccgatactgtaccggagtcatatcataagcctttttgaacaggcgattgaaatgctccacattctcgtaaccaacgttagctgctatggtctctactgtctggttggtttccttcaagagcattcttgccttcttcatgcgttcttcccttacaacctcctggaaggtcatgccggccttttccttaatgtatttggacaaatacggtttggagagatggaaggtatctaccagcatatccagtgttacatccacgtagttcttctggatgaaactgatgatctccacgatccgctcctctctgccggaagtgatatgctgctctgctgccagcttgttcacagcggataccaatgctgcgatggaactcttgatgatatcttcatccacgccgacaccccagtagaacttaccgtcatggacgatgcctacataagtagctgccttagagttggaacctctggaaatcgcatgttcttcgtaaacagacagttcataggtaataccgaagtatgtcttaatagcattgctgactgcgtcgagacgtccattacccatggtggtaatggttctggaagcgccgccctgctcgatggtcacctctgcctgaatgccgttctcctgcttgaagtggaactccggaacattgaagatgctgcggggataaatataattttcctcaaagatcgcgtagatctccttgggaagtaattcctgatgacgcctgtcggagataccctttaccaggtagccgacttcttccttcatagctgcaggcagtgagaatccaaactgctgcttcaatacgaatgctacgccgcccttaccggatacgctgttgatacggataacatcggattcgtactctcttcccacatctgcaggatcgataggcaggtaaggaatatcccagcgcttgccggtcctgccttccttctgccatgccatacctttactgatggcatcctgatgggaacctgaaaatgcggtaaataccagatctcccgcataaggaactctctcatgcaccttcataccggtgaaattctcataagcttcacggatctccataatatgagagaaatccagtccgctgtccacaccgtgacacatcatattaagtgcaacggttaccaaatccacattaccggtacgttcgccattgccgaacaaagtaccttccacacgatctgctccggccagtacgccgaactccgcatcgctgataccgcagcctctgtcgttatggggatgtacgctaagtactacattatcacgatatttcaaatgcttgtgcatatattctacctgacaggcaaatacatggggcattgccacctgtacggtggtgggcagattgatgattgccttacagtcagcagtgggcttccatacctccagtactgcattgcagacttccaatgcataatccacctccgtctgggaaaagctctccgggctgtactcaaaggtgaagttaccttcggtctcatctgccagattctttaacatccgggcaccgtctaccgccagcttcttaatagcttccttgtccttcttaaatacctgttctctctgctctacggaagtagaattatacagatggatcactgcgtggggcgctcccttgactgcttcgaaggtcttgcggatgatatgctctctcgcctgcgtcaatacctgaatagtcacatcctccgggatcatgtcgcgctcaattaatgcacggataaaattgtactccgtatcggaggaagcgggaaaaccaacctcgatctctttgaaaccgatctttaccaacatcttgaagaattccagcttatcttccagactcatgggatcgatcaatgcctggttgccgtctcttaagtcaacactgcaccagatagggggcttggtaatactgtccttttttacccagtcgtaggtcacctcggggggcataaaataagttttctgatattttgctgcaatgtctgcgctgttcatggaaatcctcctgccgtatgattactttttattttcaaaacctgctgtttttactattttcacttatctgattgcattatcttaacactcataatttctgtaagcaagatatattcttatcttgttaattgatgtattttaatgtgacatttttgtcatatacctataaattcaagaaaaaggctattttattcagtgattattcctttttattatttgattaaaattttcaattgtatatatcattttttgttatatttaaaaccatacttttaattttataatgttgtataattgattaattttattactatgtttaaaatgtttttcacaaaaaaacagatgtccgtgtcgggcatctgtttataatctattctctatttatatcctaaacgatttcttcgtactgtatactctcgaaatcgtaacgcccattcgcattccgagctgtcaaataatttccactctttcaaaataccggatcaggatatccgcacaattttcgattcccagtttggtggtatcgaggatcatatgataattattcacatcaccccacactttaccggtattttcataataatagtcggcgcgctccgcatcatttttctcaagcatttcttttgcctcatcgtggggaagactttccttcttcatgatacgttcaatacgatcttccttatccgcgcacacatacacgttaaatacattcggctgatccttcaggatctcggatgcacaacgtcccagaataatacagggatgttccgccaattccttaataacctccgcttccgtagcataactgtcaccatccagttcatgctctatgtacgccttatcatataccggcacctccagcttctcagacagctcctgtgcgatcagactggctcctgttccgaatcttcggctgatagtaattacaaggttcatcgtaagcacctcctttgtaaggtactctcattttatgataaagactctgaatttgcaagagggatgtctacaaaagcttctgctctatctgatacagtttctcacctgtcgcccgcatgctgtgttcctccgccagtgccctgcctgcccggattctgcgtcttactttttccagcggttcttcatacaagatgtctcggactgcctgctcgtaggaatccagattgctggctttgcgcacctgctcgccgtcggtaagccacccttcatacaccggaatgtctctcacgatcacaggaatctcacaggataatgcctccaataccacgattccttccgtctcttcataactgaaaaaagcaaatgcatccgcaccacagtacgcatcccgcaggatcccggacggttggaaaccggcaaagatcacattttccggcttctctgccacagcctttttgatctctgccggaatcaatgcattgttcccgcccccaaaccatagaaaaataatgtctggcatcctttttgccatttccagaaaatcctcgattccttttctgtgaatcagatgccccgcggatatcacgacctttttatccacaggaagatgaaaaaatatccggaatcgtccacctgcctgctctgttttgtggaaaaattcagtgtccacaccattggtcagtgcgtaaatctcccgatgcagatcatatttcattaacaattcccgggagtattccgttggtgtgataaccacatctccctgtctataacaatggcggatccattttttgaataaaggagccgccagattggaaccgataaaagaattcttaaaatcttccatagtggaatgcccataatagacgacctttttcccctgccgtcttgcccgccgtgccaccagcggcgaatcaggcaatacagtattgatctgtacgatatccgcctctttccagacgtccgtcacggtcacttttgctgctcgcagcatcttctcctgatggcggatggcgctgccgacgccgctttttgccaccagtgaaagtccgcctttatatatataaattttcataagtatactctcctataataggtggaaaatcacctgaaacagtgtcgtcagtcccaaactatacagcgcaatggagaaaggctttcctaaaaagatgactgtcacaaactgtttccatgtcatattcgtcgttccggcgagataacagagaaaatcatccggtgccaccggcagaaagattgccagtgtaaataatttcaaaaatctcccctttagctccgtccatgtcaggtatttttcaatcattttcccgggaaacatcttgtacagcaccggtcttcccagacttcttgctattccaaaagcaatacaggaacctacacagattcctatataattatagaaaaatcccggcaccgctccaaagagcagcactcctgccagacagctgatgccacccggtatgatgggaaacaccacctgaacgatctggatcagcacgaagatcagtgcaccgatcattccgaaacggttcacaaactgctgcatagtctccaccgattggaaaatgccgctctgatagctccagactgccagtattccacagaggatcagactaacccaggatgcaatattgacggctctttgccaagcgtttttctctttcgacctgtttttcttcgatctgtcgctggtatagttgttccatgcttcccgcaaatcttttttgggaaaatatttctgcggactgttttgcataactgcacattcctctgcgttcatcgtcttctttctccttccagttcttcaggtctttcaagaattcctcttcggttcggtactgccagccgtttttgccctcttccacaaccgcccgcaggcattgatcccttctgcataataacggtaatcctgctgccagtgcttccgcataggtaagcccctgggtctcactggtggaagcgctgacgaacagatctcctgccggataataagatgctacttcagcgggtgataccattccggtaaaaataacgctttccgtcacacccagttctgctgcctttttccgtaaagtctccaaataaggaccgccgcctacaatcatcagtattgtgccgctctcctgaattttctgctggtactccagcaattcttccacattcttctcttttgccagacgacctacatataaaagcactgtggtcttccggtccattttatattttcttcggattctctcccgggaatccgtccgggtctgcgcgtcatatttactcagatcaatccccgatgggatcactgataccggacaatgaatgccatagtcttttagtaatgtctctatttttgtgctgggagcgatcatactgtccaccttctcggagatctgtcgcgtcaggaactgtaccatatccctgccccatttcttgtaaggggaaaaatagtgggtataatcttcgtatacagtatggtaagtatgcaccagagggatcttacattcctctgcgatcttttttgccatgaaaaaggtagaaaattcacactgggaatgtacaatatccggattccactctataatcccgcgatacagttcgcgtcccggggacacccgaaatcttgctcccggataaatatatccggcattcacggaacccatatagatcacaccctcttcttcgtaggaacgagctgtacgggacaaggtcaggatcttcacttcatgtcctctttgctgtaattcctcccgtagattgcataccgaagtaacaactccgttgatggtcggcttgtaccagtctgttgtgatcaatactttcatcttttttctcccttccgtttattttctctgaattgatctcagcataacagacacaggtaaattccatccgaataaaatcaaaagttttcctaaagtttctgtgagttttttccaaaatgtgcactaaaaaacagcattctccggaaatttccggaaaacgccgtttttaatcgtctttctataaaattattatctttcttctctgaagtacgccagtcccagacttgcggggggctgattctctctcttgctcctcatactggtgatgaccagtaccagtaaggtcacgacataagggatcatcttatacagctcctgatactccatatgctcgataccggtgggcagatacagatacagaatatacagaccaccgaacaggaaagaagcaaatacactgatattcggtctccagatagtgaagatgaccagcgcaatggcaagccagcctctgtcaccgaacgcatcgttggaccagacaccgcaggcataatccattacatagtacagtccgcccagacctgcgatcatacatcccacgcaggtagcgatgtatttgtaccgggatacgttgataccggctgcatctgcggtattgggaccctcaccgactgctcttaagtgcagtccggttctggtatgactcagaacatacgatgccgcaaacgcaatgatcactgccagataagccaggaatccataggataaaaacagcttgccaaaccagccaagttttcccgcaaaaggaagtgacttactgaaataactgctggtagcagacagtgcaatggaaggtacatcactgtttaccagcttgatcagggatcctccaaagaagttaccgaagccgacaccgaaggtggtcattgccagaccggtcacgttctggttcgcccgcagggtaacagtcaggaagcagtacagcaatcccatcaacagggatcctaacaggcagcagagcatcggaatcgcaatagcaagaaacccattcatgttcgccgcgcctcctgcggatctctcatagaagaaagatccgatgacaccacagatacctcccacatacataacgccggggattcccagattcaggttaccggatttctccgtaatgatctcaccggtactcccgtataacagaggaattccctgtacgattgctctcggaataaatgcaagtaaaaatgaccacatgcttactgttcctccttttctgcttttttacggaactgcagtctgtaagtaatgaagaactcacaaccgatgataaagaacaggataatacctgtcagaatatcggaataagaatgattcagtccaaaattggtagagatctcactggctccgcgatccatgaatatgatcaggaagctggagaataccatggtcagaggattgaacttggacatccaggataccagtacagcggtaaatccctgtccacctgcaatcgtggtagtcacagtatgattgatgcctcctaccagaagcaggcctaccagtccacacagtgcaccggataacagcatggtacggataattaccttttccaccttaatacccacatattttgcagtattttcgctctcacccacaacagagatctcatatccctgcttactgtagttcaaatatacatacataaatatcgtgatcactactgccaccactatacttaacagatatttggaaccgaagatctgcggtagccagcccacattggtgttctggttgatgataccgatcttaccggatcccttgggaacctcccatactatcgtataaaatgccaccaactgagtagctatgtagttcatcatcagcgtagacagtgtctcattggtattccatttcgccttgaaaaatgcgggaatgaagccccagatggctcctgctgccagacttgccacgatcatgcacaggatcacaactgcgttcggaagcttatctcccagacagatcatacaggctgctgctgccagcccgccgatcagcacctgtccctcaccgccgatattccagaatttcatcttaaatgccggagtcaatgccaatgcgatcaaaagcaggatcgctatattctgaaaagtgacccatgtcttgcgaacggatccgaaagcacccagaacgatggactgatatacctgtaaaggattgattcccgtggtgatcgtcgtaatgataccgcacaggatcagtgccagcaggattgccagaaatcgaatacccagagatttataccagggaagcgcatctctttttacgatatgaaacaaaggctctttattcttttccttcatgttctttgcctcctactctggtcatcagcataccgacctcatttttgtctgtctttctcgcatccagaataccgctcacttctccgccgcacaataccatgatacggtcggacagctccatcagcacatccagatcctcacctacgaaaatcacggcaacgccctttttcttctgttcattgatcaggtcatatatagtatacgaagaattaatatccagtccacgtaccgcataagccgtcaacagtacggtaggtgcagacgcaatctctcttccaacgagaaccttctgtacattaccaccggacaatctgcgtaccggagtggtgatacccggggttacaacctccagattttctaccacatcagttgcaagctgtttggaaggctttcggttcgtaaacggtgtatgtccctgtcggaaagaacgtaacatcatattatcggtcagatccatattgcctaccagacccattccgagacgatcctccggtacaaaagaaagcgatacacccatctctgcgatcttcaacggatccttgccgatcagcatttccttacttccatcatcttccacataactgatcgtgccggcttctgttacctgcagacctgcaatggcttccaaaagctccttctgtccacagccggagataccggcgattcccaggatctcaccactgttggcggtaaaggagacgtccttcagcttaacgataccttcttcgttacgtacggtcagtccctgtacttcgatacgaggcttcggattcacaggttccggtctgacaatattcaaagtaaccgcatgtcccaccatcatattggtcatttccgtaacggtggtatcctttgtcagcatgcttccaatatactgaccgttacgaagcacagccaccctgtcggacagagattccacttcatgcattttatgggtaataatgacaatagccttgccgtcatctctcattttccggagaacgttaaagagcttctctgtctcctgcggtgtcagtacagcggtaggctcatccaggatcaggatatccgcaccacgatacagcacctttacaatctctacggtctgcttctgggataccgtcatatcatagattttctgcttcggatctacttcaaaaccgtatttgtcacagatctcctctattttacgggatgcctccttgatattaagcctgccttccagacccaggatgatattctcggtagcagaaagtacatcgatcagcttaaaatgctgatgcaccataccgattcccagccgtaacgcatccttgggggatttgatgacctcttccttaccgttaataaagatctgtccctcatccggaaaataaataccggagagcatattcatcagtgtcgtcttaccgctgccgttttccccaagcagcgataatatctcacccttatagatatccagatttaccttatcattggcaatcacggatccaaaagtcttggtaatgtttttcattgaaaccgcagctacttttgtctctttttccatcctagtcacctttccaatttatccacgacctgcaattttcaggtcttttaatacctggcataagcacactggccgccccttttctacctcatccatccacaaaagcaaaagatccataaggtagaaaaagggcggcgcggcgataaacgctgcgccgtccgggctatttcaataagtcaattaatactgctcatccaacaggttgattccatcaattcttacattgaagtaaggagcggaacggaatgcaacatcggactcatggaagtatccgtcacttactacctcatggtcgggagtataatcaggatcggtatcgatatcagcttcatagctgtccagggtcttgccgtctacagtaaaggtggtgatatcatatacatgagccttgcctgcgatcagatcagcctttgcagcttctactgcttctgcggtaccatctgctacagcagcaccaagatcgctcagctctacagagccggtctccagagtaccacaccagtcagtatcgataggagttccatctgctacacatttaatagcatactcaaagtaaggctcccagttaactctggaagataccaggaaggtattggggcaggctgcctcagtgcttccgttgtaagatacgttgggaacgcctgcggtctcacatgcggtaggagcacccatggagtctgcatgctggctgatcagtacacatccgccctcgatcagcttgttagctgcttccttctcagcggtctcatcgtaccaggaaccggtaaaggttacatccatggtaacgctggggcatacggaacgagcgcccaggaagaaggatgtataaccggacataacttctgcataagtataagcacctacataacccatcttagcctgatcctcggtaatatcaccgttagcgatcatctcattcagcttcatgcctgcaacgatacctgcaaggtaacggccatcatagatggaagcaaatgcattgtggaagttgtccaggccctcggtatgagccttggttccggttgcatggctgaactgaacattgggatactccttagcagcctcgatgatgtagtcctcatgtccaaagctgtctgcaaaaataaaattgcagcctgcatcagcaagctcacaagctgcttcataagcttcctgtccttcaggaatgttggtcttggtcatgtactcaatgccaagcttctcacaagctgcctttgctccgttcaggaagttcagatcataagtagagttctcatcatgcaggaaaataaaacctgcctttacaccactgacagcttcgccagctgcttcagtagtagctgctgcctcagtagtagctgctacctcagtagtagctgcaacagttgcagcatctgtgccggtggtagctgcgttattggatccgcatcctgccagagcagtaactgcgagagccatagctgcgagtaaacttacgactttctttttcataattctcctctttctgcgctgctgcttcgttacagatccatgtagcagcgcgggcacagatctgcagataaaccggtgagtcaacgcaaaaagggtgtatgacaccttcatacgacccctttattgtactctctcaacattagtcagtataagcatttgtctgacttcttgtcaagagaagtattaaatttttattaactcgtttgcgaatgtggttctgaatagttatctaactcttaagatcgaaatgtgatctctcctgttttgtcatccatactttccacaatagcgagcgactctacacggatacccttggaacggatcaggtcgccgcccttctggaatcccttctcaacggcaatgccgacaccctctacagaagctcccgctttattgacaatgtcgatcaaaccctccagtgcgcatccgttggccaggaaatcatcaatgatcagaatatgatcttccggatgtaggaattttttggagacgatcacgtcatatactcttttgtgcgtaaaggattcgatcttggtggaatatacttctccgtcaatatttacggactgggacttttttgcaaataccaccggcacatgaaaatgctgggctgccacacaggcaataccgataccggaagcctccacagtcaggatcttcgtaatcttacggtctgcaaacagacgcgcccactcttttcccatttcattgaacagatcaatgtccatctgatgattcagaaaagaatctacttttaatacattccctgcttttactgtaccgtctttgcgaatgcgctcttcgagtaatttcattgtatgtctcctcttttgtttctacttaatatattctgtggtagtactttaggcttttatgtctcttattatacgcaggatattgctcctttttcaatagaagaactatatttcttgctattttgattacattttgctatgttaaccatgagaatactgaaattacgaggtgccttatgcctatcagaggatatatcatagaaaaatataatgctatgaccaacgcttatacctgcaatcgtctggtacaggaagcttctgccctggatatggatctgcagattgtagggatccacgatactatggtctctccgcatggtgttataaatcatggtaaaatactggaacccgtggattttgtcatcaaccgctataaatggggacgggaaaaggatgctataaatgcacttgccacccgaagctataatcctttaactgcttataacatctatattaataaatttgaacaggtacgaagacttcattccgaagcctttttgatcccgaaatatcttctgggaacttcactgttgcctttttcttctattgtagaacaattggggcttccttttgtcggtaaaggactggaaagctccatgggcgaggaaatcgtctgcatccgggataaagcttcttatgaggaactctctcttaactacccttcctctaaggaatggctcttcgaagaatttatctcggaaagctacggcagagatctgcgattttacagcatccgcggagaagccgttgcctgtatgcagcgcagatcccagggggatttccgtgcaaatgtagctctgggcgcttcggtagagccttaccctgtcacgcccggcatccgtgccatagccgcagatatttacgagcagaccggactggattttctgggaattgatcttctttttggcagagaaaaaccttatttttgcgaaatcaatgttatgccgggactggaaggcattgaaaaagcctccggtattaatgttgcagcaaaagttatggaaacaatacgatcagactttgcataaggaactcatctcatatttgtacctgcacagtgtacgaaaatatacgatactgtaatatcggtaaaattgcaggttacggaaaggtatgcttatttttatgaataatgtttccggaacaccactggaatttcataagatcactacgcaaaaagaggcggaagacttcgtctatgcttcctatctgcgggctgccacacatcaggactatgccgctcaggatgccggaaaaagacatcctgagctgacgagatctctgctccgacagaaatcgattgctccctgtgtcgtcgtcaccggaagcaagggaaaaggatccgttgccaatatgatttcccggatcctgcagacaaatttatccgtaggactgatgaccagtcctcatattacggatttcagagagcgcttccgcgtcaatgataccatgatcagtgaaaccgacttttgccgtctgatggcagagatccagccggagattctggatattgcatccgatctgccggattcggtatgtatcagccccatgggcattcaggcggacctggcactgacttatttttcggaaaaacatacagatttcaatatatttgaatgcggcaaaggggcaaaatatgatgatgtgaacaacattcgtcacgattatgccgtgatcaatcggattttcttagagcatacaagagagctgggagatacgctgactgccattgcagaagataaatcccacgtcatcaccggggagcagaagtgtgtttattttgcggagcaggatccggaagtattgaaggttctggttcgccgtgccgaggctatgcaggttccctacaaaatatatggtcgggattttcaggcagaaaatatccgctatacctgttccggtatgctatttgatgtggtgatcggagataacatttatacggatttacagattccgttattgggaaaacatcaggcgaaaaactgcgcactggctctggctctgtgcgtggatgtcatggcggatctttgccgggaatccaatgctccggatatattttcagatacaatgtgcaatcaaattcgccgccaactgtctgcgatccatcatccggggcggatggagattctaagttcggacccttttatcctgttggatgcgtgcatccattccgccagctgtgaaaatgtaaaagaagttctgcgtcatctggggatttcgaattgtacggtaattgtggggattccggaggataaagattacgcaggggtgatccggtccatgagggaagttgcgaaccgaatcattctcaccaaatccgggaatccgcattatcatttttcccaaaaacagcaggagtcattggcagaagagggtattggcacgatatggacagattccgtgcaacaggcactgactctggctgattcttgtccggatcccatcgtaatcttgggaacgacttcggtaatttccgaagtagagcggatttttcggcaatcttaacttgctctcaccggatacaggtgctacaatgagggcaaatagaagagtagcaaaacattacgcagaaaggagaagttccatgacaggtatttacggaatcgattattataataattatagtctgaccggcaattacggatacggttattctaccggtgcggtatcttccgcacggcccgaagagaagggtatggtagtaaatcccggaaaatccgatgtggaaaagcccggcaggaaatcttctcccgcagaatgtgagacctgcaagaaccgcaaatatcaggacggttccgatgagatggtctctttcaaatctgcatcccatatatctccgcaggcttccgcttccagggtgcgcgcccatgagcaggagcatgtaaccaatgcctacaacaaagctgcacagaacaacggcaaagttctctccgccacagtgtctctgcggaccgcggtatgtcccgaatgcggcactgtctacaccgccggcggtaccaccacgaccaagatcagctacagtgacgagagcaatccttatcagcagaacaaaaaatccgccgatgctgccgcagtgattggacgaaatctggatctgagtgcatagacctcattacccggactacgcataatgtcatccagggaatatgaccatcctcaaagggatcagattattactgggatgccttattacaatcaccaaaatgtctaataaaaaactgaaaagctccgtatatagtttatcaaactatatatgaatttgagagataaaaatgtttagttccattcctcggctaagagaaaatcgcagatattttggtgcttaataccattccggctcatatcaagttcatcaagagaaactacatactttctgcaacatctgacatctgcctttcaagcagctctgtatttcctagatcaagttttaataacttgtccacgtccttcaactgctgctgtgtgcttttaatctgaccgtttacacttttaatggctgtttgtagtttggtggtatctccgccgatctcgacagtaatacccataattctgttagccacgactgatatctccttccgtaaaaatgggctaaaaagcccagatttctccaggcatgaaaaaagcaccaaccatttctgattgatgctttcaaattattttgtttttgtaaatctgtttaattgcgtatccacatctcgtccaccgtacataacacggataatcgtaacc

SEQ ID NO: 430 - DNA, 33023 bp, unidentified
  source 1..33023: mol_type = unassigned DNA
aagctgattcgagacagcccggttgaccgggtgtagcgcagtttggtagcgcgcttgaatggggttcaagaggccgtgagttcgactctcgccactcggaccaaagatggctgtcaaggtcagcaggagcgtcaaatccgaaaggatttggcgcttttttgtttttacggcttcaatcgcggcaacgcttgctccaagccgttggcgatggagcgcttgcggcgtatgtccagatggccgtagatgttcgcggtcatcttgatgtccgagtgtcccagccactcctgcacgtccttcaggccgtagccctccgacagcagcatactggcgcaggtgtggcgcaggtcgtggaaccggatatggggcaggtcgtacttcttcagcagcttgtggaaggtgtgactcacatagtcgggggagtaggggtgcccgtcctcccatgtgaatacgtagtcgttgtctatgtagtccttgccataatgattgcggtagtattgctcctgctgaagcaggattttgaacagccgcaccgcgtcgtctgtcaggggaaagctgcggaagctggatgcgtttttggtcttgttcttctccacgacctttgtgacccgggccacggtgtgccgtatggtcagcgtttgcatcgcaaagttgatgctgtcccatttcagccctagtacctcgctgcggcgcaggccatacagcgcggtgacatagatgatagggtagaggcgttcgtttttgacggcagtcagcaggtctcgcatctgcgcttcggtgtagaacgtgccggtaaactgcgccgcgtgcggcatgacgaccagatcggcgggatttgtctggatcagaccgtccctctgcgctaatttgagcgtctgattgagcacgttcttgtgctgacgcaagctaaccgcggataggccgccgtggccatcagaacgcccgaatttagcctttacgttgatgtacgtctgcagcgtctcgccgtcaacatcgcacagctggatttgcaggtcatcgaagtaggggaggatgtgcgctcgggcctgaacctcgtagccttggtaggtgacctcgtccacgcgatgccggacatcctccagccagcggcgcacggcgtcactgaaaagcatatcgggcggggcagcctgctcaggcttttcgccgagcatgtcaagcatgatctgcctggctttgccctcgtttcctgttactgacagacctgtggaaacccaggtctgattttttttgccatcagtcgtatgcgtgagcacaacatagtatttgtcgttttttacgcgcaagctggctgtcatgagaagggcctcccaaagcgttgtggcatatgccaaggctgttgacggctacataaattactacaacaacgaaagaatccaagagaaaacaaaatggatgcctcctacaaaattcagagaggcatccatgtgcacctaattcaatttttcatgtgtccagaattctgggtacatatcacaagcgtagcaatctgtttttatttgaatcagttgcggtttaagcaaaacctgaatcatgtaccaattgactgttacatataacaatctatcgaattttagcctcattcaccttataaataagggtgtatttgtaaaatgtgctgaatttgtgtacttgtataattaaagtgaatccgatttgttgataaatgtcgaattgtgtgctattatatcaatacatatattgggaaaatattgcgttggtagactgctgaattgtgctaaggattccactgagtaatttgtggaaatgtcatttgctgctcaaaactgcctttcctgatttcaattgcagtattgaaaataatatatgtgcaaagaagaacgaggagtaagaacatgacaaggtttaggcatgacttgattttgcggatgataaagctgttagatgctgtgcttatgacgataccatttgcaatgtgctggtatctatactatgctaagcgcgttgcatcgccgtattacgcaaagggcgattacctggtcgtggcactgttctttgtgctgttcatcatctttggacgcgtatatgacgcctttctgatgtcgatgcagcgtatctccgaaattatctacgagcaatttttggcggctgcggtcagcgactttatcatgtacattgtgatttggctactgtccaagcacctgcctaacattcttcctggcgtggcagctcttgtggggcaggttattatggcctcaatttgggcttataacgctcaccacgcctactttaaaaccttcccgccgcaggccacagctgttatttatgataccagacgtggtatggagcagctgattggtaagtacggcctagatgccaagtacaaagtggtctccacagctacggcgggggagtgcatcgagaatctttccatgctggacggcatcagcacagtgtttttgagcggcatccacagccatgatcggaatattattctgaaatactgtgtagaaaacaacattactgtatttgtagtaccacgcatcggtgacaccattatgtccggtgcacatcacatgcatatgttccacctgccgatgcttcgtgttggccggtataatcctcagccggagtatctgtttgtaaaacgactgctggatattgtcatttctgctattgcgcttgtgattctgagtccgatcttccttgtgacggctattgccatcaaagcaacggatcacggtccagtattttacaagcaaattcgtttgacgaaggatggcaaagaattcggtattctcaaattcagaagcatgcgggtcgatgctgaaaaggacggcgtcgcccgtctttccagcggcgaaaacgatgaccgcatcacgcccgttggcaaaatcattcgtgcttgccgcgttgatgaattgccgcagcttataaatatcttaaagggcgacttgagcatcgtcggcccccgtccggagcgccctgagattgcagctcagtactgtgaggaaatgccggaattctccctgcgcctgcaggctaaggctggattgaccgggtatgcacaggtttatggcaagtacaatactactccttacgacaaactgactatggatttaatgtacatagctcatccgagcattgtcgaagatttgaaaatcatgtttgcaacagtgaaaatcctgtttatgccggaaagcaccgagggagtttccgagggtcagaccactgctatgagtggagaaagccactaaatagcgacgtttttgtacatttcgagccgctaaaaattggtggtaattccagagtggaatcaggtataaatgcagctcttacagtagcgttaagctggaaagcgggcgaattgccctgcatatgggcgatacagcactcatgatagtgcagaatgccgagaacccaagcgtgagagagggcaaaatgaggttgaatgcaggcttttatgccccgaaaaagcacttttatggatgcgaccgtagctcgtgggtttatgccagatggcactgtgatgatattaccgacactgtggtgactttcacatagcgttatctgggctgagcaatgataacctcatctgcgatttcatcccggtcttgaagataacaagtcgggtgtgagcaagatgattataaacacatggtcgcagagatgctcattcgtgtggggtaatccggcataagcaagggagctactgtggcatggatgagtggaaccgggaataaaggcagaggctaccgtggcgaacgttggtgctgtcaggactaaagacagcggttgccgtagcacgaatttgtcgaagaaacgtttattgtggcggtacaagacatagcggcagtgtgtagatcacactgctgaggacgattagtagagctttataaggaataaacggctcagactcttggagaatgagtctgggctgtaatctttgatatgcggagagggacgattgaatgctagttagtgtgattatgccgacttacaactgcggcaagtttattttgcaatcgcttgattctgtgattgcccagacggttacagactgggaggttcagattgtggacgactgtagcacggataacactgccgaagtgttgaagccgtacttggagaagcatcccaatatccactactatgttcttccgcagaatgggggaccagcggttgcccggacggaggccatgaagcgggcgactggcaagtatatcgcatttctggatagcgatgacttgtggatgccggataaactggaaaagcagatcgcctttatggagcggactggcgcaaagtttagtgcgaccggctatggctggatggacgaggaaggaaacgacttgcacacggtattcattcctccgaagaaaacggactacaaaaagatgattcggctgtccaatccaatcggtaatctgtcagtgatgtacgatcaggaagcacttggcaagttcgaggtgcctccgattaaaaagagaaacgactttgccctgtggcttaagatcctgaaaaagacggattactgctacgggatggaggaagttcttggtacatatcgcatgggtcgtgcaggctcggtgtccagcaataagctgaaacaggcaaagtaccactggcagctctatcatgaaatcgaagggcacaatgtggttcgtagcctgtatgaacttggctgctgggcttgggtcaagggcactggaatgggtattgataagaggaaagtgtaatgaatccactgagatacattaaggcgttgtttggcttgggggatgttgatgccttctggatggcaagagaggaaattttgaaacgccccgggaaacattgcttagaaaattatctttgtaagattatcagaaagcattatggtgcgggcattcctattttgcctgatatcaaccgctttgcaacgccacatggcttttatgggattttcatctcacagagagcgaaagtcggcgagggttgtgtgatttaccagcaggttacgattggctcgaatgacctccaaaattctcggggggggggcaccaactattggcaacaactgcttaattggtgcaggtgcgaaaattatcggaaatgtccatgtcggcaataatgtgagaattggagcaaacgcaatcgtagtggatgatattccggataattgtacagtggttatgaacaagccgagagtgatcgtcagagaaaatgagaaaacctgagaaggagggactcctttcaaatgaataagaaggaagtatatggcgggttactgtcgtgtataacggcagtcgctggaattgataatgcgaagaagtttgatacgctttttcgtgatcataagaaactgaatctgaagaatccgcagacgctttctgataaggtgtcttacattgagctgcatgaacagtctcccttggcggccagttgcactgataaatatgcagtgcgagagtatgttacgaataagggtttaggagatatcctcgttccaatttatgggggggggtacactcgatttgaagatatcaacttgactgagttacccgacagttttgcaatcaaggcaactcatggctgcaagatgaattaccttgtgccggacaagtctaagtttgattcagaaaaatgtaaaaaagaaatccaaagatggatggacactacatacggaacatactcgatggagcctcattacattgagattccacatcggttctacattgaaaagtatcttgaaaaggcagatcagcttgtggactacaagtttcattgccttaatggggaaccgcagtttgtgctgacatgtagcgaccgaaagagcaacggcgacaaagcgatgcaggtgacattagacctgtttgatatggattggaagccgattccggaaattgtttcttctgggttggagcgtcctggcgatggaaaattaccgaggccggaaaacctagatgaaatgattcgtatagctaagatcctgtcagaagacttcaagtttgtacgagtggatttgtatgagcttgagggaaaggtctatttcggagaactgacgttctccccggcacattgtgtttttccgtacctttcggacaagtttgatttagagatgggcaaattgctgcagatctaagtcggacggttcatgttccatctttgttgtaaatcaagggtggaggaaagttatgaacataaaggttgcttatggaaaagtgctgaccggaattagcagaatattcagtgtggacgctgctaagaaatttgatacgagattacgatttcaccgggacctaaatcttaaacatccaaaatcgttggctgacaaagtgacatatattgagttacatgatccatctccattggcaccggagtgtacagacaagtatgcggttcgtcaatatgttaaggataagggattagagagtattctagtcccgcttgctggtggaccatggagcaaaattgaggaaatcaactttaaggtacttccggacagttttgtttttaaagcaacacatggctgcaagatgaattaccttgtaccagaaaaggaaaagctggataagaataaatgtgttgctgaaatgtccaaatggctgaaaacaacctacggaacatattcaatggaaccgcattatctggaaatcccacatcggatttatgcagaagaatatctggcagacgctgacaaactgattgactataagtttcattgtatgaatggtgttccgcagtttgttctagtgtgcggcgatagggttgtaacggagataggaaatagggtaagtagacatatctttgatatgaactggaaccatttgagtggcctaaccgatgaaactgctgatacggtggaaaagccggaacattttaatcagatgatagaaattgctcgagaactatctgctgatttcaaatttgttcgagttgatttgtatgacataaacggtagggtttattttggtgaattgacattttcgccaacaaatggagttttctcacactatacacaagagtttctgaatgagatgggttcgaaactggttatataagaaaggaaacgcaaaagcaatgagaattggcattattggccactttggaggcaatgaaaagtttaatgatggtcaaacggtcaagaccattgcaatttatgatgcgcttaagagatacggactcgaagatgtcgatcggatagatacatattacattaaaaagaatccgtttatctttgtgtcgcagtttttgaacgggggtcttagagacaaaaaatatatcgttttgctttcgtcgaatggacgaaaagtactgtttccagttttgagctttatgagccgatatatgaataaagacgtttatcattatggtattggtggtagacttgcaagggaagtcgaagaaaaaccaaaatggaaaaagtatgtttcctcgtttaagggaaactggatggagagcattgaacttgcagatcaattacagaaacttggagtgaaaaatgcaatctatcttccgaatttcaaaaaactgaggttgatgaaggaaacggaactgcggaaagagtacgatgaaccgtacaagctttgtacgttcagtcgagtgatgaaggaaaagggcatcgaggatgcgatagatgcagttcgagaaatcaatgacgagtatcaaagagaagtagtatcgctggatatctacggaccggctgaagaagcctacatggtgcatctaaatgagttgctcagtcaaaacgcaacttgtcggtactgtggtgtcattccggcaaatgaaagcgttgaagcgttaaaagactattatgcattgctctttccgacccattggaagcatgagggaattcccggaactattatcgatgcactctctgctggagtaccggtcattgcacgtagatggcagtattgtgatgagatgttaaaagatggctatacgggtttgatctatgactttgagcagccagagcaactacaaacgaaaattatttatgccataaatcataaatcggatatgatggtaatgaagaagaattgcctcaaaaaagccgaatcttacagcgaagagcatgttattaagcaaatcattaaagagatgggagtagagtaacttgaacgcagtattcagggcagattattaccgaatgaccgggaaaaaatggggaatcaggtcatggcttgatttgattactcgatatgatttgagatacctgctccatattcgttctcgaagaaatgtactgtttacgttaaagtccttgcgtgcaagtagaaagtatggtcttgagattttatcaagtgacatcggtgaagggctctatattggtcatgcgcacaatataaatgttcatcctcaagcagtaattggaaagaactgcaacatgaacaagggttgtacggtaggaagagaaaaccgtggaaagcgaaatggtgctccaactatcgggaatgaagtttggatagggtcaaatgcggttgtggtaggcaggatagtaattggtgatgatgttttgattgcgccgaatgcctacgtaaattttgatgttccttcgcattcggttgttgtgggcaatccgggaaagatcatttcgcgggagaatgccacagaaggatatattacttataaggtttgatggagaacgagcggatgaagattatacaggttataccggtttttagacttgccggagctgaaataatgtgtgaaaacctttgtgtagcgttaaaaaacgctggtgaaacggtgattgcagtcagcttatattcagagcagactgcaatcactgaaaggcttgtgaagaatggggttcgcattgtgtttcttgaaaagaagcctggatttgatcctgcaatcttcgtgaagctcgtaaaactgttcagagaagaaagacccgatgtggtccatacacatatctacgcatccaagtatgcactgccggcagcagtattagcaggagtcaagagaagagtacacacggtgcacaatatggctcaaaaggagcaaggcagtactggaagaaaaatcaattcgtttatgtataagcactgcagtgttacgccggttgcattaagtaatgaagtcagaaggtcaattcagcaggtatatggcttaccggaaaaacagatccccgcaatctataatggaattgatttgtcgaaatgttctccgaaggagacatacgacatcaaggattgctatacatttttgcatgtcggacgatttatggaagtaaaaaaccatgagacccttattcgggcatttgcaaaaattgctgcagcacatgaaaatgtaaagctccagttgattggcgagggggagttgagaccgcagatggaggaacttgtaaagtccctgaagataaagagcaaagttgattttttgggcttacaagcaaatgtctacccatttctacatgatgcggatacattttgccttccgtcaaagtatgaggggattccgatgacacttatagaagccatgggaacagggctgcctattatttcctgtgcggttggtggaattcctgatatgcttacagacgaacaaaatgcactattggttccaccagatgtagaaggcgttgctcatggcatggaacaactttactctgatcgtgtattgaggaaaaggttgggaatggctgctaaaaagcgctccgaagatttttcgtcagagacgatggctgcgaaatatatcgatgtttataaagtgctggagtgttaaagatgaagtgtctgtttgtgtctgcaggaatgctttatggtggggcggaaagagttacaagcgttctcgtaaatgagtgggcaaagaatgactgcgaaacccgaattttggtaacaaggactgaaaaaattagtaaatacccattggcacaaaatgttgaggttgttagttgctatgaagatataaaaaaagcgaaagttggtcagctagcaataattagaatcattcgagaaacctgcaaagagtggaagccagatgtagtaatctcgttttataatgatttgtgtgcactagcatctatagctattcttgggttacatattccactgatttattccgaacggaatgatccgaatcgaacaaatcaacgtccgattgaccaggtgtaccggaaaattgttgagaatagagcggacaaaatcgtgtttcaaacaaagggggcgcaggcatgttaccctccgaaagtacagaaaaaaagtgttgtgattttaaacccgttggatacatcagcttttccgacgcatgatttttcaaatgagaagaaggaaatagtctcggtaggaaggctggaaccacaaaagaaccaaaaacttctcatcgagtccttttctatgctggcagaagaactacccgactataatttagtgatatatggagagggaagcctgcgaaaggaactggaggcttttgttgaatcgaaaggccttacaaatagagtttttctgcctggagcaaagtccggaattcagaactacattaaggatgcatcgctgtttgtgctgagctcagactatgagggtatcccgaatgcattgattgaagcgatggcaataggactgccgtgtgtttctacggattgttctccaggtggggcgagagagttaatatgttcaggagaaaacggagcaattgttccgtgtaacagcaaaaaagacctcacaaatgcgataatcgaaattataaatgataaagaaaaagctagacagctgggaaaacaagctgagttgattcgagatcgcgtgaataaaatgacgatttctgaggaatggattaagattatcaaaaactgtagaggaaacaaggatggagtttaaacaaaaaaaagcgtgtgtgatttatgcaattgctgcgttatttatagcattagtatactcttacaaagatgcaacatgggttaatgaaaaatatgctatgttttttaaacgcggtgatacctcctcaccggtttatattgtgttaatatattctgccttattcttgctaattatcgtggcagtttcaaaactctgcgaaaatcgtaggcatttcctttatggggcaatgttcgtattgatttcctttttctatctttctaaatcttttattgaagagggtgcctatctagcgattacctcgccaaccacgccgattatttatttgctaactttagctatttttatcggtatggataaagatatatggactgaattggaaaaatgtctgcctccattgattgttgcacatatgctgctgcttatatacgaatatgttgctttggttgcagagcatggggttgtagttgtaggaaactcttcgctgattttttattatgtttctttgttttggtgtgcggtagtatatttgtcagatagagtgatccacgataaagggataggattatgtcagctagtacttattggctttattgtagtttttgcagttattattaactcaagaagttggattattcagtcatgtctagtggggattgtggcttatctggcagggagtacgaaacataattttcgcgcaaagatcattcgattactgttattgattttagtcgtgtatctgattctgcaaatattaaataaatatttcccgagcagtatgatattactgtataacaagcttggacagaacagtagaagccatcaatattttgagattgccaaggcatcaactttttttggttggctgtttggaaacggtgctacagcagtgtattatgattcagctcaggggtacatagcaaacatagataatcaatacatttttatatcatttcattatggaatagtatttatgctgatgtggcttatgccccaaattgtgacctttcttagagttttgaaatctagacgggttaagataatcgctctgcttccgttattatgctggtttatggctttgggagggctttcgattttcaatgcggtttactgcgatttgaaacaaacgttaatgatgttgtatatagggcacgtcttttcgttgacctgtgatgggggagattctaaatgagcaatattctttacattggttggtttggactgcctgaaacagcagcaggaattcgagtgtttcaaattgcaaaactgttacgtgagtcaggaaataacgttgcctttttatgcttgagccagccaggattgaaggaaaaccaagaaatacaatatgatggattcaaatacatccgaaagcggcagtttgaatcacgtgtaaagaatgtcgttaatattttctgcggtgtttacgatcttaaagtcattaaggaaataattgaaattgagaaaccggacacggtcattgtctacaatgataaagaacgacttactagtcaaatcgtatctttttgtcataaacgaggcatttcagtgggagcagatgtaacggagtggtatgagatctctcgttcgagaaaatgggatcgcatcgttgcgaagaacgttgactatagaatcaggaagatggacaagaagccggattatatcctttctatcagtccctattttacggcttattataaatccattgggtgcaaaaatgtgattgagattccaccgattatggactgcattgagacagctattaatcctacggtacgccgtgttcgacatgcggtttatgctggttctcctgcacagaaggatttgattcttccttttttggatgcggttgcaaaaagaaatgaaaagcaagttgatattatcgctgatattgtaggtgtatctaatgagcaggtaatggcgttgatgaaaatttctgatccagaacagaaaggcatcatagcatatggacgtattccgcatgaaaagtgcattgagattgtaaaaatggcggattttagtgttcttctccgtgaaaatctgcgatacgcgaaggcaggcttttccacaaagctttctgagagcctttctttaggagtaccagtgctctgtaatagtgttggtggtgcggatgagattattcaagatggccagaatggtattaaagttgaaggatgtaatacaaataccattatagctgcccttgaccgtattatttcactgagcgatggtgaaattgatgatttgaaacgtagcgccttgaatacaggaaagcatcttttcgatgggtctgcatatgtggcggtgttaaatgatgctgtgaatgggctgatttaacttacgcagcgagagaagtcggaagtgtgattacagataagataacaaaggagaatgccgctaaactgattggctcaaggtggccgttgaagacagatgctacaagggttctcagatattcaagaataattgatacggaagagtatgccgtttatgagcgtcctgtcaaggccgatatggttgtggccgagtaatatgagactgtggcatcagtagcatttaggaagtacgttaatgtactattatggattttttcatcagttccaagtgttcaatgattatattttgcttcgaaaataagagaggttttttcttcgcatgaacaaaaaagtattaaaaaaaaagataccggtaggatttaaatcggcgattgtatatttgtttgcgaccgtttttacacgtggacttgcaattattactactccgatttttactcgaatcatgtccactgatcaggtaggcatggtgaacctatatagttcatggtattccatgataacggttgtatcgacgctggcgctaacatcaggtggattcttcatggccctacgagagtttgaaagtgagcgagatcagtatgtttcgtctgttctgtcgctgacttctctcgttgctattggattggtatttctatatgctttggcaccgtctttctggaatagaatgacgggacttccaacgcatcttatgatccttctccttgttggcttactggttgcgcccgctagagacttttggttgtcaaggcagagatttgaatatcgatataaactgtcaggagcagtaacaattgtttctgctgtagctgcatccggattagctgtagttgctgttttatatgcaaatagcatagattttagtgatattgctagcgtaagactatttgcgaattattccatagtttatggtgttgccgcagttatatggttttctattttcttaaagggtaagtgcttttattcatctaagtattggaagttttcacttcagttgagtctaccgctgataggctattctattgcatctcagattttaagtgtttctgatcgtcttatgataagtaaaatggttgggaattctgcagtgggtgtttacagtaccttgtatactgttagttcgttgtcattgatggtttggactgcgattaacgcttcttttacaccgtatttgtaccaaaacatggaaaacccgaaaagcaaaatcagaaaactttctatgacgatgctgggaatgtactctttggtcgcaattttacttgtgtaccttgctccggaaattgtgaggattttggcgacagcggaatactataaaggaatttatattatgccccccattgcaggtggtgtatattttattgcagtgtcaaatttgtattcggatattctggtctatttaaagaaaacgaaaatgatcatgatttcttctgcaattgcagcactgctgaatattgtgttgaattatctcatgatcaatgcatatggttacatggctgccgcatatacaacactggtttcctatatcgtaatggcagcattgctgtcaatttgggcaaatcgtgagttcaagaaaaatgttacagcggtcgattttgtgtacgacaataaaatgatcgcaatcatatcggtgctgacgcttattatttctatgctggcaattttaatttatgattatgcatttgtacgttatgctattgcagctttgatttttactgttacggttctgtatggcgttcgttatctgaaggcaaacaaggatatgaaaaacaagaaggcataatcggaaatagcagtgggaggatatggaaaatgaaacttatccgaaaaattacagaaagggtagctagaagaaatccgattaagtacgcacgcaaaatcggcgttaaggttggaaacgagtgcagatttactggcaatcctcggtggggaagcgagccgtggttgattcaggtcggaaaccatgtactcctgtctgcagaagtaaacttcattacacacgacgcaggcacttttttattccgtgatacggaggaatataaagatgtgtttaagtttgcgccaatcgtaatacatgacaactgctttattggaatgaggtcaactctattacccggaattgaaattggaccgaattctgttgttgcggcaggaagtgtcgtaacacgttccgttccacctggagaagtctggggggggggtaccagctcatttcatagaaacgacaaaagagtatgctgataaatgcaaagaaacccaattgccctacgatatgcaagcatacaacactgatatgaaatcagagcttttaagagtaacacatcaagcctatgaattctttaaataagaatagtgcaatagaagaaagaggaaataaaatgtctgcatttgataacgcaacccttatgatcactggtggtactggttcttttggttctaccgttctgaagcacttcttggattccgacctgaaggagattcgtatcttctcccgtgacgagaagaagcaggacgatatgcgccatgagcttcaggccaagcatcctgacactgccaagaaggtcaagttctacatcggtgatgtccgcaatccccagtccatccgtgacgctatgcccggtgttgactacatcttccacgctgctgctctgaagcaggttccttcctgcgagttcttccccatgcaggccgtccagaccaacatcatcggtactgataatgtgttgcacgccgctattgacgctggcgtcaagcgtgttgtctgcctgtccaccgacaaggctgcttaccccatcaacgccatgggtatctccaaggccatgatggagcacgtcatctacgcaaatgcccgtgtagcggctgagcgtggtggtacgaccatctgctgcacccgttacggcaacgttatgtgcagccgcggcagtgttattccgctgttcattgaccagatcaaggccggcaaccctatcaccatcactgaccccaacatgactcgtttcctgatgaatctggatgaggctgtggatctggttatgtttgccttccagcatggcaaccccggcgacctgttcattcagaagtccgatgcatctaccattggcgatctggcaaaggctgtccagcagttgttcggcgacaccggtacgaacatcattggcactcgtcacggcgagaagctgtttgagactctgatgacccgtgaggagcgcctacgtagcgaggatatgggccactacttccgtgttgctgctgacaaccgcgacctgaactacgataagttcgtggtcaagggcgaggttcataccatggctgacgagtcctacaccagccacaacaccaatcggctggatgtggaaggcaccgtcaagaagatcctgaccactgagtatgtccagaacgagctgaagggtattcccaatgtctaaggagaagctcctgttggttggtgccggcggcttcggtcgtatggttgctgaacaagcgatgcttcaatacgattgcgcctttgtagatgatggacagtctgtggggggcgaaatctgtggcattccggtggttggcagtcttgctgatttgccggagctgcggaaggagtacggcttgctggtggtgggtatcggcaacaatcggttccgggcacaggtgtatgagaaggcgaaagcccttggctttgcttttcccaatatcgttgcgcccagcgcctacatcagtccatacgcaaagttgggctgtggctgcgtggtgctgcaaaatgcctgtgtccagaatggtgcgtccgttggcaacggtgttctgctgaatgccggaacggaagtccactgtgatgcaacggtaggggactacgcccttatctacaccaacagcgtagttcgcacaggcgcaacggtggggaactttgcccgcatcggcagcaactgcaccatctgcaatcatgcaactgtgctggacggtgcagatattccagactgcaccgcagtacattaaagaggtgaagggatgaacattctagtcacaggtgctaagggcatggtgggaaccgccctgtgtaacaacctgaaaaacatccgagacggaaagaataagacccgtccggcattgcatattgaagaaatctacgaatatgatttggattccaccccgcaggagttggatgaatattgccagaaggcagacttcgtgttcaatctggcaggcgtgaatcgtccgaaaaacccggaagacttcatgaagggcaactttggctttgcatccgacctgctgaactgcctgaaaaagcacaataacaaggcaaccatcatgctgtcttcatccattcaggctacgctggctggtcgtttcggcaacagtgagtacggacgcagcaagaaggctggcgaggaactattcttccagtatgctcaggagaccggggcaaaggttgcggtttaccgttttgtcaacctgatgggacacagccgccccaagtacaacagtgctgtcagcaccttctgctgggcggttgccaatgatgagccatttaccgtcaacgaccgcagcaccgagcttgagctgctgtacatcgatgacttggtagaagggatgtttgacctgctggagggcaaggagcagcactgtgaatttgacggtgtagagactgttctgaaggcagacggtcgctactgctgtgttccagtgacccacaaggttacgctgggcgaaatcgtgaatcttctgcaggagttcaaagcacagcccatcactctgatgatgccgaaaatgccggacggctcctttgccaagaagctgtattctttgtacctgacctatctgcccacggacaagtttaagtatgccctgaagatgaacgtggacaaccgtggttctttcaccgagctggtacacaccgccgattgcggacaggtgagcatcaacatcagccgcccgggcatcacgaaggggcagcactggcacaactccaagtgggaactgttcatcgtggttgccggtcacggcctgattcaggaacggaatattaacaccggagagacggtggaatttgaagtttccggggacaaaatcgaggctgtccacatggttcccggatggactcacaacatcatcaacctgtccgagacggaaaatctggtgacggtgatgacctgcaacgagatttttgaccccaaccacccggacaccttcttcgagccggtgtaagaaaaaatactggttgtcaataggagatttttatggaacataattttaaatggaaaaatgatgggcgtactaaggtcatgattggctgcggtacccgtccggaaatcatccgactggctgcggttatcaaacgctgccgggaatattttgactgctgcgtggtctattacaatcagaactgggacagaaacctttccaccgttttctgggaggattttgaactgaagaacaccttcggggaatacggacctgacattctggtgcccgtggtgggcgagaatctgggtgtgacctgtggtaacattctgggtcgcagctatgagcttctggccgagctgcagccggagggctatctggtgctgggcgataccaactcctgcctgtccgccatcagcgcaaagcggctgcatatccccctgtttcacatggaggcgggtaaccgctgcaaggatgagtgcctgcccgaggagaccaaccgccgcatcgtggacgtgatctctgatgtgaacctgtgctactccgagttcgcccggaagtatctggcggataccggcctgcccaaggagcgcacctaccagaccggctctcccatggcagaagtgctgcacatgaatctggataagattcagaaaagcgacgtgctggagcgtctggggctggaaaaggacaagtacattctgctgtccgcccaccgtgaggagaacatcgactctgaaaagaacttcctgagcctgttcaccgccatcaatgcgctggcagaaaagtacgatctgcccattctctactcctgccatcccagaagcaagcaccgtctggaaaagagcggcttccagttggatcctcgtgtccgggtcaacgagccgctgggcttcaacgactacaataagctgcaaatgaacgcgctggcaatcgtctccgactcaggtacgctgcccgaggagagcagcttctatctgtccattgggcatcccattgccgccgtgtgcattcgtaccagtacagaacgccccgaggcactggaagccggtgatttcatcctggctggcatcactacccgggaactgctcaacgccaccgatatggcgattgaaatgaaacagaagggcgttctgggtaagccctgccccgactatgtggacgaaaccgtgtccatgaaggtggttcgcatcattcagggatatgtaaacgtggtcaataagatggtgtggagaaaagggtaagtgtgaaaaagatgggtaaaacagtattcatcaccggttcatccggttttatcggctctaaccttgccaagcgtattctgaccactgagccggataccatagtcatcggtctggataacatgaacgattactatgatgtccgcatcaaggaagctcgccttgcggagcttcagaaatttgaaaactatacctttatcaagggcaaccttgcggacaaggtacgtatcaacagcatttttgaacagtaccatccggatattgtagtcaatctgggtgcccaggctggcgttcgctactccatcaccaacccggatgcctacatcgagagcaacatgatcggcttctataacattctggaagcctgccgtcattatcctgtggagcacctggtgtacgcttcgtctagttcggtctacggcagcaacaagaaggtgccttactccactgatgacaaggtggataaccctgtttccctgtatgcggctaccaagaagtctaatgagttgatggcacacgcctactccaagctctacaatattccctccaccggtctgcggttcttcaccgtgtatggccctgctggtcgtccggatatggcatattttggctttaccaataagctggtgaacggcgaaactatcaagatcttcaactacggcaactgcaagcgggactttacttatgtggatgacatcgtggaaggcgttgtccgtgtgatggcgaaagctcctgaaaagaagaatggcgaggatggtttgcccattccgccctatgcagtctacaatatcggcaactccaacccggaaaacctgctggactttgtgcagatcctgtcggaggagctggtgcgtgccggtgtactccctgcggactatgactttgaggctcacaaggaactggtgcctatgcagcccggcgatgtgcctgtgacattcgcagataccgagccgctggagagggacttcggttttaagccccacactccgctgcgggaggggctgcggaagtttgctgagtggtacaaagagttctatatggaataaaagacgacgggaggaattatatgcgctgcgaggaaagattctacgaaatatatggaaaagatcccgtggacattagcttttgcccctatcggatttgccccattggtgcccacagtgatcacaacttaggaaagatcacaggacttgcaattgataagggaatccatattgcctacaagcccaagatgaatggcgttattgaaatgtgcagtcttcaattcccgaaacgtgcccagtggcatattcgggaaatcggcgaaaaaaccggcgattgggcagactatctgcggggggctacctgggcgctgagcaatcggtttccattgacagtcggactcagcggcgtcattgagggctcgttgcccatcggagggctttcttcctctgcagcggtgatactgtccttcttggatgcattgtgccaagtcaatggaattaaactggagccgtcagagctcatcagcattgcatttgatgcggagaaaaactatgtgggcgttaatgtaggaaccctggatcagagctgtgaggttctgagcaaaaaagaccacttgctatatctggactgtaaggataacagctacgagctgattcctacgaatcccaacatgaagccctacagaattgctgtttttttcagtggattggagcacagtctggctggctctaaatacaatatgcgagtggatgagttgcgttctggcgtatacgctttgcaggcttttgcgggtcttgagtacggaaaattcaatgaggctaatgcccgtgacgtttcgtatgagatctaccagacctataaagataagctgccgctgcaatgggcaaaacgctgtgaacattggtatacggagttcaagcgtgtggaagccggtgcggaagcatggcggcgaggggatttggaagagtatggacgcctgtcctttgaatcgggctggagcagtatccataactgggaatccggtgcgcctgagcagatcaagctctatgaaatcatgcgggaaaccaacggtatctacggtggacgctttagcggtgctggctttaagggatgctgcatggcattgattgatcccagcaagacagatgtcattcgggaagaagtggagcggaaatatctcactgcattcccggagatgcgtggaaagtacagttttcatctgtgcgagagtgcggacggcgtagggcataagacggaggactaatatgaagtgcttgattttggcggcgggatatgcaactcgcttgtatcccttgacggagaactttcccaaacccttgctgaaggtaggggataagaccatattggactggctggtggatgacattgacactgctggtctggtggacacctatgtggtcattagtaatcacaagtttgcccgccattttgaagactgggcggcaaccaaaaaacagaatatccgtgtggtggacgatggaacaagtagcaatgagacccggcttggtgctgtatgtgatgtgcagtttgccattgaccagttggggctggatgatgacctgctggtgattgccggagataacgtgctggatttctccctctccaagtttgttgcctatgccaacgagaagaaaacctcttgcatcatgcgctattatgaacccagcgaaaagaagctcaccaaatgcggcgtcgttgagttggatgatcaggataagatcctttcgatggaagaaaagccagcccaacccaagagccactggtgctgccctccattctatgtctacacccgagaggatgcccaaaaggtcaaggatgcaatcgaacagaagaaatgtggcaccgatgcgccgggcagcttcattgcgtggctgtgcacagtaacggatgtgcatgctatggaaatgccgggcaaacggtatgacattggtaacttggaaagctaccagcaggtccagcaggagtatcagggaatcaaggcataagtcttgctaaggatggaagaatgtatagaaagggagaaagaccatgaaaattgcagttgcaggtaccggctatgtcggtttgtctatcgccacgttgctgtcacagcaccacgaggtcatggcggtggatattatcccggagaaggttgaccttattaaccacaaaaagtctcccattcaggacgagtatattgaaaaatatctggcagagaaagacctaaatctgactgccacgctggatgctgaagctgcctataaggacgcagactttgttgtcatcgcagcacctaccaactacgatagcaagaagaacttctttgatacttctgcagtagaagctgtcatcaagctggtgatccagtataatcctgatgctatcatggtcatcaagtccacgattccggttggctttacagcttctgtgcgtgagaagtaccactgtgataacatcatcttcagcccggagttcctgcgggagtctaaagctctttacgacaatctgtacccgagccgtatcattgtgggtactgatgtggataacgctcgcctggtgaaggctgccaacacctttgcaggcctgctccaggaaggtgcaatcaaggagaatatcgataccctgatcatgggctttacggaagccgaggctgttaagttgtttgccaacacttatctggctctgcgtgtcagctatttcaacgagctggatacctatgcggagatgaagggactgaatacgcagcaaattatcaagggtgtgtgccttgatcctcgtattggtgatcagtacaacaacccaagctttggctacggcggttactgcttgcccaaggataccaagcagcttctggccaattacgctgatgtgccggagaacctgattgaagcaatcgtggagtctaaccgtacccgaaaagactacattgctgaccgtgtgctggagatcgctggcgcatatgaagcaaacgaggcttatgatcctagcaaggaacacaatgtggtggttggcgtataccgcctgaccatgaaatctaactctgataacttccgccagagctctattcagggcgttatgaagcgtatcaaggctaaaggcgcgacagtcattatttacgagccgactctggagaatggttctaccttcttcggcagcgaagtcgtgaatgaccttgaagaattcaaaaaccgcagccaagccatcattgccaaccgctatgatagctgcttggatgatgtgcaggacaaggtctacacccgcgacctgttccgcagagactaatacttattgcagccatgcgtcggcatggctgtgctgctcaagtgtgctacctctccgtggtgagcagcaggcaacggataattatccggctaacggcacattttattcgttaattcactcattggatgaggaaaaaactataatgggaaagtattttggaactgacggtttccgtggcgaagctggaatcactctgaccgcagatcatgcctacaaggttggtcgttttctgggctggtactacaacgcattgcgtgagcgcaacggcaacaacgagcctgccagcatcgtcattggcaaggatacccgccgtagctcttatatgttcgagtacagcctagtcgcaggtctgaccgcttctggtgcagatgcctacctgctccatgtcactactaccccttctgtggcttacatcgcccgcgtggatgactttgactgtggcattatgatctctgccagccataatccctactacgataacggcatcaagctgatcgactgctacggcgaaaagatgccggaggaaatcttgctgttagtcgaggattacattgacggaaagctccacgtctttgacaaggactggccggagctgcccttcgcccaccgggagcacattggctgcactgtggactatgtggcaggacgcaaccgctacatgggttatctgatctctctgggcatctactctttcaagggggtcaaggttggtttggactgcgccaacggtgcaagctggaatattgccaagtctgtttttgatgcgctgggggccgatacctacgttatcaacaacaagcccaacggtctgaacatcaacaacaatgctggctccactcacatcgagggcttgcagaagttcgtggtagagaaggggctggacatcggttttgcctatgacggcgatgctgatcgttgcctgtgtgtggatgaaaagggaaatgtcattacgggtgaccacatcctgtacatctacggctgctatatgaaggagcgtggcaaacttctgaccaacaccgtcgttaccacggtcatgtccaactttggcctgtataaggcttttgatgagaagggcatcggctacgccaagactgcagtgggtgacaagtacgtctatgagtatatggctaagaacggctgccgtatcggcggtgagcagagtggtcatattatcttcagcaagtacgccaacactggtgatggtatcctgaccagtctcaagatgatggaagtaatgcttgccaagaaactgcccatgagcaagctggctgagcctttgaagatctatccgcaggtgttggagaatgttcgtgtgaccgataaaaaggccgcacaggatgacgaagcagtgcaggcagcagtcaaggccgtagccgaggcactgggtgacaccggccgtatccttgtccgtgaatctggtacggagcctgttgtgcgtgtgatggtcgaggcacctgatcatgatacctgccagaagtatgtgtctcaggttgtggagaccatcaagagccggggttatggagtttgaacgcaaagctgaaacagaaaagtgttcatgcgctgttacttgcttttgtcgtggcttcaatcttgtttttattgccatatgcctcggttgatcatgattccggcttcacgtcttcgaatcttgaagtgaaggagaccgtggaggaaaacgtaacgaacgcgagttatgtgaactctgacggggttatcacagatgccattgacatgggttatgcgacagtacagagaacgcggaatgcaaatgggcaggttacagaagagttttacctcgatgctgctggaaacccagtggaacggtatggcgattactatggcatctcatatgaatataacagtgaaaatgttgtaatcaggtatcttggcgcagataagcaaccaatgatgctaggcgcaggttattccgccattgtgagaacactggtggatggaaaagcaacggacgatttctactacgacctaaatatgcagccagtccgatgcacaggcggctattacggtttgtaccgagagtatgatgagcaaggaaaaaattgtggcatcacttatctcggtgaaaatggacagcctgttatctgcacatctggttatgccgtcaagacgtatctgcgtgattcagaagaaaccgttattggcgaacgatactttgacacaggagaaaaccctgtgaaatcttctcttggccagtatggcgagctatatcagcgagacgaacaaggtcgtatcagccagataacttatctcggtgcagatggcaatccggcaccaacgactgctggctatacggttctgaagcgtacttaccaccgggatggtacagcggacatcgatatgtattttgatgctgatagtaacccgatggccttatccaaagggcagtatggcattaagcgcagcggaaaggtgaatcttctgcttgacaaaaacggtcgtgttatgctgtgcgtagacaatgttctgaatggactcccatttatggttgtcattttcggatgcgttatctgcttgctgatactggtgttgccgaaaaaaatgagtgttctcttgacggcagcgtatattgcgttcattctatatgaaaccctgatgttccgtgaggccggggatgcaaggacaaactttgttttgttctcctatgcagatcgttttctgactgagcaatctgtaagagtgggggtcatcaataacatctggctgttcattccacttggaacggggctgtataggtggtttcagaagaaatgggtgttgcagattccttttgtgatgtctgtggcaatcgaaacgacccagtatgttacgggacttggcatcgcagagttcgatgatgtgttcggtaatacgatgggtggatggattggtgtgctgacagcatgggtgtggttgagcagaaaaatgagcttgaaaaatagagcataaggaagtatacatgtctaattttcttcgttatccttgaaaacgagacctatatagtatatatttgagctgtgagagtcattcgttatggatgctcacagctttgtcgctcgaaactttgcacacctctacgcggtgggcggcaggcaacgcattagaatgtggctgagatgcagagtcgggtatagataaagaaatatttctggaaagggatactagagtgacgaaaaaagaattcgagcttaacttctggcagcactatctctggctggaaagtgaattccgtacagtgcttgaatatgtggaacttgacagtgctaattattctacatattcaagaagaattgaaaagctcattctccagattggatcagaatttgataatgtgtcacgggagatatgtggtttgcaaaatgtggatcgcacatcgatttgcgattactataactattacacatcaaattataataatattattgcgtccatagtgatagctggtgatgttcggctcacaccgttcgatggatggaataacaccgcaccgggagaaacacttgcattttggaaagcctataattctataaagcatgataggatttcaaattacaaggaagcgtcactgaaaaatgctcttgatgcaatggcggctttgttctgtgttgagatgctctatgcgaaaaagttgtatattcatgatgctaatgaggaaaatagctttccagaaattgagagcaagttgtttatattagatgggttagaacatcgcatccgtccttccaaatttgactcgccatatgatttatatgacgatgatgagggaaagaagataaattaataaagaaaggcggatatcttatgcccagaaccaaaggtagcaaaaacaaaccgaaggctactaacgatttcgcatcccaaattacagagaagaaggaatctatcgtttccctcacttcagaaatcacttccatcactgccaacatcgacactttaaaagctgacctaaaagagaagaagactgcgctcaaggctgcccagaaggaactgaccaagctggaggccaagaaggctgctgctgaggcgaaggccgccgaagctgctaagaaggtcgaggccgaaactgtgctgaagaaactgctggcaagcggtatgaccgcagatgagattcttgaaaagctgaaataaagtaatatgccgtgtgttcgtctccttgtggagcatttgaacacacggcttttactattattggaaatcctatatggttttaagacttaatgtgatataatagaaacggcagtttaccgtactacttgtaaagggcaggtgaatgtgcagatgtacatcatttgtcatagcgagaaattcgtgttcaatattgataagattgttgaagctatcacaaaggcttcaaaagcaacattgaatcggatgaacacccgaatcaccaaggaaattcaacagttgttggatttgggtgataactcgcttgaagattttccgcattctcagtggctttatgaaagaattgcggagttggagcggatgcggaagtacatcaaactcctaaagaagatgaaaagcaataaagttccagcgaagctgcacacgctttggctttgcaggataaaaaacagcagtcgaacactggcgagcacatcacttaacccaatgagcatcgcactgcctgttccgcccacgtttgaggctaccttgagtagttttggacgtgggagggatttggatgccctcgcatgctgagaaaaatccaatagagattgaaaactactatcacattatagacccgaagcgtaagctgtctgagaaagaaagggctgaagaggtaaatagggtgttagtgaatatgcctgcttgttttccagaagcactacggtatgtgatgacacgtttcggatttacgcaagaggctctggcttttgaatcaaaggtatcagagtcaacgattggtcgctacagaaacggaaaggttaaaagtttttctgagaaaaacgtggtggctctgtgtgttgccatgcaccttcctccgtggctttcatttgaactcatagcaaaagcgggttttagcttggctgcgaccagagagcagcaagcatatttaatggttcttagctgtatgtatatgaggtcggttgatgaggtgaacgactatttgaaagaaagagggtctgatttactgtcccaagtggcggcataagattgtcgagcattctgagcttctaagtcaaaaatgatgagccgtgtgtccttctccggtaaggagttgaacacacggctcatttacatttatggttattcccattcctcatcccgggctcggagaagatcctgtacttctttttcggttgccgggcggatggcaggtctgttctggtagtccgttttgccgcagtctgggcaacggtcgagcagcgactctgcctcaaagcagtaatggcagacatcgcagaaatagtagttcacaacacgcaagttgtcaagcaaaaaatatatatttgcataattctatgaaatgcaaagcatttaattgattgcatagcattgacaggtatgcaattttcaaatataatagatttaaaggtggtgataaagtgggaaggaaaaaggcagtgaatctatttccggaatatgccagatctaaaagggctgatgcagaggcactgagccaattagttttggcagccaagggaaatatgacgatgaagaagtttgctaacaaatgtggggtgaacacttctaccatttctcgtattataaatatgaaaatggaaaccgtatgctctgatgaagtaattcttgcaatttccgagaatgccgcagcagagagtggcgttaccctcgaagcattgcttgccgctaacggtatggtgaaactggtgcccgatataacaggtagacctatagaagatgctggtagtatgaatgaaggcgagcaagaggcgaaacattccggtaaggctatagtgacaacaaacaagtttggtcatcttagtcacctaaacaaacaggccttctgccaaacgtataatattgctgattatgaaatgcgaatggtggaaacaagtaggcaaataattttaaatgaaattatattaaatggatatacggttgagcttattacgtctgaaaaagcctactggtcctcattgaaacgctattacggtgattatgcaataaaaacagatgcgttaaaaagctacggcatcgacacatggctcttcgattgtaagtcgtatcacactggtaaagtagccgccgcatataaggcactagaaaaactatttgcactagcttacatgaatagcccaaaggatgcaggtgtaaagatatcagttgttgtagaccataaagatatgtttcagcaggcggtcaaggtgtattcaggtataaaggttcgggactgtttttctgtgattttgataaacgcacaaagtcgatgcgttgtggaggaattctgcattccaagagttgatggaacagaggtatcaatctttagaaacgactaaattgggataggaggcagggaaacatgagtgtggattatggcatttatgcgaccaaaggtaaacggatgctacttgcaatccgggcaatggtcaatggccgtaaagcggtggcgtatgtgaagaatggaaaggtacaagcctatgagtacttagatgatttggcagcccagtgctgcgttggaccctgcctcaagtttgaggacgagaatgagaagaagcggatgtgaattagcacacttggctcatcggaatcgtgtgagccagtcaaaaactaaactgctgcctgtttggtgctgctcgaatgcgtagtaagccggggtagacttcaaagaaatctgaaaaatttcggattttaaggagtctattccggcttttttcgtttataggggcgcacgagtgaacttgcacaaaaacagaactccgggtttggtattctgtccaaagatgtcgaaatggtatttacgctggataattttggtgctataatcatcatgggatttaggccaaaaggaggacttaacccatcatctttattccatagtgtaaatgcaatacgacaaaattggacagaaaggataaccgaaaatgcgaggtatataaggctctgaattgattagtatagacagcctaattgtttcagcaaagatatgtgtttgattggtaaaagctgaaacaaatttcttgatttaaggcgtacagatccaaagtacataattagaaaagcagtagaaacgaatttttttaacagcgcaatagaactctgagtagataaactcgaaaacaagaatgcttttataaattatgtaaggggataagtatgctcattcgagaattggactatattttcaattcgatctgacttcgcaatcggaatctttgtatatacaaagaccggagaagctaggatagtgtacttttatcaagtcactgagtcttagcagctccggtctttttttgtttgcatttgcagtatggaagggggtgaaccgaggtggcatctgctgtacataagaatatcgagcctaaagtggcggctgttaatgccaactcggtttgccgccagttgtcgcagaatactgctgagcaggagtttgttgctccggatgagtttgtcgctgaggttcagtggtctttgtcaatacgagagctgatcgcaggtctggagtttggagatgctctgaagctgttgatgaatgaccgggatatgtctgtagagcagatggagtcggagtctggactctctgtgtccacagtgaagcggcttcgcgcaggtcaggaggcaagcgcagaacaaatcgttgccatttcggtggcgttgcgtcttccaccaatggtcagcagtgatttattgagaatgtgtggaatcacactggacttcaacaatcaaaggaataccgtctatcagatgattctgacgagccattacaaagacggtatcgagcaagtcaatgtctaccttgcggcatgtggatgcgctccactcaaaactgcctgctaaagtacctacaacagaatacccatgaggcgattggaccgcaaaatggtctggtcgcctctttttttgaaattttttctgaggttagggctcagaaagtgagctctaaatggcagtaaaagggcgaaaaaccgtgctgtaaagccatcaaaaatgacctcaagctttgcagaagaacggaatatcgatggttttcgtgctgctttttagagctcacttagtgagctggtgatttgatcagtcttcagctatcatgtagtcagttcaagggacgagcccaaaaggacagacccaagaacacaaaaaaatatcgtaagcccgattctagagaaggcgaaggataccataacggagttttaccagctggcagatatcatctgctggaggtgaaacagccggtctatgggtgtacctcccatctctggaatcgggctttttgcattttgcaggcagtcccagctcagaatgtgagccctgctccgcttccgtcatcggtatccttctccctccctgagtccgggggaaaggacaagaaaatgactaacatgctgatgaacggtgcagttgcaatctatggcggcgtaggcgtgatggagattcatcagccgttaccgcaggcagtggagagcgtggcacaggctgtcgaggacttggcagtcaacgcacacatctctctgcgtgagctgaagaactgcgtggacaaggtgctggagaagaagattcccggctataagcagctcatggaaacaaatccggtggtggcagcaagggcaaccgtgaacggtgcgacgatcacggcgtatacgaacggctacgcagtttacgaagcagacgatgcacacaccgtgctggatgtgaaccgttgcggtgactaccgctatgatttcaacgatggcacctatgaggtcgtcccggctgaggtgttcgaggatgcggagtggactgtgcgcctggttatggagggcgaacgccgactggagaataaccgcagcaagatcagccgtgactacgaggagttcgctctgtcctgcgatggcacagattggtgcgatgccgctatggtggacttcatggaggcagaaaacgctgagatgctggcggacgaggaactccggaagctgtatgccgccatgagcaagctcacggagcgtcagcaggaagtcgtccagctctacttttataaggggttgaaccagtacgagattgctgaggaacttggcattgctcgccgttctgtcgggaactgccttgagggagctttgaaaaaaatcagaaagtatttttaa

SEQ ID NO: 431 - DNA, 19518 bp, unidentified
  source 1..19518: mol_type = unassigned DNA
  misc_difference 12381: note = a, c, g, or t
  misc_difference 12382: note = a, c, g, or t
  misc_difference 12383: note = a, c, g, or t
  misc_difference 12384: note = a, c, g, or t
  misc_difference 12385: note = a, c, g, or t
  misc_difference 12386: note = a, c, g, or t
  misc_difference 12387: note = a, c, g, or t
  misc_difference 12388: note = a, c, g, or t
  misc_difference 12389: note = a, c, g, or t
  misc_difference 12390: note = a, c, g, or t
cacagtttgcgtattcgcgcccgcctttcttttgggaatgggcttgtgtgccatgctatgttctttcctcttggtaaaaatcatccatctcatcggcggagatcccgatgcggcagatgaggaatcgcacgatgaagagcgctgatcttgccaccctgcgctctctgcatgggcgcaaaagatgggaacacatttgggcatactacaaactccccatcataggaattttaatcgttttatacattttcggatatgccgcttatcggcatttcaccaaaaaagaagcggtactgtacgttagccttgtgaacatttcagccggttctgatttgaccgggcagcttacggacggctttgcccaagatgcgcatctgacaaaaaagcagcaggtcaatctgctgaccgggctgattataaatgaaactgccaatgcagatgaacaatatgtctatgcctctgagctgaagctgctggctgctgtcagcgcacagcaattagatgttattctaatggacaccgctgcgcgagagcaactgcaaggcgaagaatattttcttgacctgcgtacattggatgcagatttcagcagcttggatgaattgtctgccgatggcgtaacgctggatatttccgacacgcccctcatagcacaagccggcttcgaggaatccgtttacctcggtgtcattgcaaatgcaccgcacccggagcgcgcagctgcctatattcgttatcttttgaagtagtaaagctgcttcttttttgttcgatacattcagcaaggagagatacacatggatattgtaacgattggtgaagttttgatcgacctgacccagaccggcagggatgaacgcggcattccgcagtttgcggcaaaccccggcggcgcccccgccaatctggcagttgcagctgcccggctgggcgcacagactacctttatcggcaaggtgggcgaggatgcctttggtcgctatctgaccgaagttttgcaggaaaacaaggtagacacccgctatatggtcaccgatgccgaccaccctaccaccatggcagtcgtgtcggtggatgcctccggtgagcgggatttcagcttctaccgcagtgccaacgctgatgtgatgctgcgcaaagaggatatcccggaggaagccctgaatgcagccaaaatcgtgcatttcggctcggtcagtctgaccgccgaccccgcccgcaccgctacgttggacgccgccgcccgtgccaaaaagctgggggcaatcatcacctacgatcccaactaccgcgccaacctttggcacagcgaggaagaagcaatcgcacaaatgaaagctcccctgccgctggtggatatcctgaaggtttcggacgaggagctgcccctgctgaccggcaccgccgactgcgaaaacggcacggcgcagctggcacaaaacggcattcggctgatttttgtcaccttgggtgcaaacggtgtgttctaccgctttggagagaaaaccggtcatgtagccggtgttccctgcaaggtgggcgacaccaacggtgcaggcgacaccttctttggggcagcgctgtccaagctgtgcaaggaggatttgaacaccctgacggcggaccaactggaaagtattctggcttttgccaacaaggcggccagcatcaccaccagccgccgcggtgccatccccgccatgcccaccctgacagaagtggagggctgacccatggcgcaggaattttccgcacgatttgcccgccataaggacgagctggaatggctgttcatggagctgtacaacaaccgggatggcttggaggttcttgaacgggagatggcagacgcctacgacgcccgcagcgccgagctgaaggcgctggacaaagcccgtgccgccgacccgaactggtacaagcggggcaatatgttcggcatgacgatgtacaccgacctgtttgccggaaatttgaaagaattggcaaagaagctgccctatttcaaggagcaaaagctgacctatctgcacctgatgcccctgctgcagatgccccacccgcacaacgatggcggctatgcggtggaggatttcgataccgtagacccggctctcggcacgaataaagacctcgaaaatctgacccgcgaactgcgcaaggccggcatcagcctgtgtctggattttgttatgaaccacaccgccagcacccatcgctgggcaatggcggccaaggcgggcgacccgtggtttcaagcctactaccacctgtttgatgaccgcaccatcccggaccagtacgagcagaccgtgccgcaggtatttcccaacaccgcgcccggcaactttacctggtgcgaggagatgcacaagtgggtgctgaccaccttccacgactaccagtgggatctgaactacgcaaacccggcggtgttcgtggacatgaccaaaagtattctgcatctggcaaatctgggtgtggaggtgttccgcattgacgctgtgccttacatttggaagcagcttggcacgacctgccgcaatttaccgcaggtacataccattgtgcggatgctgcgcatggtgctggaatgtgtctgcccggcggtcatcctcaagggcgaagtggtcatggcgcccaaggagctggcggcgtactttggcacacccgaaaagccggaatgccacatgctttacaatgtgtccaccatggtcaacctgtgggctgccttggcaagccgtgacacccgcctgctgaaggcacagctggacgccctgcacgccctgccgggcaactgctggtttgtaaactatctgcgctgccatgatgatatcggctggggtctggatgaagcggcagagaaccgttttgatattgacccccaaaagcacaaggagtatctctaccatttttatgcgggcgatttccccggaagctgggcaaagggcgagctgtacaactacgaccctgctaccggcgacgcccgcagctgcggcaccaccgccagcctgtgcggcgtggagcaggcgctggaatcgggcgatacgatcgcgctggactacgcggtccgccgcgacctgctgctgcatagcgtcatggcatttttgcagggatttccgatgctgaactccggcgacgagattgcccagctcaacggctgggattacaaatctgaccccaatcgggcagacgacagccgcaacctgcaccgcagtgcgtttaactgggaaaaagcaaaacagcgcacccaaaagggtacgctgccgaacaagctgtggcagggcatggaagaactgcgcaaaatgcgagcagacgagtgctttgccccggatgcgtgggtaaccacctgggacacccacaaccccggcgtcctggcattggtacgcaagcacggcgaggaaacgctggtggggctgttcaactttaccgagtacccggcaggggccggtcttgacgctttgggcggcagctaccgttccgcagacggtcagcccgtctggctggccgatgtcgaactggaaccgtatcaggcactgctcgtgaagaatgtataagtcttgaggcatacatatatccccgttcggctgcaccatccatgcaggtggttatgaaatgattgtcaggcattttacgtttatgccttcagaattggtctaatcataagttttcttcctttccgtgttgtatcgttattctgtgtaacccatttgcatgcactttccggcgagaaaaaagagcctggagaaccttaccgatttggtaaggccctccgggctctttttattccagttagtatcagtcggtcaatagtaagcgcaaattgcttacgagacgtgcacaattcacggcgacaatccaactatgacggatttcatcagcagggcttgctcatcatccaaaactgcaatccgttgtctgcggcgctcgtaaagagatattctctccctcacttcccgctttcagggaagatgattttgttgacaaagaagaaaatgaccatagacacgccgccgttcaaaaccgtcgtgccgatgttataaataaagtccggcaccagcagcccggctacggcaacccatacgcagttgatggagttgacaatgcaggtgatgacgcagaaagccagcacataccacgcaatctgcttgcctaaattgcccttgctgcggaacacgaaattgcgctggatcgggaagttgatgcactcaccaatcaccatagcaatcatgtaagcgcaaaagtacggcagaccgccgtgggcggcatcgtagccaaggatgttccacttgaaggtttcgccaaacagggtcacatccacgccgggccagccgaaatccaccaccggcagactgctgaacgcagcgggcagaaattgcagcagcagatacttgaacacggtaatcagattcgagacgatgacgaacagaccgccctcgcgcacccacttggctgcggcggggtgtttagccgcaaaattattccaaaactgcataatgcaacctccatcaagcgccgcgcagacgcttttccatctgcgcattcagcaccacattcttaattgcttcataaatcacccgcacaagacccaggatccagaagccctgcaattccatgacaatgccgtccaccatgcccatgctgatggcgccgttcgtcatctttgccaaggcgcgaaggggcatattgtactggaacaagatgttcaggtccggcttgccgcgtttatagctgacatccagcaggatcgtcagcacaagccagacaagccagcccagcgggctgcgtgcgtggttcagttcgcccaaggtcagattgcggtcaattttggttttgcctttcgggatgggatgccccaacagcttttcaaagtctgcatcggaaacgtgcagcacatcgcccttataatagcaatccaagtccctatcctcatacggatgcacggcagccgttccatgcacggagattttctcgcacagccggatgtcctccacgcttgcgccgacaagtagctcgtactcgccgccctcgatttcccagcggttagccttgacattccagaaacggaacgccttatcgtccagcatgatggtgatgcgctgtttctcaccgggggcgagtgttacgcgggcaaagcctttcagttcctttacagggcggaaaagctcactgtcctttttggcaacatatagctgcacgatttccgtacctgccacactgccggtgttcgttacggtaaggctgaccccctgttcatcggcagccatatcgctgtacgcaaacgtcgtgtagctcataccatagccaaacgggaagcgcacagctttttccgccgtggtaaagtagcggtagccgatgtacagcccctcgcggtactccacagtcttgcggcgggtggcaaagtcggcggcgctgggtacgtcggcgtaggccaacggccatgtttctgccagcttgccacaggggttgaccttgccggtcagtgcatccgcaacggcgcccgcccccgcctgaccgcctaaggcggcgtacaacagggcttggcagttgtccagccacggcgtttcgactacactgccgctgtacaataccacgacaattttcgggttgacagccgccacagcctgcagcagatccacctgattttgcgcaaggcgcagattgctgcggtcaagaccctcactctcggcgatttcatccagacccatgcacaaaacaactgtatccgcctgtgtcgccagttcgcaggcggatttctgcaaagcagcatccggcttaccgtggcggtcaaagccctgctgatacccgatgacgttcaactcggagttgatcagcttatccagcagcacatccacctgtgtcgagtttaccatgctggagcctgcgccctggtagcgcggattcttggcaaagtcgccgatgacagccactttggcacccgcagccaacggcagcaaagagccctcgtttttcagcagcacaaggctttcctcggcggcgcggcgggcaagcgcatgatgggctgccgcatcaaactcgcgcggggcagcgtccagcgcagccttggtatcaaacaccagcggcagcaactctgacaagcgggcgtcgatgtcggattcagagattttcccgctttccaccgccgccagcagttcgcgcacactgtccccgccgggcgcgggcatttccagcgtggagccgtttttcacacccagcgcgtggtcgttgcttccgccccagtcggtgatgaccgcgccgtcaaagccccactcaccgcgcaaaatctccatgagcaggtgcttattctcgttggcatacgtaccgttcacaagattgtaggacgacataatgctgcggggatgcccctctttgacggcaatttcaaacccggtcaggtaaatttcccgcagggtgcgctcgtccacgatggaatccgaagccatacgccgcgtttcctgactgttgacggcaaagtgcttcgggcaggcggctacgcccttggactggatgccgcgaatatatcccgccgccagcttgcccgcgagatacgggtcctcggagaaatactcaaagctgcgcccgcacagcgggttgcgcttcatgttaagccccggtcccaacaccaccgacacttcctgcgcagcggcttcctcgcccaaggctgcgccgatttcctcgcccagcgcggcatcccagctgttcgcaaccgccgacgccgtggggaagcaggtggcgggcacgctgggattcagccccaagtggtcgctctcccccgcctgcttgcgcaagccgtggggaccgtccgacagccagatctgcgggatgccgtgttcgggcataccccgcgttttgaaggtttccgcgccggaaagcagcgcgcatttttcttccaaggtcaattttttcagcaaaagttctgtattttgcatatagctttcccttctcataagaaaagccgcatccaacgcctgcaagcagacatcagacgcggctttcattcagcaagtaccgttatgttttatcaggggcaatagacgcttactctgccgccagcgtgaccacagcctcgttgatggagtaggtggtgctggagccccagccggaaacgatttcgtcgtgggcggggatggtcagctgcttgctgccgtcctcaccctcggtgatgggcaccgtcagggcatcgctgccgttcagggtcatggtaagggcatcgtcctgcgcatccaccagcgtgccggtgatggaggcagagccgtcggcggcagtcagcgtgcagaccttgtgggagtaatccaccagcagcacggcatccgttgcggtgggcgtctcaccctgcaccagctcatagctgcccgtgtactgctcggtgaccagatcctcgacctgcacttcaaacgtagcggtcgcacccaggaaggaggccgtcacggtcttggtgcctgtggtgtcgctgtcgtaaccggtgaaggtcaagcgaccgccccagatggactcctccgcaccgttggcgcgggtagccgtcacaaccagctcagccgggttgaaggtgtcgcccgtgtagaaggtgcgcaggttggaggcatcaatcgtcaggctcttggcaggggcatagggctgaccgtagatgttgatgttacgggtgaacgcaccgccataaacgccatactcttccgccagattgggactctggtcgaaatggaaaaccatgtcgatctcgcctgatttcagcgcatcaagttccgctttttggctgtcataaccgaccatctggaattccagctcctgatttcccagacaatccttggcaaaccgaatatagtccgtaatggtcccggtaagttccccggtggaagggtcatagacgctgacgccgctgtcacccgtcagaaagcccatccggatcgcgccgtgctttttgagccacgccttttcctctcccgtaaggatcggggtataatccatcgagaaataccttttatagagatccgccgtataaaaaggatcggcgtcctccagcgcgcgcatcgcattgtccagttcttccttgatatccgcacggtctttgttgattgcatagtagatgtcggagcttcccacgcgggttatggtcgagatgccaagctccgtccagaaggattcttccatcgaaacaaagcagtcgatctcatggtttgccagcttttgcttggcatcctcattgttggagatgttgacgtgctgcgttttcaggtcgtatttttcttcccattcggtcagcataacctccggctcggttcccatcagaacgccgatctttttgccgttcagcgtcttgaagtcggaagcggtgatgtcctcgcgcgagagatcggcgtagaggtaatctttttcctcccccatcggctcgtccgaaaacagcatctcctcggtgcggtcctccgtataggaaatatcgcccataatgtcgatttcgccgtttttgagtttttcaaagcagtctgaccagtcgcaggtcacatactcgagctgccagcctgtatagccggataaggtctgcagcaattcgtagccgtagccctttcttatgcccttctcgttgacatagttgaaggtgtcctcaaacgagccgacacggacgacctttgcagggacggtttctgcggcagccttcacgggaaacagagccggcagcaacagcagcaggcacagcatcgcacagatgcttctccatgtcggggtctgcatggctttgcgcgttccggagtttttcattctttcccatctttctccgccccaggcggctgcattttgatttcatttccgcaccgccgatttcaggaaggtcatggcagcctccatcgtatcgggttgtcagcagctttcttgaacagtatataccaacatatacagtatgtattatagcattgtcgcgaaatcgtttcaagattctttcgttgggtagcgtaaacaaatataaggcaataccgcataattcgcgggaattatgcggtattgccttaggtcgtcatcgcagacgattttagaatcggtataattattcaggcagttgaatctccggcatcagctcatcggagacgacttgcagcatttcctccaatttagccaggtcatcgggaccgaagcgctgtttagcgcgctccatgacaaggtgcaagtaggaataactgatgttatagtaatcaatgtacttttgggtcgggcgcaggcggtattcccgcttgtcgatggtggactggatgcgctctacatagccttttttgaccagtgagttgatcttataggcggcgttgggggtagaaagattcatcatgtggctgaactgcgcaatcgtaggttcgcccaatgccatgatgacttccatgcagaaagattctaccgtcgtcagcgtggcttcgcgatcctcgaatcgactgaagatctgcttatagaagtgcagtttgaatttggtatatacccgtccgaatgtctggtccagcatagcgagaatccccctgtaggttagtggatttattatagcacattccgccatgtaaaaccagccctcaggcatccgtgataacaaacgtcagctcggcgttggccgcgcgcacgccgtccacccatgcggtggccttgccgatgcctaccgggccatgctgttctatcagctcacattccagtatcaacacatcgccgggtatgacctgccggcggaaacgggcgttttttacaccgccgaacagggcgagctttccacggttttccggcaggcttaacgcggctaccgccccggtctgggccagcgcttccagaatcagcacaccgggcataacggggtgtcccggaaagtgcccctcaaaaaacggctccgtgcgggtcacgcatttgacgccccgcgcccattggccgggggtgtagtccaggatcttatccaccaaagcaaacgggtaacggtgcggcaggatctcttcgatctctgccgcgctcatggctcggggcggctcatttggcgtatagttcatcctcatccctcccagcgtttgaataccacgcaggcgttatggccgccaaagcccagactatcgctcatggcatactccacctgcgccgcgcgcccatggttggggatatagtccagatccagctccgggtccggctcctgcaaattgacggtggcgggcaaaaaggcatcgtgcagagccagcgcggtaaatacgccctctaccccgcctgcaccgcccagcagatggccggtcatcgacttggtagaagacacggccagcttgtacgcatggccgccgaacaccgttttgatggcagttgtctcgcagctgtcattcaggtgggtggacgtcccgtgggcgttgatgtagccgatctgttcaggcactaccccgccgtcggccagcgccagccgcatacaggccgcaccgcctgcgccgtccggcgccggggcggtaaagtggtaggcgtcgcagttagcgccatagcccacgacctcggcataaattttggcaccgcgcgctttggcggcctcgagttcttccagcagcagtacgccgctgccctcgcccatcacaaagccgctgcggcgggtatcaaaagggatcgaggcccgggccgggtcgtccgccgtgcaaagggctttcatgctggcaaagccgcccacgcccagcgggctgatgcagctttcgctgccgccgcagagcatgcgatcctcgtatccatcgcggatacggtggaacgcatcgccgattgcattggtgccgcctgcacaggcggtggtggggcagctgcacatgccctgcaagccaaaacggatggcgatctgccccgccgccatattgccaatggacatggggacaaaatagggactgaccttttcaaagccgcgctgctgaccgcgggtgtgttcttcctcgatggtgggcaggccgccgatgccgctggaaagaatcacgccaaaccgcgtatggtcgatttcttccagcgcaaggccgctgtcgcggacggcttcgtcggcggcggccacggcaaactgggtaaagcgtgccattttgcgggcttcgcgcttgtcgatgcgcgcggcggggtcaaagtccttgacctctgcggccagctttactttaaaatcagccgtatcaaaagccgtgatcggtcctactgcgcagcggccagccttaatgttcgcccagctttctgccaccgtattgccggtaggatttaccgtgccaaggccggtaataacgacccggcgtctcttttttgtgtccattgcacacctcacattcccattccgccgtcaacgcaaaggacctgcccggtaatatacccggcctgctcccctgccagaaaagccaccgccgccgcaacatcctcggcatggccgattttgcctgccgggatggccgcttgtgctgcggcacgggccggttctgacagcacggcggtcatatctgttgcaataaaaccgggagccacaacgttggcggtgatattgcgggccgcatactctttggcagcgcttttcgtcaggccgatcagccccgccttgctggctgcgtagttggcctgacccgcgttgccgtgcagaccgacaacactgctgacgctgatgatgcgcccataccgctggtgcatcataaagcggcaggccgctttggtgcagaaaaacgcccccttcaggttggtggcaagcacattgtcaaaatcagcttcggtcatccgcagaagcaatttgtcggcggtaatgcccgcgttgttgaccagcacatcgattcgcccaaaagcggcaacggtatcttctaccagtttctgacatgcttcggggctgcgcacgtccgcctgcagcgtgacagcctgcacgccaagggcgcggcaggctgcggctgtttcctcggcagcggcagcgctgccggcatagttgacggcaatgttcatgccgttttcggccaaagcccggcaaatggcacggccaatgcctttggccccgcccgtaaccagagcggcacggcgcaagttttcggtttgcggcatggtcaggctcctttcatggtgcgcagcagctgttgcagctgcgcggcagtttccaccggatagcacgagatagcacttcccacagtctttttgacaaacccggtcaacgccctgccgggaccgatctcaatggcggcgtccacgcccaattctgccagacggcggacggtcacctcccaacgcacgccggactgcacctgtttttccagcagcgcggcaatggtgtcggtttcctccatctcgtgtcccaggcagttgaacagcacagggaactgcatcggcgcaaagcggacagccttacatttttcccgcagtgcatcccctgccgggtgcatcaatgaggtatggaacgggccgctgacattcagnnnnnnnnnnggcagcgtcgtgccccggcagcaagcgccaactcggcagctttatcgacagcggccttgtcgccgccaatgaccagctggccggggcagttgtagttgcagatctgcacaacaccttcgtcggcggctgcattgcagcatgcctgcaagggggcttcgtccagccccaaaacggctgtcatcccgcaggtgcgccccgccgcagccgcagccattgccttaccgcggaaagccgttaaagcgactgcggtctgcacatcgaacacccccgcacaggccagggcagaatactcccccagcgacagccccgccgcataatccggtgtgacgcctgcctcccgcagtacggcagtaaggccagcggcaaacgccgtcatgcagggctgggtgtattgggtctcgctcaatacaccggctgcgtcggtaaagcaaacttctttcaaatcaaaatccaccgccgcgtcggcttcgtcaaaagcagcgcggaaagccgggaaagtctcgtaaagatcccggcccataccggcgtgctggctgccctgcccggcgtataaaaatgctagtttcataaggtgatctccttgtacaccccggcgatgcagtctttggcttcgcttaccatcgcggcaaaaatttcttccaccgggcggacttcgtgcagcagccctgcggcctgtccggccatcaggctgccattctcggtgtcaccgtcaaacacagccttgcgcagactgcctaaagtaaagcgttccagcgccattttatcagccccggccttttcctggcggacatactcgcggctcatgcggtttttcagtacacgcacaggggtgccgccgatgcgcccggtcacgatagtatcactgtcgcgggcttttaacagggcggctttatagttttcatggatggggcactcggtgctcgccagcagacaggtaccgacctgcacaccgcacgcccccaatgccagcgcagcagccagccctcgtccatcggcaatgccacccgcagcgatgaccggcacatggacggcatcgacgacctgcgggacaagtgccatcgtggtcatctcgcccacatggccgccgctctcggtaccttcggcaataacggcgtcaatgccgagcggttccagatgtttggccaaaatggctgccgccaccacggggatgaccgtgataccggctgctttccacgcggccatgtactttcccggatttcccgccccggtggtgacgagctttacgccctcctccaccacgattttggcaaattcatccgcctgcgggtgcatcagcatgatgttcacgccaaagggcttgtcggtcagtgcgcggcagcggcggatgttttcccgcagggagtccgcgtccatgccgccggagccgatcagccccagcgacccggcgttggaacaggcggcggcaaactcgcccgtggcgatattggccatgccgccctgtataatgggatattttgtacctaaaatttcattgagcagcttcattttctaccctcatacgtcagcagcatcccgccccatgtcagcccgccgccaaagccgatgcaggccagcgtctggccgggtcgcagcagatcactttccgccatttcgtgcagggcaatcgggatgctggcagcactggtgttgccgtgacggcttatgtttttgtaaaactttgacggttctgcgtgtaaacttttgacgcaatggtcaattatgcggctgttggcctggtggcagactacccagtccagatcagacaatgtcttttggctgcggtccagcacagcttgcagacagcgcggcatagcctccacggcaaagcggaaaaccgccctgccgtccatcgtaataggcgcggtatcgcaggccgcagggccgcccgcgcaaattgcttcattgccccgtgcgcctaacgttacggcgaacggtgcattttcggccaactcaaaaacagccgcacccgcgccgtcgccaaacaatacacaggtcgtgcggtcagtcgggtccaccatgcgggagagtgcctcgcagccaatgaccagcgcataccgcccgcccagcgtgcgcaggagcccgtgggccgcggcggcggcataaataaagccggaacaggccgcatttacatcaaaggcaggccggttttccggcagacccaaggcagcctgtacgcggcaggcaatgcttggggtagccgtcggggccgagagcgttgccacaacacagcaggcaatgtcgcttgccgccagaccgctgcgggtcagggcctgacgggcggcggtgatagccagcgtggcggcatcctcgttttcggtgcagtaatagcgctggcagatgccggtgcgtgtcgtgatccattcgtcgctggtgtccacctgtcggcgcaagtcctcgttcgtcactacacggccgggcaatgccccgccggtagccagcagctgtaagcctttcatgcgcccctcatttctccgatgcgacggtattttttgtagcgctggtctgccaacgctttgccgctcatcttgcataaggcggcaaggtgcaccgcaatggcagtgtccaaccggctgaaaagcagctgccgtccccgctgtgcgccgcccagcggttcggggatgatctcttccacaatgccatctgcgtacaggtcttgtgccgtcagcttcatcatggtgcaggcctcgccgctgcgggaagcatctttccacaaaatgctggcaaacccctcggggctgagcactgagtacacggcattttccagcatcagaatgtggttggcaacgcccagacccagcgcgccgccgctggacccctcacctgtgacaatggccaacaccgggacggtcaggccgctcatctccatcaggttgcgggcaatggcttccccttggccgcgttcttccgcatccttgccggggtaagcaccgggagtgtcaataaaagtgatgatggggcggtgaaatttttctgcctgtttcatcacgcgcagggccttgcggtagccctccggtcccggcatgccaaagttgcagcgcaggttttcttccagcgtagtccctttgcggtgccccaaaacggtaacgggcatcccgtggaaccgtgcgatcccgcataaaatggccgcatcctctttgcattgtcggtcaccgcactgctcaaaaaagtcggtaaacaaattgtcgatcagttcggttatatgcgggcggtcagggcggcgggccagaaaaacgcggtccgccggcgtcagcgaggtgcagcgctgtaaaagcgtgttttcctctgcggaaagctcagccagttcagccgcatgggtggtcgtgctcgccatttcggcgtcatcggcacggctgcacagcgcgtcgatctgcgcgtccagcggttccaactgctgcaaaacttctttgatcatctgcgcttcctcccctgcgtgtggagctgcaagatccgcgttaagacctctttcaactcggtgcgcggtacgacctgatccacaaaaccgtgttccagctggaactcgctgcgctggaacccgtcgggcagtttttcaccgatggtctgttcaatgacgcgcggcccggcaaagccgatgagtgcccccggttcggcgagcgtaatatcacccagactggcaaagctggccgtgactccgcctgtggtggggtgggtcagcacgctgatgtacaacccgccgctgcggttgaaccgttccagcgcggcgctggttttggccatctgcatcaggctgaaaatgccctcctgcatccgtgcgccgccactggcagaaaaaataatgagcggcaggtgcttgtcggcagcatactcaatcgcacgtgtgattttttcaccaacagcggtgctcatgctgcccataaaaaaacggctgtccagcacagcgaccaccgcctgcacgccgccgatcctgccgattgctgtaacggcggcttctttcaggccggtcttgaccgaagcagcggccagcttttcctgataatcgggaaaatgcagcacatcgttgggcgcaatgtccgggttcagctctttaaaagttccgtggtccagaaccgtgctgagccgataataggcgccgattgccaaatgcaccccgcagttggggcagacatactggctcttgacccaaacctgccgcgtggcacggcggccgcattttttgcactcgacaaattgcggcggcacccagttgggcgcagccgtaccggcatcgcggcgggctttcatctgaaagctgcgctcctgcgggctggtcgggaacagcttttcaatggcactcattctgcaataccctttaggctgcccgcgcagccagatagttgaagatgtcgcccacggttttgagcgtccccaggtcctcatcggcaatcgtaacgccgaacttgtcctcaaacgccatattcagctctaccgcatccaggctgtccgcctgcagatcgtcggtcaggctggcatccatggtgaccttatcagcatcgcagttcagggtgtcaacaaaaacttcttttacttcttcaaagctcatattacgtacctcacataatttaactaaataaattgacgtaattgtcaatgaggtcattataccacgtttgtttcgaatgtcaatattattaggtaaaaatatttatctaattgaatcgccgtttttctcatcgtccggtattataaaaggggaagcacacaaattatccccctgctggggcagcccttgctgactgcgatttgaccgctgctgcatatcttccctgtgaaatatccaatcgcctttaaatggttttatttacttcctttttttactctcccagattattttctattctgcaacatatttcgctctaatgtgctatactaataatatccgataatgatggaggatcttctatgaaacgcagcagcatccgactccagtacaatgcccccgtcacactgacctttttctttttgtccctcgcctctctggtattgggctacttaacaaacaactggacaacctcgcacctgtttagtgtgtatcgctcgtcgatgacggatccgctattctatgtccggttgttcggccatgtccttggccacggcggttggaatcactttataaacaatatgctcctcttccttgttgtcgctccacctttggaagaacgatacggaagccgaacacttctaagcggtatccttatgaccgcgctggtatccggcatattgcagtgtgtgttgttccccacttctgcattgcttggtgcatccggtatcgtattcatgctcatcatgctctccagtttggccggcagtaagaatggaggtatccctatcaccttcatcttggttggcgtgctgtacttaagccagcagatatacagtatcctctttatacaagataatgtagctaactttatgcacattgtcggtggtatttgcggtacagcttttggttttgccgtccggaagagataacgaatgatcgggaagaggatcttatttatgatgagtaagcacatttttcagaaagaacctgtcctgagcattgccacttgtttggcgatcatttccgctttctttgtccccccggacgcagaatacctcggatatatcgatttccgtactcttgcaatcctgttttcgctaatgacagttatggccggactgagagggcaaggtgtatttgatagactcggccatgccctcctatctcatacccgcaccactttgcagctaacagctgttctcgttggcctatgcttcttcagcagtatgctgataacaaacgatgtatcgctgctaacattcgtgccatttacgtttgtcgttctgaatagtttgaacgcatctgttcgcagcaaactgctcctccctatcgtctgtatgcagacgatagctgccaaccttggcagtatgctcacaccactgggcaatccccaaaacctgtatttgtatggcaagagcgggatggatataagctcttttgttctgttgatgctcccctattccatcatatcattagtgcttattgctatatgggcagtatggctatgccgtgaagattccgacattgttgtaactcattctgcggtaaactcagaaccagacaggaaactcattgcgttgtacggtattctgtttgtcgcctgtttattggttgtattacgtgttctcccatacggtgttgcattcgtcgctatcttggtgtgcaccttctttgccgaccgccccactcttggccgcgtagactattctttgattcttacctttgtagcactgttcattttcatcgggaacttaggtcggattgaagcgttctctggatggttgcagaatattctggccggccatgaggttttagtatcagttctggcctctcaagtgaccagtaatgtgcctgctgccatcctgctttctggatttaccgataatttccgtgcgctgattattggcacaaaccttggtggccttggcacattaattgcatccatggcaagcctaatttcttatcgccagattgcaaatgaagtacctgctgaaaaagggcactattttgcgatgtttactatttccaatgtagtgtttctggccattctgatgggcgcttgggccctgacctgatattttcgtaattctattgccatttaacgtctttaaatgaaaatccacattcgtaaatggtcgcgcaggcaagcaaaagcgagcgcattatgaaaaattacgtcagcagttacagaaagctcaaacaccatcttcacgcagaaggctgaaagctatagggaaacaaaaaagcggaggaggcaaaaacgccttctccgcgccaaaattttcggttgtagggaaacaccgggggtagaaagtgtattactgccatcctcttgccgcagggtcgagcatctcggcggcggaatacaccagcgcgttgcagatggcggcagccacgttgctgccgcccttgcggcccatggcggcgatggcgggcacgccgtactgcgtgcaaaccgcaaacagccgttccttgctttccaccacgttcacaaaaccgacgggcacggcgatgaccagcgcggggcgcagaccgctttcgatctcgtccgcaatcgtcagcagcgccgtgggggcgttgccgacggccag

SEQ ID NO: 432 - DNA, 5292 bp, unidentified
  source 1..5292: mol_type = unassigned DNA
ctacagcttctctgtcagtgtctgacacgcctttgccgttccgagaagctcaggcagtacttcctgctttgtaccaatcttttttaattgtccatccgcaatcacaatgatcttctccgcaatatccagaatacgttcctgatgggaaatgatcaggatcgttccctgaatctcatcccgcatcttttcgaaaacacggatcaggctgttaaagctccagaggtcaatacctgcttccggctcatcaaagatggaaagctttgttcctcttgccgtgatcatggcgatctcaatacgcttcagttccccgccggaaagactgttattgatctcgcggtcaatatattcccgcgcacaaagccccacttccgacaaaatatcgcagatctcattgacactcagctttttccccgctgcgatcgtaataagatcacggactgtcagtcctttaaaatgcaccggctgctggaatgcaaagctgatgcccttattggcacgctctgtgatattcaatcctgtgatatcctcaccatccagcagaatttgaccgcttgtcggtgtcacaattcccgcaatgatctttgcaagcgttgacttacctccaccgttcggtccggtaatcgctacaaaatgatcctcgatctgcaggctgatatcccggatgatctctttgttatcttctacttcataacatatatttttcagttctaacataaattatttcttcctttttgatttctgattctgccatacgtcagctattatggtttaccgctccgcgcgcatcggattgtgcaggaagtcttcataggcaagtctgataccgtcttccagctctgtcttgtatttccagccaaggctttcagcctttgaaacatccagaagctttctcggtgttccgtttggcttactcgtatcccacttgatctctcccgtaaatcctaccacctttgccacaagctctgtcagttctttgatcgtcagttccttacctgttccggcgttgactgtctcatctccgctgtagttgttcatcaggaacacacaaaggttagccagatcatccacgtataagaactcacgcagcggtgaaccgtctccccagcaggttacctccgtaagccctgcctcttttgcctcatggaatctgcggatcagcgccggcagtacatgggaatgtgttgggtgatagttatcatttggtccatacaggttggtcggcataacagaaatatagtctgtgccatactgtttatttaaaaattcacaatatttcaggccggaaatcttcgcaagcgcatatgcttcatttgtcttctccagctctgaagtcaaaaggcagctttccttcatcggctgtggtgccatacgcggataaatgcaggaagatccaaggaattccagcttcttacagccgttcttccatgcactgtggatcgcattcatctccagaatcatattatcatacataaaatcagccagcgcattctggtttgccacgattccgcctaccttagctgctgccaggaacacatattccggtttttcctgcgcgaaaaattcctccacagcatcctgccttgtcagatccagttccttatgggttcttgttacaatattgtgatagccctgtctttccagttctcttacgatcgcagagccaaccatccctctgtggcctgcaacatatatttttgcgtctttttccatcattttggtacacttctttctctatcatttatcgtcttattcaaaatctgagcctgcctgtcatatcacggcagcttctgcagccggcagtaagcaccgtcttacttcacaacgcccttctccagatattcttccagatttgtcttgatgtgctcttctgctctttccacagcaaccttttccatatcatgttttgtcataagcgctacaagctcttcaaagcttgtcttggtcggattccagccaagctctgtcttcgccttggtcggatctccccagagatttactacatcagtcgggcggtagaaatcagggctgacttcaacgatcactttgccattggctttattaatacccttttcgtccattccgcttccctgccattccacttcaatacctgcatgatggaaagcaagtgttgcgaactctctgacagaatgctgtacacctgttgcgatcacgaaatcttccggcttatcatgctgcaggatcagccacatacattccacataatcctttgcatatccccagtcacgcagactgtcaaggttacctaaatacaacttatcctgtttaccctgtgcaattctcgccgcagccaatgtgatctttcttgttacaaaagtttcaccacggcgttcgctttcatggttaaataaaataccggagcagcagaacatatcataggcttctctgtactcttttacgatccagtagccatactgctttgcaactgcatatggagaatacggatggaacggtgttgtctctttctggggaacctcttctacttttccgtaaagctctgaagtggaagcctgataaatacggcaggtcttttcgagaccgcagacacggactgcttcaagtactctgaggacacctgttgctaccacatcggctgtatattccggaacatcgaagctgacctgcacatgggactgtgctgccagattgtagatttcatccggtctgatctctccgatcagctttacaaggctgatggaatctccaagatctccaaatttcaaatgaaaatgcggtgttccttccagatgggcaatacgttccctgaaatccacggaagatctacggatcataccgtatacctcataacccttttccaataaaaactctgctaaataagagccgtcctgtccggtcacacctgtgataagtgctttttttgccatagttccttctcctttttctattctatatgacgatattgctattttctgtttattataatatacccatgtttctgccttatccattcattgtattgacattcagttgcattatattgacttttattttgaatttctatactatatagaaaagatcttacagaaacggagttttttcatgaagcatcaggcattatttcacggtgatctcgtcaatacgacccggatcatttatactccctcagagtttgccaaaacttcccttttacatgtacaggaaattggcaccttgcaggcacaaaaaccgcatgtcagcaaacgcgaagatctggattcctatctcttttttatggtacgatccggctccggcgagctgcattatgcacataatacttatccgctcggtgtaggcgattgtgtctttatcgactgcagatccgcctattttcacgaaacaaaggatgatctctggagtctttcctgggtgcattttaacggtccctcgatcgatggtatctaccagaagtataaggaacgcggcggtctgcccgcctttcatgcaaatgcattttctctttatgaggactgttttaaccatctttacagcatagtatccggcaattcttatgtccgggatatgcagatcaacgaagggctttctgccctgttaaccctgttgatggaggatagctggcatccggacagtatgcctgcacataccaaacgtaccagcctgtggcatgtccgggagtatcttgaccagaattatgcgcaaaaaatatcgctcgacgatctcgccgaacgatacttcatcaacaaatattatctcaccagaatcttcaaggaacaatttggtgtcaccatcaataattaccttttaaacgtccgcatcacccatgccaagcgtgaactgcgcttctccggcaaatccgccgaagagatcggtgctgaagtcggttttcacgagctgtactacttcagccgcgtctttaaaaaggtggagggctgcagtatcagtgaataccggaggatgtgggggacgtgatcagatttccagctcaaatttctgtttatcatgcacattgatatccttgccaagctggatctccacgagacgcagctctgtatccgcaaacaccgtatgacgacagcctgcagacattgtgatcacatcgcccgcttttaccgcctgctcaaatccgtctacgaccgttctgccgtttccggaaataaccacccagacttcatcccggtttttgtggctgtgataattcatgctatgccctggattcagagttaccttgatcgtcatggaagttccttccacatccaatacccggaagcttccccatgatttttccgcaaacatgatctgctgttcaaatttatccacataaggcttgatatagctgctctgctctttatcggataccagaatgccatccggcgaagcagaaataaccacatcatgcagtcccatcgcaagcacaggcacatccatctcattgacgatgtgcacatctgaacaggtctcattcaagacaccttttccgacaacagattcttccatcgcctctgtcagtgtattccatgtaccgagatccttccactgtccggcaaaacgctgcacctggatcttatcctctttctctacaaccgcataatcaaaagaaatttttgtcaacgtctcatatttatcaaataaatcctgataatctgtaaattcaatcagttcatgcgccttctcaagcacatatttcagcttgtacgcaaaaacaccaccgttccagagagcaccgcgctttatatattcctctgccacatctgcagtcggcttttccttaaaggtctcaaccatagatgtatgatctgccgtcttcggaatgatatatccatatttttcactcggataagtcggttcaattcccatcagtaccagatttgcctcacccttgtctgcctgctcagacagatctttcaatgcagcaaaatagtcatcctccacatagggatcaaccgggcagactaccaccgattcctccgggctgactttcatttcatcgacaagataagctgtcgctaacgcaatcgccggaaaagtatctcttctgcatggctctatggaaatccccacgccatccccaagctgattatgaattgctgaaacctgtgtcttggaggttgcgatcgtgacggttgcatccgcatctaccgtcttgatctgccgataaacacgctgcaccatagactcataagagccgtcctttttcttaaatatttttataaactgtttgcttctcacatcattggaaagcggccacaggcgcttccctgatccgcctgataataatacaatgttcattgtttttcctgttcccttgtataaatacaa

SEQ ID NO: 433 - DNA, 7164 bp, unidentified
  source 1..7164: mol_type = unassigned DNA
  misc_difference 930: note = a, c, g, or t
  misc_difference 931: note = a, c, g, or t
  misc_difference 932: note = a, c, g, or t
  misc_difference 933: note = a, c, g, or t
  misc_difference 934: note = a, c, g, or t
  misc_difference 935: note = a, c, g, or t
  misc_difference 936: note = a, c, g, or t
  misc_difference 937: note = a, c, g, or t
  misc_difference 938: note = a, c, g, or t
  misc_difference 939: note = a, c, g, or t
  misc_difference 940: note = a, c, g, or t
  misc_difference 941: note = a, c, g, or t
  misc_difference 942: note = a, c, g, or t
  misc_difference 943: note = a, c, g, or t
  misc_difference 944: note = a, c, g, or t
  misc_difference 945: note = a, c, g, or t
  misc_difference 946: note = a, c, g, or t
  misc_difference 947: note = a, c, g, or t
  misc_difference 948: note = a, c, g, or t
  misc_difference 949: note = a, c, g, or t
  misc_difference 950: note = a, c, g, or t
  misc_difference 951: note = a, c, g, or t
  misc_difference 952: note = a, c, g, or t
  misc_difference 953: note = a, c, g, or t
  misc_difference 954: note = a, c, g, or t
  misc_difference 955: note = a, c, g, or t
  misc_difference 956: note = a, c, g, or t
  misc_difference 957: note = a, c, g, or t
  misc_difference 958: note = a, c, g, or t
  misc_difference 959: note = a, c, g, or t
  misc_difference 960: note = a, c, g, or t
  misc_difference 961: note = a, c, g, or t
  misc_difference 962: note = a, c, g, or t
  misc_difference 963: note = a, c, g, or t
  misc_difference 964: note = a, c, g, or t
  misc_difference 965: note = a, c, g, or t
  misc_difference 966: note = a, c, g, or t
  misc_difference 967: note = a, c, g, or t
  misc_difference 968: note = a, c, g, or t
  misc_difference 969: note = a, c, g, or t
  misc_difference 970: note = a, c, g, or t
  misc_difference 971: note = a, c, g, or t
  misc_difference 972: note = a, c, g, or t
  misc_difference 973: note = a, c, g, or t
  misc_difference 974: note = a, c, g, or t
  misc_difference 975: note = a, c, g, or t
  misc_difference 976: note = a, c, g, or t
  misc_difference 977: note = a, c, g, or t
  misc_difference 978: note = a, c, g, or t
  misc_difference 979: note = a, c, g, or t
  misc_difference 980: note = a, c, g, or t
  misc_difference 981: note = a, c, g, or t
  misc_difference 982: note = a, c, g, or t
  misc_difference 983: note = a, c, g, or t
  misc_difference 984: note = a, c, g, or t
  misc_difference 985: note = a, c, g, or t
  misc_difference 986: note = a, c, g, or t
  misc_difference 987: note = a, c, g, or t
  misc_difference 988: note = a, c, g, or t
  misc_difference 989: note = a, c, g, or t
  misc_difference 990: note = a, c, g, or t
  misc_difference 991: note = a, c, g, or t
  misc_difference 992: note = a, c, g, or t
  misc_difference 993: note = a, c, g, or t
  misc_difference 994: note = a, c, g, or t
  misc_difference 995: note = a, c, g, or t
  misc_difference 996: note = a, c, g, or t
  misc_difference 997: note = a, c, g, or t
  misc_difference 998: note = a, c, g, or t
  misc_difference 999: note = a, c, g, or t
  misc_difference 1000: note = a, c, g, or t
  misc_difference 1001: note = a, c, g, or t
  misc_difference 1002: note = a, c, g, or t
  misc_difference 1003: note = a, c, g, or t
  misc_difference 1004: note = a, c, g, or t
  misc_difference 1005: note = a, c, g, or t
  misc_difference 1006: note = a, c, g, or t
  misc_difference 1007: note = a, c, g, or t
  misc_difference 1008: note = a, c, g, or t
  misc_difference 1009: note = a, c, g, or t
  misc_difference 1010: note = a, c, g, or t
  misc_difference 1011: note = a, c, g, or t
  misc_difference 1012: note = a, c, g, or t
  misc_difference 1013: note = a, c, g, or t
  misc_difference 1014: note = a, c, g, or t
  misc_difference 1015: note = a, c, g, or t
  misc_difference 1016: note = a, c, g, or t
  misc_difference 1017: note = a, c, g, or t
  misc_difference 1018: note = a, c, g, or t
  misc_difference 1019: note = a, c, g, or t
  misc_difference 1020: note = a, c, g, or t
  misc_difference 1021: note = a, c, g, or t
  misc_difference 1022: note = a, c, g, or t
  misc_difference 1023: note = a, c, g, or t
  misc_difference 1024: note = a, c, g, or t
  misc_difference 1025: note = a, c, g, or t
  misc_difference 1026: note = a, c, g, or t
  misc_difference 1027: note = a, c, g, or t
  misc_difference 1028: note = a, c, g, or t
  misc_difference 1029: note = a, c, g, or t
atgaaacaatacactgccaccgccaacgacgagggtgtccgcctctcccgctttgtccagagcgtgacccgtgacttccctaccagccttttatacaagagcttccgcaacaagcgcatcaaagtcaacggcaaaaagggtgtacccgaagaccgcatcaaggccggcgacctcatcgagctctacatcaacgacgaattcttcccgcctgagggtgcaaagccggcccacaagcccgcccccaaaaagcagcagaaccagcctaaggtgacggtcatctacgaggatgagaacattgccgtcctctacaagcccacccacctgctctgccacagcgaccgcaccggcgacgcaaaccttgtggacgccttcacccagtatctggcccagaagggcgagtacgacccccagggcgagaaccgcttcaagcccggcatctgcaaccgcctcgaccgcggcactgagggtctcgtcatcgcggccaagagctacgccgccctccgggacatgaacgagatcatccgcaccgacctgctcaagaaggaatactacaccatcacggtgggcatcccccagagcgggcgcttcactgcatggtgggagcacgacgagaagaacaataaggtgagcatccacgcccaccagtcccaggacgagcgccgcaagcagatcatcaccgatgtggacgtgctgcggacggctggtcccttcgccctctgccgcatcggcctcatcaccggccgcactcaccagatacgcgcccatctggcctatctgggcaagccggtgctgggcgacatcaagtacggcaaccgcaagatgaatgagcgcaccggcacccggacgcaggccctctgcgccgtccgcatcagcttcctcgacattcccgaggaaaataccctccactacctctccggcaaggtcatcaannnnnnnnnnnnnnnnnnnnnnnnnnnnnnnnnnnnnnnnnnnnnnnnnnnnnnnnnnnnnnnnnnnnnnnnnnnnnnnnnnnnnnnnnnnnnnnnnnnnagcaccatgcacaagccccgcatcatctttttcgacatcgacggcaccctcatcgacatggagaaaaagcgtattactgagcggacactggacgctctgcgccgcttacagcaaaacggcatcctgctggccatcgccaccgggcgttcccctctcattgtgccgaaattcgacggcgtagagttcgacgtctttcttacctacaacggctcattctgctacaacatgaccggcgatattttcgtcagccccatcccgccgcaggatgtgcagacgctgatccaaaacgccgcagcgcttggtcgtccggtgtcggttgcaggacggacgcagctgctctccaacggaacggatgacgatttgacggcatattacgccatcggcggacgagcgccggtcatttccgataagttcgatgaagtctcccgaggtgaagttttccagctgctgatgggctgccgcgaaagcgactggcccgccattctcaaaggcacgagcggtgccaaaatcgccgcctggtgggacagggcggtggacatcatccccatctccggcggaaaaggatccggtatccagaaagttctggcctattacggcctgacgcccgaggatgcaatggctttcggtgacggcaacaacgatatagaaatgtttcaggctgtcggtcacagcgttgccatgggcaacgcttctgccgatttgaaagccatcgccagcgaggtctgcggcacctgtgcagaggatggtatttaccactactgcaaagaaaatggtttgatttaagaaaacaaaaagaggccgctgtgtccaacctctccgtcacggcttcgccgtgccacctcccctatcgaggggaggctttggcatggcagaaagcccaatctcttcgccagaggctcccctcggtaggggagctatcgaacgaagtgagactgagaggttgcttttacagcgacctcttattttttgctatttacttttcttctcgttccgccttttcggcctcctgctgtcggcgcagtttcttgatgcgctttttctcgctctcgacgcggggccagggccacgagaagccctcgttctccttgcaccagcgggtcagcgggtagaacgcaaacgccagcccgaacaggtacagcaggacgtacagcagacccgaaagcgttaccagcgcgtccagcgcaccaatgagcgccatgatgaagccagctttcaggaaaaacaggccgttctggcggcagtactcggggaaattttcggccttgacggcctgacggccctggtcgccccagacccgtggatttttcatgaccgaatagccgtaaaagaccagcatcaggccacaggtgagttggaatccaaaaaacatctgcgtcgttcctcgctttattctggtgtgatggagtcagaagcgcgctcagtcgtcgttgtactcgcccagcagcggcttcatgaagggcaggaagtccagcgttgcaaagtagtcgcggggagtctcggcacggcggatgaggcggtgagagccgtcctcgcagagcaggacctcggcgctgcgcagcttgccgttgtagttgtagcccatggcagagccgtgcgcaccggtgtcgtggatatacacgatgtcgccgatgtcgattttgggcagcatacggtcgatggcaaacttgtcgttgttctcgcacagaccgccgaccacatcgtacttgtggtcgtggggtgcgtcttccttgcccagcacggtgatgtggtggtaagcgccgtacatggcggggcgcatcaggttggccgcgcaggcatccagaccgatgtattccttatagatgtgcttctcgtggatggcagtagctaccagagcgccgtaggggccggtggtgaagcggcccatctcggtgaagatggagacatcgcccatgccggcggggaccagaatttcttcaaacttcttgcgaacgccctcgccgatggccatgatgtcgttttcagtctgctcggggcggtacgggatgccgacaccgccggacaggttgatgtaggcgatatgcacgccggtagccttctggacgcggacagccagctggaagaggatgcctgccagctcaggataataggcgtcagagatggtattggaggcgaggaaggcgtggatgccaaagtttttggcaccctttgcagccagcttcttgtagctgtcgatcatctgctcctcggtcatgccgtacttggcgtcgccaggcttgtccatgacctggaagccctctttgctctcgcccagctggaaggtgccgcccggattgtagcggcagaagatgttctccggcacaccggccacgcggtcgaggaagtccaccatcgtggcgtcatcgaggttgatataagcgcccagctcgtaagccttcttcatgtcctccacaggggtctggttggaggagaacatgatgtcgctgccgctgaagccgcacacttcgctgagcatcagctcggtcagagaggagcagtccacgccgcagccctcttccttcaggatctggaggatgacggggttcggcagagccttgaccgcaaaatactcgcggaagcccttgttccagctgaatgccttgttgatgcggcgggcgttctcgcggatgcccttctcgtcatagacgtggaagggggtgggtacgtcctgaatgatgtcctgagccatcgactcagtcaaaaacggtttcttttccatgattgtacatccctctcatatatttttacacagcaaaggtgccgtgcagccagcgattttacagctttaggttctcgcgggtgggggtaaaggtaggcaccattttggccaactgctccaccacactgtcgtcgttgtgctcggcggcgacggccagctcctggagctgctggtagaactcgcccaggtcgatgttccggggcggagccacgaagatcttattgtggacggtgcggcgcatcttgtcctgctcctcgtccatcatcagctcttcgtagagtttttcgccggggcgcagacccacgatcttaatatccatgttcacgcccggctcatagccgtagaagcggatgagctgttttgcaaggtccatgatcttgaccggctcgcccatgtccagcacatagatgctgccgctctcggccagcgcaccggcctgcagcaccagctgtgccgcctccgggatggtcataaagtagcgctcgatgttggcatcggtgagggtgacggggccgccctttttgatctgcgcctcaaacagcgggatgacgctgccgtggctgcccagcacattgccgaagcggacggcgacgcacttcatgtcggtgttgcctgcgaaggtctggatgagcatctcacacaagcgcttggtgcagcccatgacgctggtggggttgacggccttatcggtggagagctgcaccagccgctccacgccgtgttcactggcactggtgagcagattcttggtgccaaagacattgttcttgacggcctcggcggggctgatctccatcagcgggacatgcttgtgggcggcagcatggaacaccaccgtcgggtggtacgtctcaaatacctcgtccagacgggccttgtcccggatggagccgaccagcaccgtgaccggcacatcacggccatacttctgctgcagttccatcagcagttcataggcacagttctcataaatatcgaagataagcagttttgcaggtttgaagcgcatgacctgacggcagagctcactgccgatgctgccgccgccgcccgtcaccagaacggtcttgccggtgaggtagccggaaattttctccgtgtccagtgtgacttcctcacgggagaggaaatcggcggtgttcagctcacggaacgcaccctgctgaggtgtgcctgcacccaccagctgggggtcgctgagcatctgcacggcgcagtgggtggagacgcagaggtcgatgacgtggttcaggcggtttcccttcagggtcgggatcgccacgatgatggtatggatgttgtagcgggtacacaggtcaggaatttcttccagtgtgccgcgcaccgggacaccgtggatggtctggcccagcttgttggggtcatcatccacggctacgatgacatggccgtagctggtgttggtcttgcagacattgatggcccacgcaccggcctcgcccgcacccacgatcatgacggggcggttggggtccttgctggtgttgccgcgcagacgctcgcccagcgggtggttcaggaagagccgccatgccagacggctcccgccgatgaacaggaaaatgagcaccgccgccatggcgttggccgagttgaagagcacaccgtggatgaagcagcggttgaccagatagacgatgcccgtcgggacggcgatcatcccggccagacggatgaggtcacgctccccggcgtacttccaaaggatggtgtagagccgcccggccagaaagctgagcaggtagactgccacgatccagggcagattcgcgtagagcagggcgcggttgtggggccaccaggaggcctcgacagcgccgtctgcgcgcagcagcagggcgaaataaaagctgaaggctacgatggctccgtccagcaccaccagcagagcccggcgggccagtacctgcagcagatttgttttcttttccttcacagaatatcctctttttcatcggggccggcatccgaagatgtcagcttccgtttttcatttcaagggcctatcaccccataatatctttagtattatactcgattctcttccccgtgtccagttatttcactttttggacatttttcttatgccgcctctcccctgccgccacggcccgcagctcttcgccgaggcccagcggccacgccgccgcaaagcagaccgctgccatccccgcgccgcccagcgctaccgccgccagctgcaaggggactccgccggtgagccagtccgctaaaagatgccgcagggccagcccggccccggcgctgacggctcccgcaaagcccggtgcgcccagccaccgccagagttgcagccgcaggccgcagctggacagcagccgccccgtgttggcggtgcaggtgtagaagctggacagcaagatcacaaaaagaaagcccttcatcccgaagcggggcagcaggagcagcacgcccacaatgcggaggcaggagtcccacatgctgtagcggaaaacggctttctgttctcctacccccttcatggcaccgtccaccatgctctcgagatacatcagcggcatggccgggccgaggatgacgaggtagctgcccgcctcggcactgccgtagagggcttcggccagcggctgaccccacacccagaacgccgctcctgccagcgccgagaaatagccggtgagccggagcatcctgtcgatgagagccgccagccgcccgttctggccccggaggtgggcctgggtgatttcgggcatcagcaggacggaaaggcttcccagcagtccgaagggaaaggtcagcagaggcagggccatccccttgaggctgccgtactgggccacggcttcggcacgcccgccggaaaattgcagatagactgccagacaggccggcaccagcatattctccgcggtgtggagagcactggcgagacaacgtcctccctccaccggccagagaatgtcccagaggcgctttcccggctcctgcgggcggcaggcaggccgcgcaccgaagcagcggcgggcctctttacggtaaaaaagtgccatcagcccagtgctgacggcctcgctgaccgccgttgcgcccagcactgccgtgcagcgcccgcccacgtcccagccgaggacgtcggcccgctccagcgcagcccatacgatgccgatgcggacggtctgctcggccagctggctcaggacgtttggctccacctgccgccgggcgatgaaaaagccccgcagtaccgacgacaccgccatccacggcaggcccagcgacgagacacgcagcgcccccgctgcccggacatcgcccagccaccattttgcggcgaggcccgccagcccgaactgcgccgccagcgccagcacgcccagcccggcccccgccagcaggagacagtgaagcatccc

SEQ ID NO: 434 - DNA, 7967 bp, unidentified
  source 1..7967: mol_type = unassigned DNA
  misc_difference 5095: note = a, c, g, or t
  misc_difference 5096: note = a, c, g, or t
  misc_difference 5097: note = a, c, g, or t
  misc_difference 5098: note = a, c, g, or t
  misc_difference 5099: note = a, c, g, or t
  misc_difference 5100: note = a, c, g, or t
  misc_difference 5101: note = a, c, g, or t
  misc_difference 5102: note = a, c, g, or t
  misc_difference 5103: note = a, c, g, or t
  misc_difference 5104: note = a, c, g, or t
  misc_difference 5105: note = a, c, g, or t
  misc_difference 5106: note = a, c, g, or t
  misc_difference 5107: note = a, c, g, or t
  misc_difference 5108: note = a, c, g, or t
  misc_difference 5109: note = a, c, g, or t
  misc_difference 5110: note = a, c, g, or t
  misc_difference 5111: note = a, c, g, or t
  misc_difference 5112: note = a, c, g, or t
  misc_difference 5113: note = a, c, g, or t
  misc_difference 5114: note = a, c, g, or t
  misc_difference 5115: note = a, c, g, or t
  misc_difference 5116: note = a, c, g, or t
  misc_difference 5117: note = a, c, g, or t
  misc_difference 5118: note = a, c, g, or t
  misc_difference 5119: note = a, c, g, or t
  misc_difference 5120: note = a, c, g, or t
  misc_difference 5121: note = a, c, g, or t
  misc_difference 5122: note = a, c, g, or t
  misc_difference 5123: note = a, c, g, or t
  misc_difference 5124: note = a, c, g, or t
  misc_difference 5125: note = a, c, g, or t
  misc_difference 5126: note = a, c, g, or t
  misc_difference 5127: note = a, c, g, or t
  misc_difference 5128: note = a, c, g, or t
  misc_difference 5129: note = a, c, g, or t
  misc_difference 5130: note = a, c, g, or t
  misc_difference 5131: note = a, c, g, or t
  misc_difference 5132: note = a, c, g, or t
  misc_difference 5133: note = a, c, g, or t
  misc_difference 5134: note = a, c, g, or t
  misc_difference 5135: note = a, c, g, or t
  misc_difference 5136: note = a, c, g, or t
  misc_difference 5137: note = a, c, g, or t
  misc_difference 5138: note = a, c, g, or t
  misc_difference 5139: note = a, c, g, or t
  misc_difference 5140: note = a, c, g, or t
  misc_difference 5141: note = a, c, g, or t
  misc_difference 5142: note = a, c, g, or t
  misc_difference 5143: note = a, c, g, or t
  misc_difference 5144: note = a, c, g, or t
  misc_difference 5145: note = a, c, g, or t
  misc_difference 5146: note = a, c, g, or t
  misc_difference 5147: note = a, c, g, or t
  misc_difference 5148: note = a, c, g, or t
  misc_difference 5149: note = a, c, g, or t
  misc_difference 5150: note = a, c, g, or t
  misc_difference 5151: note = a, c, g, or t
  misc_difference 5152: note = a, c, g, or t
  misc_difference 5153: note = a, c, g, or t
  misc_difference 5154: note = a, c, g, or t
  misc_difference 5155: note = a, c, g, or t
  misc_difference 5156: note = a, c, g, or t
  misc_difference 5157: note = a, c, g, or t
  misc_difference 5158: note = a, c, g, or t
  misc_difference 5159: note = a, c, g, or t
  misc_difference 5160: note = a, c, g, or t
  misc_difference 5161: note = a, c, g, or t
  misc_difference 5162: note = a, c, g, or t
  misc_difference 5163: note = a, c, g, or t
  misc_difference 5164: note = a, c, g, or t
  misc_difference 5165: note = a, c, g, or t
  misc_difference 5166: note = a, c, g, or t
  misc_difference 5167: note = a, c, g, or t
  misc_difference 5168: note = a, c, g, or t
  misc_difference 5169: note = a, c, g, or t
  misc_difference 5170: note = a, c, g, or t
  misc_difference 5171: note = a, c, g, or t
  misc_difference 5172: note = a, c, g, or t
  misc_difference 5173: note = a, c, g, or t
  misc_difference 5174: note = a, c, g, or t
  misc_difference 5175: note = a, c, g, or t
  misc_difference 5176: note = a, c, g, or t
  misc_difference 5177: note = a, c, g, or t
  misc_difference 5178: note = a, c, g, or t
  misc_difference 5179: note = a, c, g, or t
  misc_difference 5180: note = a, c, g, or t
  misc_difference 5181: note = a, c, g, or t
  misc_difference 5182: note = a, c, g, or t
  misc_difference 5183: note = a, c, g, or t
  misc_difference 5184: note = a, c, g, or t
  misc_difference 5185: note = a, c, g, or t
  misc_difference 5186: note = a, c, g, or t
  misc_difference 5187: note = a, c, g, or t
  misc_difference 5188: note = a, c, g, or t
  misc_difference 5189: note = a, c, g, or t
  misc_difference 5190: note = a, c, g, or t
  misc_difference 5191: note = a, c, g, or t
  misc_difference 5192: note = a, c, g, or t
  misc_difference 5193: note = a, c, g, or t
  misc_difference 5194: note = a, c, g, or t
ttatttaccctcgtatgctgcctgaatctcttttttgaactcttcctcgcccactctctgaagagtaagtctgaaacgctcaccaccgtttgcatgcttctcgaagaaactaattgctgcatctgtcactctgaaaagagtttccttgtcgcggataatcggaactagctgctctcctttatagatgtggtttccgaaaagtcctccaaacgatacgatatatcccggagttcccttccatgcatctgtcggacagctctttacgcagcgcgcacagttgttacatttgtctctgtcgatgacaatcctgccatcctccatgctaagtgcaccctcgcggcatgccttcacacatacaccacactggatacaatcgtcatggctgcactctactgtcatgcctcccttgattccgacatcgttttcctcagcctttaagcagttgttctgacagcctgtgacaccaaacttgaacttgtgaggaagctctcttccgaagtacctttcatcaagttccttagccagagtgtatgtatcgatacatccgctaggacagatttctgagccctgacacgctgtgacagtacgtactcttggtccgcagacacctgttcctacaccgccctttgccagttcctcttttaccacattgatatcctcaaccttgataaaaggaatctcaataccctgacgcgatgtcatatgaacatatccgtgtccgtatttctcagcaacctctgctactgttttgatattttctgctgtaagatttcctcctacaaccgcaattctaagcgagaaacagcccttttgcttctgtctcatgaaaccgcccttttttagggccgcgtaatcaactttctccgccatttttaatctccttactgtgtaaatatgttaatgttttgttttatatgtaaatgcatatgcacgctctcatttgcatacacattgataccttattattatggcttaatcagctatatttgcaaaagcctgtgcaaaatcctccttgaggtcatctatatcctcgatacccacactgactcttataagatcctcaaatactcctgcatcctccttctgcttatctgtgctgtgaagactgattgtggagcccggatgaatgacaagtgtctttgtatctccgatattgctgagtgtgtatggaatcgtcaggctgtctataaatttaaatgccttttccttgctgccaaccctgattgtaaggattgctccatagccgtttgtgagctgtttttttgctatttcatgccatttgctgctacaaagccccggataattaacctttatgtcaggataattgttttctatccacgacgcaagcccgagtgcattagagcattctctttccattctaagaccgagtgtctcaagtcctataatatttaagtatgcattcaccggagctaaacaggcacccatatttctgaaaagactgtttctcagctttgcgacaaatgccataggtccatacttcacataatctgcaaaccccgggtatctgttcttgtcccatttgaacttacctgagtctgtcagaataccactgattgcattgctgcttccattgatatatttggaagatgaattgaccacgatatcagctccatgctttaaaacctgtatcaggtaagctgtcgatgtggtattgtcaactacaagcggtatatcatgtgcgtgtgctatctctgcaagcttctcaatatctgtgacatccagacagggattaccgatagtctctgcaaaaatcagtctggtatgctcattgatgctgtcctctatctgctgccagttgttgttctcgacatatctggttgtgatgccgaaggcctcaagatcatggaacaaatctattgtgccaccgtagaggctggcgcttgagatgagctcatctccactgcttagtatatttaagaaggtattcatcagtgccgccatgcctgatgcgcatgccaccgatgctattcctccctcgagctttgttattctgttctcaaaagctgtaatcgtaggattggcaactcttgtgtaacagtagcccggagctttgttttcaaatattttttccagatctgccgcgctctcctgctcgaaggcgcttgtctgatataccggtggcagtgtagagccatttgtctcttttgtcacgccggcatgaagtaagcttgtattaaatctcattgttttcttcttctcgttaattcttacatagtctattgtgttactaggaattgatgagattattatacaaacgtgtgtgttgaaagtcaatgctatcagttatacaaattatttgtgcgtggttatatattttgtttatagccattaatgtcccttaaatactctgcggctgtcgttgcggcatttgctccgtcagatactgcggttaccacctgacgcagtgtcttggtacggacatctcccgccacatacagtcccggctggacgcttctatcatggtcaccattttttgttgcagcatatgtgatgccgtcctcacctgccactacatatcctctctcatcgagctgcaccagattctttataagctctgactgcggtactgagccatatgccacgaatactccgtctacagtcagtgtcctgccacttttaagctttatgcctgttggctttttttctccatatatttctgtcactgtttcgtttaggacaagctctacattttctttctgctttaagagttcaactgtgctctgtgcgccgcggaagctgtctcttctgtgaaccagatagaccttctcacatatatcggacagatataatgcatcatccaaagcggtatctccgccgcccagcactgcggctgtctttcctttatagaatgctccgtcacagattgcgcagtaagatactcccttaccggtatactcatcctctcccggcactcctgcctttctcggatatgctcctgcggtatagatgagcgctcttgcctctgctatcgtgtcatcatcgaatttcactctgtatatcactgattcttctttctcaccattttgcactgcttctatctgcactgcttctttttcgataaattctacatcaagagacactgcatgatccctgaatttttctcccaggtcgtatccgtttatatttggaagccccagatagttgttcacatttccgctctcggctatctggcctgtcccctcgtattctttttctgctactgccacattcagattggctctctttgcatatattgctgcagacagtcctgccggaccactgcctattattattatatcaaacatggaattggtacctttcatcgtccattgaattttttcggtaacttattatatacattatccttaaaaaatacaataataccgcctgcttttataaaacacctttataaaaacaagcggtatcaattttatctatcgtatatacatcctggcctcataaggtctgagcactgacatatcagaggtatccttataatttgaaatcagcacctccatgccctcacactcctttgcaagcggcattggtatctccttgtcaaagaaattgcacacaacaatcatagttttttcttcattctttctgctgtatgcaaaaatattctcatcatcctcaagtaaaagtgtgaatttaccatcaacaaataccggataatcctttctcagctgaacaagcttcttgtagcagctaaagattgaatcagggtcatccacctgtgatttggcatttattttgtcgtaattgtcatttacctttatccaaggtgttcctgtggtgaagccggcatttgccgagtcatcccactgcataggtgtccttgcattgtcacggccctttgcgtaaatggacttcatgatttcatcctttgagtatcctttttcaaggcgctcatggtacatgtttatgatttcacagtccttataatcctcgatatcatactgtacatttgtcatgcccagctcctcgccctgatagatgtatggtgtaccctgcatgccgtgcagcaatatagcaagcatctttgcagattccactctgtactccctgtcattgccccatcttgacacgatacgcggcaggtcatgattgtcccagaacagactgttccagccacagttgtagagctcattctgccagtgagccattatctttttgagctttttaaacggaagcggtgcaaggtcccatttctcgccgccctccttctggtcaagccctatgtgctcaaactggaacaccatagaaaactcgctgccatccggattgctgtaaagctttgcgcgctctgtgtctgcgccccatgcctcacccacggtaatcaagtcgcccttttggaaggtctccctgctcagttccttaaaatattcctgaagccttggtccgtttatggtgattctcttgtccggctcttttgctatctggtcgattacatcaagtctgaagccgccgactcccttgtccatccaccagagaatcatatcgtagattgctcttctgacctttggattctcccagtttaaatccggctgctccggtaaaaactgatggaaataatactgtccgatttccggcacatattcccatgcgcttccaccgaaacaagccttcatatcacttggcggcacgccttcatctccgtctctccaaatatagtagtcatggtatggattgtccttgctctttttagcctccttgaaccacctgtgctcgtttgaagaatgatttaagacaagatccatcataatccttatattgtgcttctttgcctcgtttatgagctcctccatatcatcgagactgccaaacgtcggatcaatatccttgtaatccgaaatgtcataaccgttgtccgcctgcggtgatttgaataccggtgaaagccatattgcattgattccaagcgtctcaagataatcaagtcttttgatgataccctgtaaatcaccaaagccgtctccgttagaatcctgaaagctctttggataaatctggtaaactaccgcctttttccaccatttttcgttattgtttttgctcattatgccctccttgtctcttcattatctcttttagnnnnnnnnnnnnnnnnnnnnnnnnnnnnnnnnnnnnnnnnnnnnnnnnnnnnnnnnnnnnnnnnnnnnnnnnnnnnnnnnnnnnnnnnnnnnnnnnnnnnctgtatcaaattatgctattttacaagcaccaccaaaacctcacagctttcaagcttaagctcggatgctcccactgaaacagtgctcttttcagcatcatttgtgttggacaaaagcacctttttcacactgccatcaagcctgatttgtgcctctttactgccaaaatttgccacaaccagcacgcgcttattttcatcctctctgtaataagccatgatgccatctgtatcctcatatgccggaacacatctgccgtaggtgaacagctccttaaattcatctgactttctgagtgccacaagccttctgtaatagttcaaaacagatgaaggatccttttcctgcgccgcaacattgatagccttatagttttcattaaccttaagccatggctttgctgtggtaaaaccggcatttgcctcatcactccactgcataggtgtccttgcattatccctgctcatccttccacaggctgcaagtgcctgctccttggataagcctgctgcaagtgctgccttgtactgatcctttgtgctgatatcgtcatactcatctatactgttccattttgcattttgcataccgatttcctgtccctggtatataaacggaatgcctcgaagcagtacgctgacagttcctaacatctttattccggcaggattttgagcatgctttggtaaaaatcttgaggcacctctcggctcatcatgattttctatgatattggccttaaagccgtacttttctgtctcaagctgtgaaccaagaatggcctttctccatgtgtcaaaatctatttccggtgcatcataccagccatgctctccatcacttaagcactgtgcacaaaaatcaaatatcgttgaaaaatgcccattctcaccgataaactccggcagctcctcaggcttcatattgaatacctcgccaaccgtaaatgcatcatacttcttaaatgtattgttctttaattcctctaagagctctccgacaccttctgcactttcaaccatcttgtagcaggcagccagtccgtcctctgcatccggctcaaaatcagggaaatcaagatttttctttatattgattatcgcatctattctaaatcctgacaagcccttatcaagccaccagttaatcatctcataaagcttttgtcttagcttttcattctcccagtttaaatccggctgctccttcgcaaacatgtgcagataatacttgtccgtgcccggcaccttctcccagcagcttccgccaaaataagagcggtaattgctcggcggattgccgtttttaccttttctgaaataaaagtaatcagcatactctccatccggatccttaagtgccttttgaaaccattcgtgcttatccgagcagtgatttattaccagatccatgatgatgtgcatatcacgcttctttgcctcggcaaggagctcatcaaactcctccatagtaccgaactcttcagctatcgcatagtaatcagatatgtcatagccctgatccacaaatggcgatttatatatcggagacagccatatgatgtcaattccaagcgattttaaataatccagctttgaaatgatacctcttaaatctcctattccgtcaccgtttgtatccagaaagctctttggataaatctgatatgccaccttgtcatgccaccattttctctccataatgtgtacctcttatctaatcataaattttgcactcatttacatcttgagcactttgtcttgatgtattatactgctattatagaaagtggttagtataaattcttgcaatattttttcattttataacacaatactgctcttataattttaaagagtatagttttaaaagctatggagaaacaacaatatgaaaaacaataatcagcctgccctcgggcagaaagaaaacgcaaagcacggagaagtatttttccccgttcagaaatatataacaagacttgcagcagattaccctgtcatcactacacactggcacgatgaggcagagctcacactgattacaaagggctcatgcacctatcagattgatttgctcgaatatgaagcaaaggaaggcgatatcatctttatcccgccactgctgctgcattccatttcaataagggactgcgacgaattttactcggaaacgtatgtattccatatcaattttttaggtggaaacaataccgatatatgctcttcaagatatctgactccgctaatcaaccatgagtttgccatgccttacctgattgcaccgaagcatccggcatattcatccctttgcaaatgcttcatgcgcataacaaatctatactcccgtcaggaattcggctatgagctggctctaaaggcatttctgcttcaggcaatatttctattgctgcaatacagtgaaaaaaatgctgattttggtgtcaacacatcctccgataagctcaaaaatgtgctcgattacatcgaggtgcactatgccgaaagcatccaggtttcagagcttgccgggctttgctatttcagtgaataccacttcatgcgtttcttcaaaaaacacatgaacatgacctgcgtgcagtatatcaacaatgtgcgtcttgaaaaatccgtggaacagttcgagcgcggcaacacctcaattttagatgtctcactgtctgtcggatttcacaatctgagctattttcacagggcatttaaaaagaggtatcatatgacacctctttcctttatcaaaagccttgaataa

SEQ ID NO: 435 - DNA, 7012 bp, unidentified
  source 1..7012: mol_type = unassigned DNA
ttagaaaatccggcggacaccaagcggtgtacgataattcacatccgaaatcttaataccggtcttggcagtggatgcatgaacaatctgtccattaccaatgtagattgccacatgtccggagtaacagatgatgtcacccggctgtgcattcgcaagtccgtctaccgctgttcccacgcttcggtcaccggatgaagaatgcggcaggcttacaccgaagttcgcataaacactcataacaaatccggagcagtccgcaccattcgtaagacttgttccaccatatacatacggattaccgacaaactggcaggcatagcttgcaacggactgtccaagtgcgctttcacctgttgcatatacaaccggaacttcactggtagtagcagagctttcactctttgctgccttacggttcttctcctctgctttccgtgcagcctctaaagctgccttacgttctgcttcttccttcgcaagacgggcttcctcttcttccctggattctgcttttacaaattcagtagacaaggtaacatagtcgagggatacatagccatcaccttcctcgatattaaccttaacccagttgtctaattcttctgtaacaaggagctgatcctgaattggaacaagaccaagtacggttgcatctaacgaaggctcttcacgaacctttaaggtagtagtcgtaacggttgcaatccggttacctaccttcttcgcaagggcaacggcatcatcaccggtaacacaatattccgccttgacataaccggttaccgagccggatgtgatcttataccagccgttgtcttcttcaataaattctccaacggacttatcataaagcttaccgaggatctccccttcttcgcttggaatgctccgtacattcacatagtcattcacctgtgcgatcacaagagacttaaatccttcttcttctttcttattcgcaatttcccgttccttttcgttaacggtctttgttgtggttgcttcagcagtttcctttacttccttccgggaagttttcggaacactgttattgctgacggtatcgtccttttcatcctgtatgttcttaacgcttgttccttcggatgccagataaaaatccactccggcagaaggaagacctttagattctttcgcttgtgtatctatcgtcatgccgtttaacagaagcatggatgcaaagccaaatgccataaagcgtaccggcatttttctctttctctgttgcatgatatcctccaaaattttcataaacccggttataattgttacaaaattattacgttcgttaacaaatataacacttttcctcttccatgtcaaatgccggaaaaatgttccagcacttactatgccgggaaaatactccagtatttacttatgattacttatgattgaggaaagcttctacagaggtaatggcattggctccatcggcaacggctgtcacaatctggcggagctttttcgtccggatatcacctgcggcaaaaattcccggcttcttcgtcatgccgtcttctcctgcaatgagatatcccttttcatcgcagacatccattcccagaagcagccggcttaccggcacaatgcctacggcaataaatacgccgtccaccggaagctcctgtgtttcttccgttttcacattttttaacgcaagcgcctccacctgatcttcgcctttgatttccgttgctaccgtatcccacaggatttccacattgggaagtgcctgtaatgcctcctgtaaggacttcgcagcacgaagatggtctcttctgtgaacaagatagaccttcgcacagtttcttgcaagaaaaatggcatcctcgactgccacatcaccgccgccgacaaccgccaccgtacggtttctgaaaaaagcgccatcgcaggttgcgcaataggatacacccattccggcaagctcttcttctcccggaatattcagcttcgcatgctctgctcccattgctgccacaatggttttcgtttttaattcgcccttggaggtcgtaacaagatatccatctccattctcttccacgcggagcacctctgcctcctgaaattcacaggaaagcccgtccgcatgctcccggaagcgcattcccaaatcaaatccgttgattcccggaaaacccggataattatccacctcataggttgttaagacctgtccgccgctcatggcgctctgttctaccgtaacagcactaaggcccgctctttttgcataaatcgaagcggagagtcccgcaggaccggctccgataattactacatcgtacatgtttttcccttccttactaaatccagccgccatccatcgtgatcacctgaccggtcagataagccggtgaatgaagcacctgtgaaatcatttctgccgcttctgcacaggttcccatccggtcagccgggatctcttccttcaatgcgcgacgctcttcttctgaaaagcattggttcatctgcgtatcaatcacaccaaacgccactgcattgacctgaatattgctcggtgccagctccttggcaagtgctctcgtaaaactgttgattccacctttggaagcactatatgcgacctccatggatgcaccgacatttccccacaccgaagaaacaaaaagaagctttccttccttgcggtgtaccatctgcgggatcagctcatggcttaaataaaagcaggaattaaggttcgtatcaatcacacgccaccactcctccagggtcatatcactcaaaagtccgatatgggaaattccggcattatgaatgagcacgtcaatctgccctgcctgctgcagcatggaggttacctgccgcggatccgaaatatcacaggcgtaagtctcacaggaaataccggattctgctttcagttctccggcaagaagccggagcttttctatggaatttttacacaccagacaaagatcatagccttcaaaagcaagacgccttgccactgcctctccgattcctctggatgcccctgtaatcaacgctcgtttcttcattcttccctcccgggactgcctttttacttccgcatattgccgctattcacaatccccttcgtaaaaccggcttatctttatcgttttaactgtgggaatacatcaatttcttctatataattaacccatcccaggtgatatgccgtaaccggtgaaagctcattctgaatctcactgttgttcagacgtcccttttcatcctttaccgtgtacataatctcatccggataggcctttttcacgtattcacagacctcttcggtatactccgcatcctcgtacaggtcatgcgccccgaaaagatgcaggatttcatgtgcataaactgccggaacttcccctgcaaacatcacaaggctttcctgcggattatccacaccatcataacagattgcataggtgcttcccttatgattgacaaaaacaatcgttgcaattccttttgccttatattccttagtgagtgcctcataatcaatctgatcttcgagccatccggcaatttcttcatccagtgcttcttcgtaatcttctccatcctttagggaaaagttgatccgtgcacttcctgtcagatcttcatattcttcaaaatcaaccacgagatcgactttcttatggtagcttttcgcctcggtttcaatgtattctttggcaatttcaagattctttaatgccttcttcttatcccggtctgtccattctgcatccggtgtatccacaaagagactgtaaattaaattcctcccctcaaggctccttgcacttccaagcttatagctgcttctcggatttccaggctctcccggctccggtgtcgccgatagctcctcacttacagctgctgcctgtggctgcttgccactatctgtactgctctttccatcggccagtaacggcattccaaagactgctcctgcggtaagaaccacacctaatcgaagcgctgcaattctgattcctgacataaatgttctccctaaaaaaaatgatcccttcgatcataacaaaatgccgtccggaatgcaactgataaaaaccatcggtcagctccgtgcaagctccggatcagctttgacgatttaaattttctattgtttttgtcagcgtgctcagattatttttaatcttctcactggcatccgccatatccctggcaagtctttgaacctctgttgccacaacagcaaaccccttcccctgatctcctgctcttgctgcttcaatagatgcattcaatgccaggatctgctggcgtttactataaccctcaatctgctgcgtctgctcatttgcttctacaatctgccgtgctgcagtcgctattccgtccttcagtccgaagatcatattattattctctttacctgtatagctggcacggacaaacatattaatcacatcaccaagcaggcttgccgatgcctcaatctgctctcttgttttcacgcttacctttccaagcgcgctgatatatttttcctcatcaattcccagctcctgtgctgttttacgaaacttcatttcatccggatgttccggaagcacctgaccgccgatcacactgccaagcactgtaccgtcctcaagtgtaatcggaataccgaagtctaccagccctgcatggcaggcatataccccctgcccctcacggtcacatttctcacaccgccttttgccttccgcacttcctcttgtcaatttaatacaaaattccgtaaaattatagcaatcactgatgtattctccatctgctccaaccgccacggttgcaagccctgtactctccgcccagtttttcatgatctgttcaaatttatccatatcacaaaatttctgaatcttcataaaacacatcctcctttatatttacaggccggaatgaaaacaatcttctgtatcatccggcctgctgtttatgtttatctgatggtgtgaaattctgtcttccaactcctgtatgaatctgtatcatgcatctgttttacatgatcttacgataaagctcctttaggtcttcaacgcttgtgtctctcggattgccgggacagcaggcatctgcaaaagcatcagcggcaagcacatccagatcttcctcacgaatcctgtcattctttaccgggattccgacatctgcggacagcttcttaaccgcatcgatagcagcttttcgatattcctcctgcgtcatttcatcaacgccttccactcccattgctcttgccacctcgcgcagtctctctccggtatattcctgattgtactccataacaataggaagcatcattgcgcaggcaactccatgaggcgtatcataatgcgcgcccagtgtatgtgcaatggaatgtgcaattccaagtccgacattagagaatcccattccggcaatatactgtgccattgccattccctcccggccttcaggcgtattctccactgcgccccggagattgcgggaaatcagcttaatcgcctctaagtggaacatgtccggaatctcccatgctgccttggtagtatatccttcaatcgcatgtgtgagtgcatccataccggttgctgccgttaatcccttcggcatagaggacatcatttccggatcaatcactgccacctccggaatatcattctcatccacacaaacaaatttacgctccttttcagcatccgtaatcacgtaattaatcgtaacctctgctgccgtaccagctgtggtaggaaccgcaatagtcggtactgcatggttcttagtcggtgccaccccctccagggaacgtacatcctcaaactccggattcgtaataataataccgattgctttcgccgtatccatagaagaaccgccgccaattgcaatgattgaatccgcagcacaggctttaaatgctgctacaccatcctgtacattcttaatggtgggattgggtttgatttcagaatataatgtatacggaatgccttccttctccaaaagctccgtaaccttagccgtaaccccaaactttacaagatccggatccgagcacacaaagatatgtttaaatcccttactctttacaacccccgggatctcgttaattgccccctttccatgataggaaacggtgttcaatacaattctgtttgccataaaaaagccctccttcacgatataaccggtctttccctatcgaaaaacctttacttatttccacaatcaacttgcaaatccgcacttcgtgctctccatcctgctttgcaggatatttgctcgttaatgaaccctgaaaaccaaatgtctgctttgcagccgcttgcttttctttggactaattacattatatcatagattttccattctgtgtccttatattttgacccatatgggtaaaccctgtctaccgtccatcaagccttgcagccagctcggcaacgacctcccggattatttttccttcacaattcaaggtaatatcggcatatctctcatacaacggagtgcgctcctcataaagatcccttaacgtctgtccctcttttaatgccactccacgctcctgcagatccccgagacgctctgcaaccgcctcgcaggaaagctgcagataaaccacactgccgatctccttaagatgttccattgctttcgcactatagaccacgcttccccctgttgcaatcaccgtcctgtcgcagcaaagagacgcattaatctctccttccaccgtaagaaatccctctgtgcccttttcctcaataatttcatgcagcatcttcccggttctttcctgaattaccagatcactatccataaagcgatagccaagctttttggcaatcacaacacctactgtacttttgcctgcacccggcatcccgatcaaaacaatatttttcaacgtatgtctgtcctttctctttctgttttcactttcgaacactatgttcccagtataaaccatgtggcttcccggcac

SEQ ID NO: 436 - DNA, 24361 bp, unidentified
  source 1..24361: mol_type = unassigned DNA
aagcccgcgaggtcgtaatcatcctccggcatcatgccgggatgctccgccgtttcgccgccgatgagcgctgattccgcctgcacgcagccttccgccacgcccgcgacgatggacgcgattttctccggcacattcttgccgcaggcgatataatcaaggaagaacagcggcttcgcgccgcagcaaatgacgtcgttgacgcacatcgccacgcagtcaatgccgatggtatcatgcttgttaagcagcatggcgattttcagcttcgtgccgacgccatccgtgccggaaacgagcaccggctcttccatgcccgccgcgtccagcgcaaacaggccgccgaagccgccgatgccctcgacgcagcccgccgtcatcgtccgcgcgacgtgcttcttcatcagttccaccgacgcgtaaccggcggtaatgtcaacacccgctgccttgtagctttcgctctcgctcttcatcatggttgtctgctcctttgtcgcgttagtcgtcgtcctgcaccttgccgccgtgaatgggctggtcgaatttgtttttctccgtcaccagcggcgggtcaaccgggtatttgccgcagaagcagcccttgcagaatccgcagtggctgtccgccgccagcttgtcgcacgcctccagggacaaaaagccgatggagtccgcgccgatgattttgccgatttcctccaccgaatggtgtgcggcaatcaggttctccttgctgtccacgtccgtgccgaagaagcaggggtcggtgaacggcggggcggacaggcgtacatgcacctccgtcgcgcccgcttcgcgcagaaggcggacgatgcgcgcgcaggttgtgccgcgaacgatagaatcatccaccatgacgacgcgcttgcccttgacggtagcggaaatggcgttcagcttgatgcgcacggcatcctgccgctgcttctgccccggctggatgaacgtgcgcccgatgtacttgttcttgatgaagccgatgccgtagggaatcccgctggtgcggctgtacccaatggcggcatccagcccggaatccggcacgccgatgaccacatccgcctgaaccggatggtcaagcgcgaggaagctgcccgcccggatgcgcgcctcgtggacgctgctgccgtcaatgacggaatcgggacgcgcgaaataaatgaactcgaagatgcacatgccgtcgtggcacgcgccgggcatcttataggaatgaatcccctcttcgttgacgacgacgacttcacccgcctcaatatcgcgcacgaacgtcgcgccgatggcatccagcgcgcagctctccgacgcaaacaccacgtcgtcgccgattctgcccatgcacagcgggcggaagccatgcgggtcgcggcaggcaatcagctttgtcggactcatgacgacgagcgaatacgcgcccttgatgacctgcatcgcattcaaaaccgcctgttcaatcgaaccgcacttcaggcgctcctgcgtgataatgtaggcaatcacctcggtgtccgacgtgcagtggaaaatcgcgccgttcttctccagctgttcgcgaagctccgccgcgttggtcagatttccgttgtgtgccagcgccatcgcgcctttttgatggttaatcagcagcggctgggcattggaacggctgtgcatccccgttgtaccatagcggcagtggccgaccgccatcgttccctcgtggattttgctcagcgcgtcgcgcgtgaacacttccgtcaccagtccgttgtccttgtgcgccttcatcacgccatcatcgttgacgacaatgccgcagctctcctgaccgcggtgctgcaaggcatacagcgcatgatacgtctccgcgacgacgctcttgttggcggaatccgcgcggtaaatgccgaacacgccgcactcctcgtgcagcttgtcaaacggcgcttcgtccccctccgcaagatagcaggctgactccagcttgttcatcttcattgctccttcatgctgaccagtgtttgattaccacacaagcgccccggacagtcgattgccatccggggtgcagctattcttattcgcccatcaggcgcttgcggatttcgatgtaagcgtcttccacgttgcccaaatcgcggcggaagcggtctttatccagcttttcgcccgtgcgggtatcccagaagcggcaggtgtccgggctgatttcgtccgccagcaccagctgaccgtcgttcgtgatgccgaactccagcttgaagtcaatcagctcaatgttgacttccttcaaatacgccgtcagcagctcgttgatgcgcagggcgtaggcggcaatctggtcaagcaccggcttggagacccagcccatcgccatgatatggtactcgttgaccatcgggtcgcccagctcatcgtccttgtagcagtattccagcacggtctgcttgagcttcgtgccttcgggcagaccgaggcgcttggacagcgaaccggcggcgatattgcgcacaatgacttccagcggcacgatgtgaaccttcttcaccagcgtctcgcggtcggaaatctcttcaatataatgcgtcgggatgccgttcttctccagcatcttcatcaggaaattcgtcacgcggttgttgatgacgcccttgcccataatcgtgcccttcttgaggccgttgaacgcggtcgcgtcgtccttgtagtccaccagcacgacgttcggatcgtccgtcgcaaaaaccttctttgccttgccttcatagagctgttcgagcttcttcattgctgtttcctcctattatatcatgtttgtctgccgcagcagttgatgcttgcagatttagaatgttcgtgttttgtgttattcaacgatcagcgccgcgtccttggcgatgaccgcgtcatgctgcgccctgcgcatcgccagcagcttttccgccagggcttcgtcctcgaccgccagaatctgcgccgcaagcagcgccgcattcgccgccccgtcgatggcaaccgtcgccacaggcatcccgctgggcatctgcacggtggatagcagtgcatccagcccatcgagcgtcgaggacttaaccggaataccaatcaccggcagcgtcgtctgcgccgcgagcgcccccgcgaggtgcgccgccttccccgccgccgcaatcagcacgccgaagccgttgtcccgcgcggatgccgcaaacgccgccgcttccgcaggtgtccgatgcgccgaataaacgtgcgcctcaaagggaatgctcagctttttcagctgctcaaacgcccctttcagcaccggcaggtcactgtcgctgcccatgatgactgcaactttcttcatgaaagtcgaaacctccttcgccgtcaggcaaacaaaagagcgccgcctgttcagtcccctgaacggtgcgctcctgcaactgcttctccccggaaagaaagagaacccatcataacagcacccttgcacttcgtcatgacgcttcctcccccttcgccgatttcccagactgcacatcccgcgccgtttgggtacgcttcattgtaccgtattcttccgccgctgtcaagtgtttttccgaacattttgtgcaaaattttgttttccgtttggaatttgtgcttttttcgcgcgctgatggccgatttttcccgctgccgcaaaataaaaaggaggaagtgcccgtttgccacggtttcctcctgcgatgatattcgtctcaaaacttaaaggtatctttcagccccagccactgctgatctttctcgctcaaattcagtggcgtgccgtccgccagcgtgcagccgtctgcacttgcgctgccacaatattcgccctgcacatgccagtcgatgccaattgtcgggtcattccacgccaagccgccctcgtcgttcgggtgccagaagtcactaaccttatagcagaattccgcttcgtcgctcaacacaaggaaaccatgcgcaaaaccttccggaatcaggaattgcttcttattttccgctgacagcgtgacaccgtaccatttcccataagtttcggaatcgccgcgcaaatccaccgccacgtcgaacaccgtcccgcgcacgacgcgcaccagcttgcactgcggatactgtttctggaagtgcagcccgcgcagaacgcccttcgttgacatcgactggttgtcttgcacgaagtgaacgtcgatgcccgcctcccgcatgtcgcgctcgttgtacgtctccatgaagtagccgcgcgcatctccatgaaccgctggttcaatcacgcaaagtcccgtaatgccgttcatgttcttttcgactcgaatctgtcccatttggtgctctccttactgcccaatttcccgcagataacggcgcagcgcatcctgccacgtcggcagcggcgtaaacccagcttccaccagcttgctcttgtccagccgactgttgaacggccgcgccgctttgctcagcccgtattcagcggttgtcacgggcacaacttgcgtcgtataccccgcctgccgatagatttccttcgtgaaatcgtaccagctgatgtaaccgccttcgttggtcgcatgatagtatccgtaattgtcggtttcgttcatgtcaatcagcaagcgtgccaagtccagcgtgtacgtcggcgtgccgatttggtcgttaacaacgcggacggtgtcgtgcgttttgccaacgttcagcatcgtcttgatgaagtttttcccattcaagccgaacacccacgcaatgcggacgatgaagtatttctccagcgtccggctgactgccaattcaccctccagtttcgtttgaccgtagacattcagtggcttgtaatccttgcaatccggcttccacggcgcagttccctgcccatcaaacacataatccgtgctgatgtaggtcatcttgcaatttaactttttgcatacatttgcgatgttctgcgtgccgcccgcgttgatggcgcgaaccctttcctgattctccgcgttctccgccaagtcaactgccgtccatgctgcgcagtgaatcactgcgtcgggattgactgccatgatgaccctttccaccgcgtcagcatctgtgatatccagcggtatatacggcgcttttgacaccggcgaattgtctatgataccgctgtaagccgtctgaatgtccgagccgacaccttcatgcccgcgtttgagcagctcattcatcacgtcatgccccagctgtccgccaacgcccgttacgaaaaacttcacgttcatttcctccggttcagcggttgccgtacatcttcgcgtagtaatgctgatactcgccgctgatgatcgtcttccaccattcacggttgttgatataccattgaatcgtctttttgataccgtcctcgaacttcgtttccggcagccagcccaactcattgtggattttcgtcggatcgatggcgtagcgcatatcatgccctttgcggtcgccgacatgcgtgattaaactttcgggtttgcccagctctttgcagatgattttcacaatctcgatattctgcttctcgttgtgcccgccgacgttgtaaacctcgcccacgcggcccttgtgaataatcaggtcaatcgccttgcagtgatcttccacatacagccagtcgcggacgttcaagccttcgccgtagaccggcagcggcttatccgccagcgcgttgacaatcatcagcggaatcagtttttccggaaaatgatacggcccgtagttgttggagcagcgggaaattgacaccggcagaccgtaggtgcggtaatacgattgaaccagaaggtcagcgcctgccttggaactgctgtacggcgaactggcgtgaatcggcgtttcttcggtaaaaaacagatcggggcggtccagtggcaggtcgccatacacctcgtctgtcgaaacctgatggtaacgctggatgccatacttgcggcaggcatccatgagcgtcgccgtaccaataatattggttttcaggaagatttccgggttctcaatcgagcggtcaacatgcgattccgccgcaaaattgacaacaatatcaggatgttcttcctcaaacagcttgtagactgcttcccggtcgcaaatatctgccttcacgaaacggaaattcgggttatccatcatgggcgcaagcgtggacagattgcccgcatacgtcagcttgtcaaggcagataatccgatcgtccgggtacttcttgagcatatggaagatgaagttgctgccaataaaacccgcgccgccggtaataataatcgtcattgtgcttctcctcttagtacaaacgttcctgatatttcccatccatgacatctttcaggtactgcccgtactgattcttcttcatcacttcatagacctccatcagctcctctttgctgatccagccgttgagatacgcaatttcttccagacagccgattttacggtgctgatgctgctctaccgtcttcacgaagttcgtcgcatccaccaggctctcgtgcgtgcccgtatccagccaagtgaatccttgacctaaaagttcaacgttcagcgaaccatcctccagataaatgcggttcaaatccgtaatttccagttcaccgcgggcggacggcttgaggtttttggcgaactcaaccacgcggttgtcgtaaaaatacaagcctgtcacacaatagttgcttttcggatgcgccggcttttcttcaatggaaatcgcctttccggccttgtcaaactcaacaacgccgaagcgttccgggtcatccacatagtagccgaagacggtggcgcccctgccgttttccgcgttccgcaccgccgcatgtaaccgtttgtttagtccatgtccgctgaaaatgttgtcgccaagcaccatcgccacggagtcactgccgatgaaatcctcaccgatgatgaacgcctgcgccagcccgtccggcgacggctgaaccgcgtacgtcaggtgcacgccgaactgccggccatcccccagcagattctcaaagcgcggcgtgtcctgcggcgtggagataatcaggatatcgcgaatgcccgcattcatcagcacagacatcggataataaatcatcggtttatcgtaaaccggcaaaagttgctttgacgttactttcgtcagcgggtaaaggcgcgtgccagagccgcccgcaaggataatccccttcatatagcgtatttcctcccatattttgtggcggcagctatgaaacatgacgttttcccgccactttctaccatcatcgctttaagtatactttcgtttgaatagcttatttttcagctgcttgatttcgggaacgcggaacagcatgcacagcagaaggtagacagccacgccagttgcaattcctgcaacaaggcttacaaatgcgccattcaaaagctgagtaacgcacttgacgcaagccgccatcactgccgaaaacagggtggccgggagaatgtctatcaattgctgcttaaccgtatagtttagaattcttttggctgcgaacatattcagcagatgagaaatcacactgcaaatcagcaaggaagacgcgaaaatcagcacgccttgccgaatcgtaacaatcaggaaaaagacttccacacattttttgatgatttccagctttagcggtgtgccgctgtcgccaatcgccttaatcgcttgaataatcgccagctgtatcgcctgaaagaggtatccaatagcgaaaatctgcaaatacgggacgcattccagccacttgtccgtcaacagcagtgaaaccaacggttcagcgaccgctgccaatccaaccatcataggaaacaacaggagactggatattctcaccgttttggaaaccattttcgcgacactgctaacagaatcctgctttttggaataaacgggaagtaacaccgtctgaatcgtgccattcacactttccataacggcttgcggaaactgcttgccacgattgaaaaatccaagagcttctgatgaataaatctggccaatcagcaagcttcttatgtcaagaaacagggcgacaatgaaattggatgcgaacacttttgcgccaaacggcaaaagtcgccgcaggctctggactgaaaatcttcctttaggaatccaccgaacaatacaatatgtgacaaagcaggtcgcggtttggttcaccaactgctgtatcaccagtgcccatgcgccaaatcctgcgaccgccatgccaattccgacagccgccgccagcaaagcggacacaaagcttgaaatggtcagcactttgaaacgcaaatctcttgttacataggcaacctgcaccgcattaaacgcccccggaaatagaacgattgccataacgcgcaggaggctgcttagctccggtgtatgataaatattactaataaaaggtgcagtgaaaaaaatcacaagatacagcgccgctgcgacaatctcagagaacacgagaatcgtgagataatcattgccatcaacgtctttcttctgaattaacgctgtgttaaatccaccctgaacaaatgtcgttgctaacgcaataaaaattgtcacaactgacactgttccatagtcggacggtgtaagcagtctggcaagcaataacgtaaccagaaagttagttccttgtacggatattctttcaaaaaacttccagccaaatgcggaagttactctcttctccatattaatttcccttcacgacgcgcatcccgtctcagcacttagatttttctactataaatagttgtttttccgtgcgccgtcaacatgtgctgcggagagtctcccccatttcctttcttctgccttccctgcaatggagcgccgcagcaatgagatacagcggaatcgcataaccgcccgtggcagagagcgattccacctgcgcagcgctcagcagagcaatgaaggcagccatcataattctgccttcacgcaccctatgcgggttgattgtgcctttgtttgcatagtaaacaatcagaaggaataaagccagcccaatgatgccgaagcaaagggtgacatacaagtaacgattgtgcggatgtgacacgccatagccgagaatagcttccatctgcgctgcgtccagtcgtccaacccctgttagtaaattctgctggatggctgcaagtgcgttatcccagatgcgcgttctgaacgtcagcgtcacgtccttgtgcagaatgttcaccagaaggaacgaaaacatgtccatcaggcgggcaatgacgattgcccagaacgccgccgcttccgtgagcatcaccgtcgaaatcttgaacggattcctttttttccatgtgcagtagagcagcacgagaccgccgatgctaaagcagaacagccccgtcgccgtccactgcaagatcatcgacagagtcgccgcgacagccacggcaatcgcaaaccgttttgtgaagcgcgaaccaacgtttgcattccaaagcagcgtggttgtcaacgccagcaggtaaatgacgaaccacgctgtccggtaactcaggaagaagttttgcgaatacttcgttgttgcatacatccctgccgggaacaaaatcacggtcaggcagttgatgagcacatatgcgcccgaaacttttgcgacaccttcgatgaaggaatcgtatcccgcgcgcagcccaatatagcacaccagtgcgatgcccaagtcattcatcagcgcgccgaaatccgcaatgctgccgccaccagtaagcgtggagattggctcccagagaatcgacgcaaccaccagcattgttacgccaaatagccgattaaccggaagtaattgcgcgtttttgaacaatacgatgagtgtaaatagcaccagcatgatgcgaatcatgttcagcagcgtgtcaagtattcccagcacggggatgccgctgatgcagccgggcttaatcaggattaaaaaacagaacgaaataaaattcggatttctgaagtacctcatttttccccttctgccttacctttcaggtaaagggctctcagtttttcagcttcctgatggatgtcatagccgtggctttgaatcacctcaagcttgttctcccgctgggtggtatccgccgccagcatcgcatctgcccactgctgcgcggttgcctctcgcggcagataggtgaacagcgattcatcaacgcatgcctcctgcggcacaacctccgctgtcgcaaaagttttcaagcctgcggcttgcgcttcaatatagacaatgcccaatccctcaaagcgcgatggcagcacaaacgcatccatcgcctgcatcaaatccggcacatcggtgcgcagaccgaggaacagcacactatccgtcagccccttcgcctgcaccatgcggcggatttcctcctccaattcgccctgcccgacgaacatcagcaccgcgttcggtcttatttctttaactttcgcgaaaatttccacggtgaactgcggatttttctgatacgtcagccgcccgaccacgcccaccacaaacttgtccgtcagccccatttgcgtccggatgtgtcggcgcgtttccggatgatagacgtatttctctgcctcaatcgcgttttttagcacggtatacggatgcttgccgtacaggtggtcgcctgcatccttggagcacgccaggcggagcgtcgcaaagcgattcagcagcacgcggaacagccgatagtgcggtttggccgaagcgccggtcatatacgccatgtgtgcgtggcaaacgcgcactttcacgccgcacagcttggcaatccacaggtacaaaaacgaccattcttcaaaatgaacatgcaccgcgtcgtagtgtccctgttgaatcacccggcgcatttccttgatatttttcagcaggctttgctttttgggcgtaacataaaacgtgtgaaagcccgctttttcaaacagttcctgcaaaagatgcggcttgccgatgctctcgccaacaatgtcaaatgctattcccggcatcggctggtttgcgcaatagtttgcaatcacgaatccaacaccgccgccgttaaacccataggtaatatgcagaatcttcataagctgcttcacattccatcttgatttttgtcaattcgccgaattgcccgcgccttcacacgactgcagcgcttgttcaagccactgccgggaatctgctgcctgtgccgccatccgcgcatccgcggtttggaaacagccgtcgctgatgatttccgttgtggcatcctcgcccggcacaaccagccgattctgcatatttgccgtttgcagcagcgtatgaatgcggctgttctgcccgcgtttgtcatcctccttgaaccgctggaggacgttgaactgcttatggaagcgaatcgaaaacagcgtgcagtggaacgaatcggttaatacataatctgcattttccacaagtccgagccattcgcgcgggccgacggagatcggaagagcgtccacgacgctcttccgatctgggccgacgggctccttgacggttcccggcttcttgaagtccgcagcgaccatcggcagcatccgaatcgtcagatgcttttcccgtgcgattttctctgcggtttccaaatatcgcgcattttcactgagaaaataacagaacaggtacttttgttcgctgtcaatcggcttcgcaagcgtttgccaatgcgccatgctcaccagcagcgtggggtcaaccgccaccatcacctgtttgcctgtcaattcacgcacgatttccgccccgcgcttttcccgcacagagacgtagcggaacggagcaatcgccttgcggagccgctgctggcatctgtgcgggatttccattacgccgaagctgggcgcgtacgcgattttgcggcggctatcctgcacaaactccagaaaatagtaaggatcatagaggtatggattccaaatctggtcgcttccgcagacgaatacggcatcatcaccgcaaatccgagcaatttctggcgcagtggagcacggcggcgtaatctgcatatgctgcgcacaaaaatcatcaaacagggagaggttgttgacagcttcggacgcgccgttcttcttcatcagatattcgttgattttgtaccgtatggtttcttttaggctgtgattgatgaacttcagcttccacatatccgcctttgtgggcttataattcaggacgctgcacgcataccccatgtcgctgatggtatgttgaagcgcgtaggcctgcagtacgctgccgtaattattgccccgataccacgtttgtgtgtatactttcatcatcaatttcctcttcttttcaggttcgcgtataaaaccagcagtttcgccacatagccggacgcatcgaagagttttttcgcgttggcgacggatttttctgccatccgctgatattcctcgtcgctcaagcgcatcacacgcccgatagcatccgccagtgcggcttcgtccttcatcgggctgatgaaacccgtttcgccgtcaacaatattctccggcagaccaccggcgtttgtcgcaacaacgggcttccccatcgcctgcgcttcgcacgcggtataaccgctggcttcgtaccactcggacggcacgaccacgcaggcgcagttgcgcacatactgccagaggttttcgccggactggaagccgaccatcgttacccgctggtttagatgatgcgcttcgatttccgcgcggatggcatcttcctccgggccagtgccggcaatgataagcggaacattttccagcttctccattgcccgaaccagcgtcaggatacccttttccgccgaaagccgcccataatacagcacataatcgccgcgtttgccctgcacggcgtactttgtatccgccggaaggaagtttttcatgtgcacaatgggcgattttgtcagtccagacacttccagcttgttcttgtaacactcggacggcgtgataaacaggtcgattttcctgtacagcccgctgcgcttgttgaaatcgctctcgatggcggccatcaggcacttcgcccgcgaatccttgaagcacacacgcttgacgcagttccagtaattcccgtgcagacacgcttcgcagattttcccgtggtcgagcatgacatgattcgggcagacgcagttgaggtcgtgcatggtgaagacgaccgggatgccgtgctttttcgccgcatcaacgatggaagcggtcagcacgcggtggaagaggttgatgtggatgatatccggcttttccttttcaatcagcgcagagatttttttctttgcttcaaaggaatacaccatgcggaaggcggctttcagcttctgcgtggcggttaactccccgttaaactccacattgctgacgaaatacgcgctttgttcgcagggcaggttcttttcatcctgcatggcgaaaaagataacctcgtgccccgcctggcgcagcaaatccgccaaaccgaaaaagtaggtttctgacccgccgtgcatattaaagtatttgtttacaagcagtatcttcatgccgcgcctccttatctccggcgcagcttacgcaccgcgttccgcagcggcttgtacagcccaacggcaaccagcgcttgcgttacgcgcagctttatgccattttcatgcacaatatactgattcaggttcgtctcaatcggcgtagcatccagctgtgaaaagaactgcgcccgatgtgcattttccttgcccgcgcgcaccagcatcgaattattggcgcacacccgctccagcggatattcctccatgaaccacgcgcttgcggctttatccacccaatctttgcctttttgagtgttgacaatcagcgccgaaagcccctgattttcactttgctggataagccgttcccctgccttccagaggtcgccgacgacgatatccgcgctgccgttgtcgcccttaaactcgcaatgatagcagctttggcggtacgtcagaccttggagcatcgccagcacatacggattctgccgatagctcatttcctgatgccgcttgcccgattttgtcgtcagcacaaaatacggcatcgtccagccgaccggcgttttactgcggaagttcacattgcggattttctcgccgtaccgtgccgctttcgcatcccggtagcgctgccagacgcccgccgtgggtgcgccctcgcaaatcagcgcaaccagcagcagattttccggattgcccgtcactgccgcgcacgccgcgcactggcagggcgtgccgcagaacatgacgggcatccccgccttcagcaggccacgaaccgtcgccaagcaattgccgatgtcgctctgcacatacttggaactgcgcatccgctcaacatcttccagcttattggagacgatgtgcaccgcgtccatctgctcattccacacgcagccgcacacatagccgccctgccgcagcatttcctgcgccagcgggaagaacatgcccccggatgccgacgctttgcgcgcctgcgtatccagctgatacgccgcatagcagccttccttgcccagcggcgtatgatttttgtccgcgtgctgatggatgcacacgcggtcgcacctgccgcagccgatgcagcgcgcctcgtcaatttcggggatgtagctgccatccgctgcctgcgtcatatgcaccgcgccgcgcgggcagacgttgacgcacgcgccgcagccgtagcagtctttcagcaaatcaaaatcaagcatcgtgttctcctatcggctcattttttgttcatcctctgtttcaaattcctcgccagcgggtaaatcttggtgtgcacaaaagagatgcagtccaccatcagcccctccggcatggcgctcgtgacggcactgagcaccttctgcggcactgtgcggtcgtcaggcttcatcggcgtatccttccacgggcttttcgccttgtatgccagatacgtcttggcatacgggtgcttgcagcccgccacccacgggcggatgctcatgcgaaagcacgactggaagtggacaatcgccggattctccaccgcttcccggtactgcgcggggtcgcccggcacaggcggcttgcgcagcttgatgaggttcttgtaatcaaacgcgaaaaagaccgtcatgcagttgtatttgggatgcaggatgcccgaacgccccagcttgctcagcacaccgttctgcacgccctgatccacaaaggtgatatcgccctgattctcccggatgtagcgcaggaacatgtcctcgacgttgtttttgcgccacgcgtccaaatccaccagcagaacgccgttgttgatgtagttgtccgtcggctgaagtcccagattggtgcggtaggcggcaccgcggcagtcatccacgccatagagccacttgtcgcccatgtccatttcccacaggggcgtcaagtcctgcatgaccagcgtatcgcagtcaataaacagcacctttttcactgtttcgggcagcatggagggcaggaacaagcggtagaacgtgctgatgttccagcggccgacgttgatttcagtggcggagcgcttctcaatgtccggatgcgccagatacgtcagtgtgcggccgaaggaggcaatcatgccctccagcttctgcttgttctctgctgaaatctggttgtctatcaggtagaggttgagttccttgacgtttcggttgtgctccaagagcgacagtatggaaattcctgcaatctcgcagtagctgtcgctggaagaatagacgatatccatcctcggctccccttacagtttcttgtagtccgcaaaactcatcaggtgcaagtccttttcgctgataatgaggttctccttgccgccaatcaactcaaaaggccattcaatgccaatatccgggtcgttgtacatgatgccggaatcgccctcgccatagaacacctcggcgcacttgtagctgactaccgaatcctcgatgaccagatagccgtgcccgaaatactgcggcacaagcagcatctccgtgttttcgcccgtgaggtggaagccgcgccactgcccgaacgttggcgaatccgggcgcaaatccacaatcacgtcatacacatggccggagatgcagcgcaccagcttcgcctgctgtttaaccagctggaagtgcgtcgcgcgaatcacgccgcgcttggaaatggtgtagaacacttccttcaaatcgtggtcaatgccattcgcgcggaaggtgtcaacattgtaatccttaatcaagccgccgcggttgtccgtcgcatagaacggtttgatgcggtatgcaccctgcaaatccagcggctgaaaatcaaacttctgcaccattttatgcttcctcccgaatataatccgccgtcatcttgatgccctgcgcaaacggaatctgattgacatagcccgtgtcccgttcaaccttcttcaaatcgaactggtcgtaggagacgttcacacccttgaagggcaaatctcccagcccaatttcagccgccgggtcaaccaaatcccgcatttccagcaggaactcccgcagcggcttaggctcaccagaaccgatgtagtagcggttgaacggcttgcctttttccgccacggcgatgatggcgttgatggcatcggtgatatagatgaagtcgtacgtctgataccccgccgtgaaggagcaatgctctttgtggatgagcttgcggatggcggtgtaaatcatccgcgcggatttttcacccacgccatagatgttggtgatgatgaccgggatgaattccacaccggtcattttggcgaccgtttcacccatcaggtgcgccgccagcttgcccgtgccgtagatgtagccgcccgccgggtcaatatcatccgactgaagatactcgtaggtttccatctcgttgatgctggatgcatacaccacacgcttgcagcccacatcggcgcacagcttgatgtagtcgcacgtcagcttgacgttcgacagctgcacatcataatccgcgcgcgcaggcccggatgtgcccgcccacgccaagtggaagaagcagtgataatccgccgcgggaatctccttcgcaagggcaggcacgtccttgttcagcacgctgatgcaggtgacgcgcggatcatccgccagcacatcatcaaagcggacatccagtgccgtgacacggcagccctttgccagcagcgcattcaccagcgttttgccgataaaaccgtttgcaccggtaacgattacattctccatcttattctcctgccgacaaaaatgccgtgatttcttcgtccatgcacgcgcgaacatcgccgccggacagatagcacttgctccattcggcaactttctcaatcgccgtgtccagattccagtggggcttccagccaaacgtcgtcttgagcttggcgcagtccagcttcaggaagttcgcctcgtgcgggccgccgtcatagcggttgacccacttcatgccctcgccccacttgcgcacgaacaaatccaccaacgcgccggtctggaagcagtccacatcatccgggccaacgttataatagccagcgtacttgccgtcctcgtactgcatggcggcaatcatcaggtaggcatacagcggctccagcacatgctgatacgggcgggtggagaacgggttgcgcaccacaatatcctcctgcttcatcgccgcgcggatgcagtccgggatgatgcggtcgttggcgaagtcgccgccgccgatgacattgcccgcgcgcgccgtcgaaatcgccacgcgtccatcagcaaaaaagctgttcttgtagctgtgcgtcaccagctccgagcaggacttggaattggagtacgggtcgaagccgtccagctcctcgttctcgcggtagccccacgcccactccttgttcaggtacaccttgtcggtcgtcacattcaggaaggacttgacgcaattgctgtttcgcacgcactccagaatattcaccgtgcccatgacgttcgtttcataggtgtaagcaggatttttgtagctgtcacgaacgatgggctgcgccgccagatgcagcacaatctccggctgtgcggcgtcaaacgcggccttcagcgtcgcataatcgcggatatcgccgataaccgagtgcacatcctgcgcaatatcagcgatttcaaacaaggacggcaacgtagggggattcagtgaataccccgtaacaatcgccccggcattggcgagcaccttgcacagccacgagcccttgaagccggtatgtcccgtcacgaacactttcttgccctgataaaacgacaaatcgaactgcttcatttctcccacaccttccacggcgcattgcccgacgcccacagctgctccagcttctgtttctcccgcagcgtgtccatgcactgccagaagccttggtggatgtaccccaccagctgtttctgtgcgacaagtttggtcagcgggcctttctcaaacacggtttcatcgccctcaatcaggtcaaacagctccggctggaataccatgaagccgatgttgatgaggtcgccgtccatgtccgacttctcgcggaaagcgtcaatcacgctattcgcaccgacttccaccacgcccttgttctgcccgaagttgtacatcgacatggtgccgattttcccgtgcgcctgatggaatgccaccagttccgcaatgttcacgtcgcccaccgcgtcgccataggtcagcatgaacggctcattgccgatatactcgcggatacgcttgacgcgcccccctgtctgggtatttaagccagtgtcgacaaccgtcacgcgccacggctcggcgtgcttgttgtgcacaatcatctcgttcgtgccatgcgtgtaatcgaacgtgatgtcggaggtgtgcaggaagtaatccgcaaaccactctttgataacgtgctgcttgtagcccgcgcaaatcacaaattcgttgtagccataggcagaatatgtcttcatgatatgccacaggatgggcataccgccaatctcaatcatgggcttgggcttgaatgcggattcctcggaaattcgtgtgccgaagccgccggcaagaatgacaactttcatcattttcctcctcatcgcgtcggatgttcaatacaagccttgtttgccgcagtcctcgaaccagtcgcggaaggtgtcctccagccccgcgtggaacgcatagccgctcttcgccagcttttggccgctgatgttcgtgctcaccatcagtttcttcacgcgcgccgggtgaatgccgactttcttgccgccgatggggccaagaatcgtcgccgcggtcatcagcaggccgcccggaatcagcggaatatggcgcttcatcccggttgccgcctgcatggcgctgcatatctgctcgatggtgtacgccggctcgaacgtgcagttgtacacatccacacccggaaaatcatggtcaatcatccgatattggaagaaacgcaccagttccttcacataaatgcacgccttcaccgtatccttgcgccctgcgtaaaagaaatagtgcttcttctggctgttgtacaggcgggtcatattgccatgctcacccttgccatacacaatgcccggccgtacaatcgtcagttcgcggttcgcttcccttgcctgccaaatctggtggattttctccgccaccagcttgctgatgccgtatggcgtgtttggcgtaggcagcgtgttctccgttttcagctcctccgccgcaccatagggcgcaatggagctggtgaagaggattttgcggatgccgtgctgctccgcaaaggcggtcacattctccgcgccgcgaatgttcgtctcgaaataggcgtaatccggatgtcccggcgtcctgtgcaccgccgcaaggttgaaaatcacatcatccggcgtaggcgtgaaatcaagggcaatcggcttgcgcacatccacgcggcgatagatgaccccctcgtttttctccacgatgccgggcacaacgccctcttcgccgggcatgaccaaatccaaatcgtaaatgcagtcgccgggctttacgcacgcatctttcaagcggtgaatcaggtgtgtgccgatgaagccggaaccgccgaaaatcaggtaattcattgctttgccctcacttcgcgccgtccccgtggaggacagcaaccacggttttcagcagaatcttgcagtccagccatatcgacgcttggcggatgtatgtcatctccatctgctgccgatgcccgctctggtaggtcgcattgttgcgcgcgtatgcctgccaatagccggtcacgcccggcttgacggacagcagcacatccgccgaatccgcataatactgctggatttccgatttcagcagcggccgcggtccgacgaggctcatttcgcccgcaagaacattgaacagctgcggcaactcgtccaaactcgttttgcgcaggaaattgcctaccggcgtgatgcgcggatcattgtcgattttgaactccgtatgatactggcgcttctgctcctcgctcagctgatcaatcatctggtcagcattccggtacatgctcctgaatttccacattttgaacggcttgccattcttgccgatacgctcctgcccgtagatgacagcgccgggatcacccagatagacaatgacggaaagaatcaggaacagcggcgaaagtacgataaccgccattgccgtcgccgtcaggtcgaacgcccgcttgacggcacgatagccaagtttattcgcgcccgtgcgggatgctgtcggttctatcgcctgttctggtagtccatgctgcatatgattaccgctcccttattcagtcgtacttagtcgcgctggaaaatatcgcgcgtatacaccttatcctgcacatcatcaagcgccttgtcgtagcggttcgccacgatgatgcggctcattgccttgaattgcgccaagttgttgaccaacctgctgccggaaaacgtttcaccatccggcagtgtcggctcgtaaatcacgatggatgcgcctttcgccttcaggcgctgcagcacgccctgtatgctgctttggcggaagttgtcgctgccgtgcttcatcgtcaggcggtagatgccaataacgggatgatcttccttcgtcagcgccatcacgcggtcggcaataaagtccttgcgcgtcttgttgctctcgacaatggcagaaatcatgttctgcggcacatcggcgtaattcgccagcagctgcttggtgtccttcggcaggcagtagccgccgtagccgaacgacgggttgttgtaatggctgccgatgcgcgggtcgagacacacgccatccagaatctgccgtgtgttcaagctcttgctttccgcgtaggtgtccagctcattgaagtacgccacgcgcagcgccaaataggtgttggcgaacagcttgaccgcctccgcctcgctgaagcccatcagcagcgtgtccacgttcggcttttccgcgccttcctgcaatagcgcagtgaacgcgcgggcggacgcggtcaggcgcgtatcctgcatgtccgtgccgacaataatgcggcttgggtacaggctgtcctccattgcgtgcgattcgcgcaggaactccgggctgaagaggatgttcctgttatggaatttctcgcgcaccgacgcggtgtacccgaccgggacggtggatttgatgaccaccgccgcatccggattgcactgcgtgaccagcccgatgacctcctccaccgccgccgtctggaagcgctgggtaacatcatcgtaattcgtcgggacggcaatgacgacgaagtccgcatcggcataggcggcctgagcgtcgagcgttgcgctcagttgcaggggcgtgtgcgacaaaacctgctgcatcacgtcatcccgcacaggcgattggcggcgattaatcatgctgattttttccggcacaatatccaccactgtcacctgatgatgctgggacagcagcaccgccatcgccatgccgacgtagcctgcgccagcaaccgcaatcttgtaggctctcatgctgtccccccatcgtctcgtttttgaaaaaaagttcgtcatgcaaacattgcggcgaaccagctgccgacaggtacatacctatcaagcattttccattataccatgcaaaccgttatttggcaagtaaatctcgattaattttgtggaaaatgcagttttatcagcttttcttcctattatatatttccgagtgtggcaacgttcgtcgccttatgagaatgcacccagttgcgccgcgaatttgaaaacaggataatatggaacgcgaaaaaagcgtggtggcattcttggcgcacacacgctttccgatgatttctttgcattttcccgtccagcggcatatttatgcacgctttttattcgcccgtgcccgcaaaaaccgtccataccgtgccgaaaatcagcttccagtccagcaggaagctgcgatcgcggatgtagcgcatatccatgtccatccactcgtcaaacgtcacgtcattgcggttcggctgaatctgccaaatgcaggtcagaccgggacggacatacaggcgctggcgctcgtaatccgtatacgccgccacttcgcacggcagcggcggacgcggcccgacgatgctcatgctgccaaccagaatatcccacaactggggcagctcgtcgatgccgcacttgcggatgaaacgccccacacgggtgatgcgcgggtcatccttttgcttgaaaatcgggccgttcatctctgtgctgcgcttcaaatccgccagcttcgcctcagcgtccacgcacatggagcggaatttgtggatgcggaactccttgccgtcaatgccgctgcgcacctgcgtaaaaatcggcgaacctttcgggtcatcaatgacaatcgcaagcgctacaatcagcatcagcggcgaaagcacaatcagcgccagcagggagaagaaaatatcctgcgcgcgtttcagcgcccgatagaccggtttttccttgcgcacctgctcacgattgagccaaatctgctcgcgcgtggtcgtcgccgactgctgtaccgttgcttccgtcatcgccgccatccaccttccatccaccttccatccaccgccgctgcttttacggtcggcaaacttttacgctatcttctgtccgacgaatcgtacacaaaaatcacctgaaccaccttgcttattttaccacacatgtttcagcatgtcaattgccttccaggaaaatccgtgccgtctgtatttttcctgcttttttgctttttcttccgaaaatgcaggaaaacttgctgattttgtcgtataataaggaaggggtacgaccaacatcgtcggttttgcgtgggaatccgcgctttttgcccttcgtaatcacacaatgcagccacggaaggagatgacgctcatgcagcccaaactaccgcaagacgaacgctacgagcagcgtccggacggcacaatccgccgtttccggcagcaggcgccgcccgcgcagagcacctatattccccagccgccgcccgatgagccgccgcgccgccgcaagcgggaaaagcaccgccatcgccgcgtctggctgtacgttttcgcgctgattggcgtggcgttcgtcgccgtggaaatcttccgctatctgattgtgccgctgctcgttcagctgcacatctggacaggaggccggctatgaagcgcatcggaaagtggttgttggggctgattacctccgcgctgacgctcgtgctggtgattgtgctgctgccgtacgccgcgaagtgggtcgcgcgcatcatgccggatgagtccgccgcggcgattcgcgcatccgtcgtgctgtcgcagaagctggagcagagcgcgaagctggaaacgctgcacgtcaccgaagagggcgcgctgaactacgaagtcaaggcggcattcctcggcacagtggcgagcatcaacgccgattacacctatgagggcagtttcggcattgatttgcagcaggtgaccatgacgcgcgacgggtctgtgctgacgctgacgctgcccgcgccggagctgctgctggactccctcacgccagcggacatcacgcgcgattcggcgctgtacccatatctggacgacaacgacttgcagcgtgttttggaggatgaacgagtttcctgccgcgaacggtatctctccggcgaacgcgcagcggaactctgggacgcgaccgtcgcggcgatggaggcgaccgttgcgcagtggatggcggacgcgggcgggttcactgtccgctgcgagcgcgcggaaggagcatga

SEQ ID NO: 437 - DNA, 7977 bp, unidentified
  source 1..7977: mol_type = unassigned DNA
  misc_difference 5094: note = a, c, g, or t
  misc_difference 5095: note = a, c, g, or t
  misc_difference 5096: note = a, c, g, or t
  misc_difference 5097: note = a, c, g, or t
  misc_difference 5098: note = a, c, g, or t
  misc_difference 5099: note = a, c, g, or t
  misc_difference 5100: note = a, c, g, or t
  misc_difference 5101: note = a, c, g, or t
  misc_difference 5102: note = a, c, g, or t
  misc_difference 5103: note = a, c, g, or t
  misc_difference 5104: note = a, c, g, or t
  misc_difference 5105: note = a, c, g, or t
  misc_difference 5106: note = a, c, g, or t
  misc_difference 5107: note = a, c, g, or t
  misc_difference 5108: note = a, c, g, or t
  misc_difference 5109: note = a, c, g, or t
  misc_difference 5110: note = a, c, g, or t
  misc_difference 5111: note = a, c, g, or t
  misc_difference 5112: note = a, c, g, or t
  misc_difference 5113: note = a, c, g, or t
  misc_difference 5114: note = a, c, g, or t
  misc_difference 5115: note = a, c, g, or t
  misc_difference 5116: note = a, c, g, or t
  misc_difference 5117: note = a, c, g, or t
  misc_difference 5118: note = a, c, g, or t
  misc_difference 5119: note = a, c, g, or t
  misc_difference 5120: note = a, c, g, or t
  misc_difference 5121: note = a, c, g, or t
  misc_difference 5122: note = a, c, g, or t
  misc_difference 5123: note = a, c, g, or t
  misc_difference 5124: note = a, c, g, or t
  misc_difference 5125: note = a, c, g, or t
  misc_difference 5126: note = a, c, g, or t
  misc_difference 5127: note = a, c, g, or t
  misc_difference 5128: note = a, c, g, or t
  misc_difference 5129: note = a, c, g, or t
  misc_difference 5130: note = a, c, g, or t
  misc_difference 5131: note = a, c, g, or t
  misc_difference 5132: note = a, c, g, or t
  misc_difference 5133: note = a, c, g, or t
  misc_difference 5134: note = a, c, g, or t
  misc_difference 5135: note = a, c, g, or t
  misc_difference 5136: note = a, c, g, or t
  misc_difference 5137: note = a, c, g, or t
  misc_difference 5138: note = a, c, g, or t
  misc_difference 5139: note = a, c, g, or t
  misc_difference 5140: note = a, c, g, or t
  misc_difference 5141: note = a, c, g, or t
  misc_difference 5142: note = a, c, g, or t
  misc_difference 5143: note = a, c, g, or t
  misc_difference 5144: note = a, c, g, or t
  misc_difference 5145: note = a, c, g, or t
  misc_difference 5146: note = a, c, g, or t
  misc_difference 5147: note = a, c, g, or t
  misc_difference 5148: note = a, c, g, or t
  misc_difference 5149: note = a, c, g, or t
  misc_difference 5150: note = a, c, g, or t
  misc_difference 5151: note = a, c, g, or t
  misc_difference 5152: note = a, c, g, or t
  misc_difference 5153: note = a, c, g, or t
  misc_difference 5154: note = a, c, g, or t
  misc_difference 5155: note = a, c, g, or t
  misc_difference 5156: note = a, c, g, or t
  misc_difference 5157: note = a, c, g, or t
  misc_difference 5158: note = a, c, g, or t
  misc_difference 5159: note = a, c, g, or t
  misc_difference 5160: note = a, c, g, or t
  misc_difference 5161: note = a, c, g, or t
  misc_difference 5162: note = a, c, g, or t
  misc_difference 5163: note = a, c, g, or t
  misc_difference 5164: note = a, c, g, or t
  misc_difference 5165: note = a, c, g, or t
  misc_difference 5166: note = a, c, g, or t
  misc_difference 5167: note = a, c, g, or t
  misc_difference 5168: note = a, c, g, or t
  misc_difference 5169: note = a, c, g, or t
  misc_difference 5170: note = a, c, g, or t
  misc_difference 5171: note = a, c, g, or t
  misc_difference 5172: note = a, c, g, or t
  misc_difference 5173: note = a, c, g, or t
  misc_difference 5174: note = a, c, g, or t
  misc_difference 5175: note = a, c, g, or t
  misc_difference 5176: note = a, c, g, or t
  misc_difference 5177: note = a, c, g, or t
  misc_difference 5178: note = a, c, g, or t
  misc_difference 5179: note = a, c, g, or t
  misc_difference 5180: note = a, c, g, or t
  misc_difference 5181: note = a, c, g, or t
  misc_difference 5182: note = a, c, g, or t
  misc_difference 5183: note = a, c, g, or t
  misc_difference 5184: note = a, c, g, or t
  misc_difference 5185: note = a, c, g, or t
  misc_difference 5186: note = a, c, g, or t
  misc_difference 5187: note = a, c, g, or t
  misc_difference 5188: note = a, c, g, or t
  misc_difference 5189: note = a, c, g, or t
  misc_difference 5190: note = a, c, g, or t
  misc_difference 5191: note = a, c, g, or t
  misc_difference 5192: note = a, c, g, or t
  misc_difference 5193: note = a, c, g, or t
ttatttaccctcgtatgctgcctgaatctcttttttgaactcttcctcgcccactctctgaagagtaagtctgaaacgctcaccaccgtttgcatgcttctcgaagaaactaattgctgcatctgtcactctgaaaagagtttccttgtcgcggataatcggaactagctgctctcctttatagatgtggtttccgaaaagtcctccaaacgatactatatatccaggagttcccttccatgcatctgtcggacagctctttacgcagcgcgcacagttgttacatttgtctctgtcgatgacaatcctgccatcctccatgctaagtgcaccctcgcggcatgccttcacacatacaccacactggatacaatcgtcatggctgcactctactgtcatgccgcccttgattccgacatcgttttcctcagcctttaagcagttgttctgacagcctgtgacaccaaacttgaacttgtgaggaagctctcttccgaagtatctttcatcaagttccttagccagagtgtatgtatcgatacatccgctaggacagatttctgagccctgacacgctgtgacagtacgtactctcggtccgcagacacctgttcctacaccgccctttgccagctcctcttttaccacattgatatcctcaaccttgataaaaggaatctcaataccctgacgcgatgtcatatgaacatatccgtgtccgtatttctcagcaacctctgctactgttttgatattttctgctgtaagatttcctcctacaaccgcaattctaagcgagaaacagcccttttgcttctgtctcatgaatccgcccttttttagggccgcgtaatcaactttctccgccattttagtctccttactgtgtaaatatgttaatgttttgttttatatgtaaatgcatatgcacgctctcatttgcatacacattgataccttattatgatggcttaatcagctatatttgcaaaagcctgtgcaaaatcctccttgaggtcatctatatcctcgatacccacgctgactcttataagatcctcaaatactcctgcatcctccttctgcttatctgtgctgtgaagactgattgtggagcccggatgaatgaccagtgtctttgtatctccgatattgctgagtatgtatggaatcgtcaggctgtctataaatttaaatgccttttccttgctgccaaccctgattgtaaggattgctccatagccgtttgtgagctgtttttttgctatttcatgccatttgctgctacaaagccccggataattaacctttatgtcaggataattgttttctatccacgacgcaagatcgagtgcattagagcattctctttccattctaagaccgagtgtctcaagtcctataatatttaagtatgcattcaccggagctaaacaggcacccatatttctgaaaagactgtttctcagctttgcgacaaatgccataggtccatacttcacataatctgcaaaacccggatatctgttcttgtcccatttgaacttacctgagtctgtcagaataccactgattgcattgctgcttccattgatatatttggaagatgaattgaccacgatatcagctccatgctttaaaacctgtatcaggtacgctgtcgatgtggtattgtcaactacaagcggtatatcatgtgcgtgtgctatctctgcaagcttctcaatatctgtgacatccagacaggggttaccgatagtctctgcaaaaatcagtctggtatgctcattgatgctgtcctctatctgctgccagttgttgttctcgacatacctggttgtgatgccgaaggcctcaagatcatggaacaaatctattgtgccaccgtataggctggcgcttgagatgagctcatctccactgcttagtatatttaagaaggtattcatcagcgccgccatgcctgatgcgcatgccaccgatgctattcctccctcgagctttgttattctgttctcaaaagctgtaatcgtaggattggcaactcttgtgtaacagtagcccggagccttgttttcaaatattttttccagatctgccgcgctctcctgctcgaaggcgcttgtctgatataccggtggcagtgtagagccatttgtctcttttgtcacgccggcatgaagtaagcttgtattaaatctcattgttttcttcttctcgttaattcttacatagtctattgtgttactaggaattgatgagattattatacaaacgtgtgtgttgaaagtcaatgctatcagttatacgaattatttgtgcgtggttatatattttgtttatagccattaatgtcccttaaatactctgcggctgtcgttgcggcatttgctccgtcagatactgcggttaccacctgacgcagtgtcttggtacggacatctcccgccacatacagtccaggctggacgcttctatcatggtcaccattttttgttgcagcatatgtgatgccgtcctcacctgccactacatatcctctctcatcaagcttcaccagattctttataagctctgactgcggtactgaaccatatgccacgaataccccgtctacagccagtgtcctgccacttttaagcattatgcctgttggctttttttctccatatatttctgtcactgtttcgtttaggacaagctctacattttctttctgctttaagagctcaactgtgctctgtgcaccgcggaagctgtctcttctgtgaaccagatagaccttctcacatatatcggacagatataatgcatcatccaaagcggtatctccgccgcccagcactgcggctgtctttcctttatagaatgctccgtcacagattgcgcagtaagatactcccttaccggtatactcatcctctcccggcactcctgcctttctcggatatgctcctgcggtatagatgagcgctcttgcctctgctatcgtgtcatcatcgaatttcactctgtatatcactgattcttctttctcactgttttgcactgcttctatctgcactgcttctttttcgataaattctacatcaagagacactgcatgctccctgaatttttctcccaggtcatatccgtttatgtttggaaaccccagatagttgttcacatttccgctctcggctatctggcctgtcccctcgtattctttttctgctactgccacattcagattggctctctttgcatatattgctgcagacatccctgccggaccactgcctattattattatatcaaacatggaattggttcctttcatcgtccattgaattttttcggtaacttattatatacattatccttaaaaaatacaataataccgcctgcttttataaaacacctttataaaaacaagcggtatcaattttatctatcgtatatacatcctggcctcataaggtctgagcactgacatatcagaggtatccttataatttgaaatcaacacctccatgccctcacactcctttgcaagcggcattggtatctccttatcaaagaaattgcacacaacaatcatggttttttcttcattctttctgctgtatgcaaaaatattctcatcatcctcaagtaaaagtgtgaatttaccatcaacaaataccggataatcctttctcagctgaacaagcttcttgtagcagctaaagattgaatcagggtcatccacctgtgatttagcatttattttgtcgtaattgtcatttacctttatccaaggtgttcctgtggtgaagccggcatttgccgagtcatcccactgcataggtgtccttgcattgtcacggccctttgcgtaaatggacttcatgatttcatcctttgaatatcctttttcaaggcgctcatggtacatgtttatgatttcacagtccttataatcctcgatatcatactgtacatttgtcatgcccagctcctcgccctgatagatgtatggtgtaccctgcatgccgtgcagcaatatagcaagcatctttgcagattccactctgtactccctgtcattgccccatcttgacacgatacgcggcagatcatgattgtcccagaacagactgttccagccacagttgtagagctcattctgccagtgagccattatctttttgagctttttaaacggaagcggtgcaaggtcccatttctcgccgccctccttctggtcaagccctatgtgctcaaactggaacaccatagaaaactcgctgccatccggattgctgtaaagctttgcgcgctctgtgtctgcgccccatgcctcacctacggtaatcaggtcgcccttctggaatgtctccctgctcagttccttaaaatattcctgaagccttggtccatttatggtgattctcttgtccggctcttttgctatctggtcgattacatcaagtctgaagccgccgactcccttatccatccaccagagaatcatatcgtagattgctcttctgacctttggattctcccagtttaaatccggctgctccggtaaaaactgatggaaataatactgtccgatttccggcacatattcccatgcgcttccaccgaaacaagccttcatatcacttggcggcacgccttcatctccatctctccaaatatagtagtcatggtatggattgtccttgctctttttagcctccttgaaccacctgtgctcgtttgaagaatgatttaagacaagatccatcataatccttatattgtgcttctttgcctcgtttatgagctcctccatatcatcgagactgccaaacgtcggatcaatatccctgtaatccgaaatgtcataaccgttgtcctcctgcggtgatttgaataccggcgaaagccatattgcattgattccaagcgtctcaagataatcaagtcttttgatgataccctgtaaatcaccaaagccgtctccgttagaatcctgaaagctctttggataaatctggtaaactaccgcctttttccaccatttttcattattgtttttgctcattatgccctccttgtctcttcattatctcttttagnnnnnnnnnnnnnnnnnnnnnnnnnnnnnnnnnnnnnnnnnnnnnnnnnnnnnnnnnnnnnnnnnnnnnnnnnnnnnnnnnnnnnnnnnnnnnnnnnnnngtttctttaatgctgtatcaaattatgctattttacaagcaccaccaaaacctcacagctttcaagcttaagctcggatgctcccactgaaacagtgctcttttcagcatcatttgtgttggacaaaagcacctttttcacactgccatccagcctgatttgtgcctctttactgccaaaatttgccacaaccagcacgcgcttattttcatcctctctgtaataagccatgatgccatctgtatcctcatatgccggaacacatctgccgtaggtgaacagctccttaaattcatctgactttctgagtgccacaagccttctgtaatagttcaaaacagatgaaggatccttttcctgcgccgcaacattgatagccttatagttttcattgaccttaagccatggctttgctgtggtaaaaccggcatttgcctcatcgctccactgcataggtgtccttgcattatccctgctcatccttccacaggctgcaagtgcctgctcctttgataagcctgctgcaagtgctgccttgtactgatcctttgtgctgatatcgtcatactcatctatactgttccattttgcattttgcataccgatttcctgtccctggtatataaacggaatgcctcgaagcagtacgctgacagttcctaacatctttattccggcaggattttgagcatgccttggtaaaaatcttgaggcacctctcggctcatcatgattttctatgatattggccttaaagccgtacttttctgtctcaagctgtgaaccaagaatggtctttctccatgtgtcaaaatctattttcggtgcatcataccaaccatgctctccatcacttaagcactgtgcacaaaaatcaaatatcgttgaaaaatgcccattctcaccgataaactccggcagctcctcaggcttcatattgaatacctcgccaaccgtaaatgcatcatacttcttaaatgtattgttctttaattcctctaagagctctccgacaccttctgcactttcaaccatcttgtagcaggcagccagtccgtcctctgcatccggctcaaaatcagggaaatcgagatttttctttatattgattatcgcatctattctaaatcctgacaagcccttatcaagccaccagttaatcatctcataaagcttttgtcttagcttttcattctcccagtttaaatccggctgctccttcgcaaacatgtgcagataatacttgtccgtgcccggcaccttctcccagcagcttccgccaaaataagagcggtaattgctcggcggattgccgtttttaccttttctgaaataaaagtaatcagcatactctccatccggatccttaagtgccttttgaaaccattcgtgcttatccgagcagtgatttattaccagatccatgatgatgtgcatatcacgcttctttgcctcggcaaggagctcatcaaactcctccatagtaccgaattcttcagctatcgcatagtaatcagatatgtcatagccctgatccacaaatggcgatttatatatcggagacagccatatgatgtcaattccaagcgattttaaataatccagctttgaaatgatacctcttaaatctcctattccgtcaccgtttgtatccagaaagctctttggataaatctgatatgccaccttgtcatgccaccattttctctccataatgtgtacctcttatctaatcataaattttgcacctatttacatcttgagcactttgtcttgatgtattatactgctattatagaaagtgattagtataaattcttgcaatattttttcattttataacacaatactgctcttataatttaaagggtatagttttaaaagctatggagaaacaacaatatgaaaaataataatccgcctgccctcgggcagaaagaaaacgcaaagcacggagaagtatttttccccgttcaaaaatatataacaagacttgcagcagattaccctgtcatcactacacactggcacgatgaggcagagctcacactgattacaaagggctcatgcacctatcagattgatttgctcgaatatgaagcaaaggaaggcgatatcatctttatcccgccactgctgctgcattccatttcaataagggactgcgacgaattttactcggaaacgtatgtattccatatcaattttttaggtggaaacaataccgatatatgctcttcaagatatctgactccgctaatcaaccatgagtttgccatgccttacctgattgcaccgaagcatccggcatattcatccctttgcaaatgcttcatgcgcataacaaatctatactcccgtcaggaattcggctatgagctggctctaaaggcatttctgcttcaggcaatatttctattgctgcaatacagtgaaaaaaatgctgattttggtgtcaacacatcctccgataagctcaaaaatgtgctcgattacatcgaggtacactatgccgaaagcatccaggttgcagagcttgccggactttgctatttcagtgaataccacttcatgcgtttcttcaaaaaacacatgaacatgacctgcgtgcagtatatcaacaatgtgcgtcttgaaaaatccgtggaacagttcgagcgcggcaacacctcaattttagatgtctcactgtctgtcggatttcacaatctgagctattttcacagggcatttaaaaagaggtatcatatgacacctctttcctttatcaaaagccttgaataa

SEQ ID NO: 438 - DNA, 11062 bp, unidentified
  source 1..11062: mol_type = unassigned DNA
atgcaagacattagaaacattgcgatcatcgcccatgtggaccacggaaaaacgacactggtggacaagatgatgctggcgggacatttgttccgcaacgaccagacaaacggtgagctggtactggataataatgacttggaacgcgaaagagggataaccatcctttcaaagaacgtttcaattaactacaaaggaacaaaaatcaatattattgatactccgggacacgccgacttcggtggcgaagtagagcgtgtactcaatatggctgatggatgtatcttattggtggacgcattcgaaggcccgatgccccagacacgcttcgtattgcagaaggcgttacagatcggtttgaaacccgtcgttgtagtcaacaaggtggacaaacccaactgccgtccggatgaagtttatgaaatggtattcgacctgatgttcagtctgaatgctaccgaggatcagctggatttccccgtcatttatggctctgccaaaaacaactggatgagtaccgactggaaaaccccgaccgagaacctgattccgctgctggacgctatcatcgagcacattccggctccgaaacaactggaaggaactcctcagatgttaatcacctctctggactactcgtcatatacaggccgtatcgctgtgggacgcgtgcatcgcggcaccctgaaagaaggcatgaacattacactggcaaagcgtgacggcagcctgataaagtccaaaatcaaagaactacatacgttcgaaggtttgggacgcaaaaagacagatgccgtttcatcgggtgatatctgtgctgtggtaggtatagacggtttcgagatcggtgataccatctgcgatttcgagaatccggaaccattgccacccatcgctattgacgaaccgaccatgagcatgttgttcactatcaacgattctcctttcttcggtaaagaaggcaagtttgtgacttcacgccacattcaagaccgcctgaccaaagaactggacaagaacctggcattgcgtgtacgcaaaagcgaactggaggacggtaaatggattgtatcaggacgtggcgtgcttcatctctccgtattgatcgagaccatgcgtcgcgaaggctacgaattgcaagtgggacagcctcaagtgatcttcaaagaaatagacggcgtgaaatgcgagcctatcgaagagctgacaatcagcgtacccgaagaatattccagcaagatgattgatatggtaacccgccgcaaaggggatctggtttctatggagacacagggtgaccgcgtaaacatcgaatttgatatgccttcacgtggtattatcggtcttcgtaccaacgtactgactgcctcggcaggagaagcgatcatggcccaccgtttcaaatgctaccaaccctacaaaggtgagatagaacgccgtagcaacggttctatgattgccatggaaggcgggacagcctttgcatacgctatcgacaaattgcaggatcgcggcaagttcttcatttatccgcaagacgaggtatatgccggacaggtggtaggtgaacatgttcatgaaaatgacctggtaatcaatgttaccaaatcgaagaaactgaccaatatgcgcgcatcaggctctgatgacaaggcccgcatcattcctccggtcgtattctcattggaagaagcattggagtacattaaggaagacgaatatgtagaggttactcccaagagcatgcgtatgcgtaaagtgattcttgacgaaacagaacgcaagagagccaacaaaaactgatccatctacattcatatccataaaatcccgaaggtgttgccgcctccgggattttttatctctaatccagaaacttcactttaccaacctcccgtggtttggcagccggcgcctcatcgggatatccgaaagcgatggcgtaaagcaactcatacccttcactgaatcccagctttttcatatattccgccgcagcaggtgatttcatgaagcgcacaggccctcccaggcagcaggagccgattcccattgaccaggcggacaaaatcatattctcgcccaacaggccacaatctatcggtgacatatcatacgcgggatcattcgctataaacacgaccgtaggagcgttattgaacatattcttaaaacccgaacgctctgccgctttcgggttttcctgtttgaatatctcagtcaggccattgataaattccggattatccacgacacggatctcccatgactgtttattcatcccattaggagcattgattccgcattctatgatagtctgcatcttttcacgctccaccgcctcgggtttgtacttccgtatgctgcggcggctcatcatcgtttctactacaggatttacctgacttacggaaacactatccgcaacagcttccgtctgtcgggagccttgcggtgtgcagctgcataataccaacaagcctgcacttactaacattaatctgaatgatttcatttacttttatatttggtctgcaacaaatctagaaattttcaagcataaaaaaaagtggttcctgtatggaaccactttttatatgttaaatctgtaaaattcagattacaacttcggacctgcagcaaccaacttcttaccagcttcgttaccagtgaacttagcgaagttcttgatgaagcggccagccagatctttcgctttttcttcccactgggcagcatcagcgtatgtgtcacgcggatcaaggatcttcggatcaacattaggcaattctgtaggaacaacaaagtcgaagaaaggaataaccttagtaggagccttgtcgatagaaccgtccagaatagcatcaatgataccacgagtatcgcggatagagatacgtttgccggtaccgttccaaccagtgttaaccaagtatgccttagcaccggtcttttccatcttcttaaccaattcttcagcatacttagtggggtgcaatgacaagaaagcagcaccgaagcaagcagagaatgtcggagtcggttcagtgataccacgttctgtaccagccaatttagctgtaaatccagacaagaagtagtactgagcttgttcagggttcaagatagataccggaggcaatacaccgaatgcatcagctgacaagaaaataacttgttgagcgtgagggcctttagaaactggcttaacgatgttttcgatatgatagataggataagaaacacgcgtgttttctgttacgctcttatcagcgaaatcaatcttaccgttagcatcaaccgttacgttttcaagcaaagcgtcacgtctgatagcagcatagatatcgggttcgctttctttatccaggttgataaccttagcgtagcaaccaccttcgtagttgaatacaccttcgtcatcccatccgtgttcgtcgtcaccgatcaacttacgtttcgggtcagtagacaaagtagtcttacctgttcctgacaaaccgaagaagatagccgagctggttccttccatgtttgtattagcagagcagtgcatagaagcgataccacgaagcgggttcatgtagttcatgatagagaacatacctttcttcatttcaccaccgtaccaagtgttcaggatcacttgttctttagtcttcaagttgaaaacagtagcagtctcagagttcagacccagttccttgtagttgtcaacttttgctttagaagcattgaagcatacgaaatcaggttctccgtaagcagcaagttcttcagcagtggggcggatgaacatgttagttacgaagtgagcctgccaagctacttccatgatgaaacgtaccttcatacgagttgcagcgttagcgccacagaatgtatcaacaacgaacaaacgcttgccgctcaattctttaacagctttagccttcaagtcagcccaagcttcttcagtacaaggtttgttatcgtttttgtattcgtcagaagtccaccatactgaattttcagaagcttcattcttaacgaagaatttatctttaggagaacgacctgtgtaaacaccagtcattacgtttacagcacccagttcagtaacctgtcctttttcgaaaccttccaatcccggtttggtttcctcagcgaaaagtacatcataagaaggattgtggaaaatttccttcacgtcggtaataccgtacttgcttaaatctaaatttgccatctttaaatgatttaatttggttattgtataatgttatttttactctttatattctgaaagaagatgtttttcaacatctccttgtctaaggcgctacaaaattagtgctttattttaaaaaaaagaagctattagagaaaaaattccgtaataatcaaagatttatatttgtgtaacaaaaatgcaattcgtactttacaaatctagaaattatttgtttctttgcaggttaaagtcaacaacataacaaaagcagaaatatgaaaatcgtcaatctcagtgaaggcaattctctcctaaaccaatatgtggcggaattgcgtgatgtacatgttcaaaaagaccgtatgcgtttccgtagaaatatcgaaagaataggagaaatcatggcatacgagatgagcaaagcactaacttattccgtaaagcaggtacagactcccttgggaaccgccacagccagcacacacgatgacaaaatagtgatcgctacggtattccgtgcgggactgccgctacacaccggcttcctgaacatgttcgaccatgccgacaacgctttcgtctccgcattccgtttttacaaagatgacgagcaccacatagtagatgtgcacatcgaatacatcgccgccccttcattgaatgacagaactttgcttttagttgaccccatgcttgccaccggtgaaagcatggaactagcctggaaagctttcctgaccaaaggcagacctgcaaaactacaaatggcctgcgtcattgccagccaacaaggggtagaacacatggcagaacttttccccggcgatgatgtcacattatggtgtgccgccatagatcctgttctggacgaacacaagtatattgtcccggggttgggagatgccggcaatttgtcattcggcgagaaactttaaagctcgcgccatccggaaagccccgcttgcccgcccggataaaaagacatcccgattgtataaataacgaatggttagtaaccggcagtgattcaccgctcattactaaccattcatatttcagacagatcggcagatccgtccctgcaaggaggatgaaaatcttatttcacctcccagatatcattcgtcatcagtaattcctggaaattatgatatttcttctttgcagccacttcttcaatctgtgcgttaacggcatcgtcataagtaggagcttccacatcacgaatcacccctaatgcaaccgggaaatccggtccttccatcaatgccagcttcagctgcaaagtattgtccatacagtgagcatcgtgcaccaaaatatctttttccgtcacaccattctcaccaagctttaccactttcagtccgaaaccgtcctgcatcagtccgtattctttttccgcaccaaacaacatcggtttgccatgttccagataaatggcattcttggaacggccttctttcgtatataccgattcgtgtgttccatcattaaagatgacacagttctgaagaatctcacatacagccgcacctttgtgattggcagcagccttcagaatctccactgtaccgggaccatccgtggctaccgcacgggcaaagaaacgtccacgcgcgccaaaacataattcagccggatgaaacggatcttccacggttccgtaaggtgaggacttactgacaaatccgcgcggagaagtcggagaatactgtcccttggtcaaaccgtagatacggttgttcaacagaatcatattcaagtcgatattacgacgaacggcatgtataaagtgatttccaccaatagccagaccatcgccatcccccgaaatctgccagacagtaatcttcgggttagccaccttgcaacccgtagaaatggctgccgcacgaccgtgtatcgtctgcatggcgtatgtattcatataataaggaagacggctggaacatccgataccggaaataacggcagtatcatgaggagccactcccaattcagccatcgctttgtgcagcgaagccaagaaaaaatggtcaccgcaacccggacaccagcgaggttgtccttttttgaaatcttttgctgtatattcgctcatagtctttactttctttacggttattatttatttaagatctcggtgaaagcatcaactaactcgctgactacgaacggctggcctttgacctcattaaactgataaggaacaaatccgtccactttcatacggagatatccggcaaactgaccaagattctgctcagccacgactaccttcttatatttcctcagcacttctgccgtattttgaggcagcgggttcaaatgaacaaaatgtgccagagcaaccttcttgcccgcacggttcatttcctccatggctgaatataaatgaccgtaagttccaccgaaacctactatcagcagatccgcgtcctctacgcaaccttgcacctgaacatcaggcaccggaatcttagccaccttttcggcacgcaggcggcacatcaagtcatggttttcaggttcagtagaaatagcgcctgtatcactgtctttctccaaacctcccaggatatgcatataaccttcctgtcccggcaatgcccaataacggacacccgtttcggcattacgcttgtaaggagtataattatccttcatttccggagtgacatacggcgggttgatagccggatagtctgccagatcaggcaatttccatgcaccggagccattggctacaaagccgtcagtcagcaacaccaccggagtcatgtgttccaaggcaatcttacaagcatcataagcggcatcgaagcagtgagtcggagaagctgcggcaatgaccggcatgggagactcgccgttgcggccaaacaaagcctgcaacaaatcggtctgctcggacttcgtaggcaaaccggtagaagggccgccacgctgtacattaacaaccaccagtggcaattctgtaataacagctaggttcatagcctccgacttcagacagacacccggtcccgaagtagaagtagccgccaacgcacctgcaaatgaggcaccgacagccgtagcacagcctgaaatttcatcttcacactgaacagtagtcacgcccaatgatttatgtttagacaactcatgcaaaatatctgttgccggagtaataggataagatccgaggaacaaacgcaggcctgctttctcggcagcagcgatcaaaccgtatgccgtagccttgtttccgctgatatccatgtactttccgggtactttagatttggtttccaccttataagtatgatctacagacgcatgggtgttgtgaccataatcatatccggcgtgtatcactttaatattcgcttcggctatttgcggcttcttcgcaaatttctcgcgcaagaagttttcagcaacagtcagatcacggttaaacagccagcaaaccaatcccaaagcaaacatattacggcatttcaacattgacttgttgtccatgcccgtatctgccagacagtctttcaccatctgtgaaataggggcagcaatcacatcctgcttaatccccatctcttcaatcggattgtctgttttgaaagccgccttgtccagatctgatttctggaaacaatctgtatcaataatgatacaagctgtgggcttcgcaaatttgtattgtgttttcaatgcagcggcattcattgcgaccaatacgtcgcatttgtcgccgggggtaaaaactttacccgcaccgatatgcacctgaaaacctgacacaccggtcaacgaaccttgcggggcacgtatatccgccgggtaatcggggaatgtactgatatcatttcccactgtagccgaaatattagaaaagatatttccggccagctgcataccatcgcctgagtcgcctgagaaacggaccaccacctggtccaactccttgactatcatttcatctgccataacttattatttagggttacaaaatttcactgtttgcaaagttcggaaagttctgccaaaggacaaaatattccgctatcaaactacgttcgaatatcaaaatgcacaaaattaaaggtttatttaattacaagccaagaaaaatcagagataaatacctgtttaaaagcataatttctatcattatgataacggatagaagctgttcgtttttacaatttattatttttatccatgttttataaacaacatgaaagtccatagccggataaatccattatcaggccctcaaaagcaggcgaaaaatgacaaaacagcaaagaaaggattattttctttccacttaagacatttttcaatctttcatattgccattttaacaaaaaggagtacctttgtagccgcaaaggggccttgtagttcaacggatagaatagaagtttcctaaactttagataggggttcgattcccctcggggctacaaaaaagcagtaaacagttgttatgcaaccatttactgcttttattttatccagataatctttagagccgcttatttaatcaccccaagttccttgcccactttcataaatgcggcaatcgccttatccaaatgcgccttttcatgaccggcagacaactggacgcggatacgtgcctgtcctttcggaacaaccggataatagaaaccggtcacatatatgccttcttcctgcatcttggctgcaaaatcctgagacagtttcgcatcataaagcatcacagcacaaatcgcgctctgagttggtttgatgtcaaaaccggcagccagcatcttgtcacggaaataattcacattatccatcagcttggtatgcaaagcatcactttctttcagcatcttgaacatttccagactggcgccaatgatggcaggggctacagaattagagaacagataaggacgtgaacgctggcgcaacatatcaataatttctttctttccggtagtgaatcctcccatcgcaccaccaaacgccttgcctaatgtgccggtaaagatatccacatgaccgtacacattaaattgttcggccacaccatgtcctgtaggccctaccacaccggctgaatgagattcatccaccattaccaatgcgtcatatttttccgccagttcacaaatcttatccaagggagctacattgccatccatcgagaatacaccatctgtagcaataatgcggtgacgctgcgcctgcgcttcctgcaaacaacgttccaggtcagccatgtcggcattggcgtaacgatagcgttttgccttacacaagcgtacaccatctataatagacgcatgattcaacgcatccgaaataatagcgtcttcttctgtaaacagcggctcgaacaagccaccgttagcatcgaaacaagcagcataaagtatggtgtcttctgttttaaaataatcagagatggcagcttccagttgcttgtgcaaatcctgagttccgcagataaagcgtacggaagacataccgaagccatgcgtgtccatcgcctctttagccgcattgatcaaacgttggttatctgacaagcccaaataattgttggcacaaaagttcaacacatcttctccgtcattcaccttgatgtccgcacgctgaggtgtggtaatgatccgttcatttttatacagtccggccgctttaatatcagccagttccttcgcaaggaactccttcattttatcatacatagctttgctttttttttattaagtatattcgtttgaattaaaaaaatcagtcctgtttgacaaagttcttattttttttcgatatccggttaaattatagagaattttttgataaaatatgcagttttctctctatctttgcttccaaaaggaaatttatagcaaatagcaaactatgaaaaatgtattaattatcggctccaccggtcagatcggttcggaactaaccatgaaattaagaagtatttataatggtaacatcgtagctggatacattcccggtgccgagcctaaaggggaattaaaagagtcaggtccttctgccattgtagatatcactaatgaacaacaaatcgccgagactgtatcaaagtacaacatcgacaccatttacaatctggcagctttactgtcggcagtagcggaagccaaacctcaactggcctggaaaatcgggatgggaggattgttcaacgtattggaagtggcacgtgaaatgggatgcgccgtattcactccaagttctatcggtgtattcggaaacaacacacccaaagacaagactccacaagataccatccgtaatccgcgcaccatgtacggggtgaccaaagtatcgggagaattactgagtgactactaccatatccgtttcggcgtagatacccgctccgtccgtttccccggattaatctcgtatgtcacacctccgggcggcggaaccactgactatgcagtagatatttactactcggctgtaaaaggtgaaaaatttgaatgtcctatcgcagccaacacattcatggacatgatgtatatgcctgacggcttacgtgcagccattgaaataatggaagcgaatcccgacaaactggttcatcgcaattcgttcaacattgcgtctatgagctttgatccggaaatcatctataacaatataaagaagtatatgcccgatttccaaatggaatacaaggtagatccgctacgtcaggctatcgccgaatcatggccgaactcactggatgacacttgtgcccgtgaggaatggggatggaaaccggaatatgacctggacagtatgacacaggatatgcttgccaaattgaaagtacggttcaataaataa

SEQ ID NO: 439 - DNA, 11827 bp, unidentified
  source 1..11827: mol_type = unassigned DNA
ttatttcagattgtttttttctaaataataacactgatgatcatatattttgccgtcatagcttgcttcggcctgatggagaatgccttcgtatgcaaatcccattttctccaaaacacgttgtgaacgtttgttttgaggataacagttcgcactgatcaaggttaatcccagcttgttgaaaccatagtccaaaacagcagagacggcttcagacatatatccttttccccactgggcttcgtctagccagtaaccgatcattccggcatttgaattctctcttttagggtctggcagaattcctatagctcctatcagaagctggtcttcctgtctggtgatggcccatgtgtctttttgtggtataaatattgtttgaagaattttcaaagattcctccggtgtgtcatgaggcttccatccagcattatttcctaggttaggatttcggcaacagttaaagactgcttccgtatcattttctgtaaaaggacgtaaaataagtcggtccgtttctattacatggtttttcacaggggtgttttcctgctcttttttataaacacactctatccggttcccgtctggatctagtaccacactttcaaaataaccatctccggaaatgcgaggttcacttacgatatggtatccttcagcacgtagtagttccgtcaatgataaaacagcttcttggttttcaaaagaaaaagctagatgagtcaatcccagtctgttttcttttatcggaacattttgcacgtcagtcctgctcatcagctctaatgtagcaccactttcaaatgaaatgaagtaagattcaaaccctttttggacattaatatatttttcattactcgttccgttaaaataacggatatagaattctcttagcctttccaactgaaatgtccaaatggcgatatgatgtatgttcatgggtgattgtttatctgttgtatatattttttacagttcgtttttattctagataaatcatctttttggtcattccaccgtcgatgatgatattttgtccattgatgaaatcgttttcttcttgacataaaaataaacacatgcgtgctatgtcttccggttttcctactcgttttgatggatgttgggcatgatcctcagggcgtagttgttcgtaattattagtttgaatccatcccggcgaaatacagtttacggtgatatggaagtcggcaagggataaagcaagcgcatgagtcagtgaatagattcctcctttggaagccgcataactttcactacccggttcgctcattaaataacgggtggagcagatattgataattctgccatacggatgattttctgcctggaatttgcgatgcaaagctaatgtgcgtgaggtgataaatacaggtcgcagattgatggatagaattttgtcaaaatcttccacactggtttctgtgatgggggagaattcgcttattccggcgttgttgataatgatgtccacatccccccacttttcaaaaaggtcgcgcatacactcctcaagggactctttatcacttacgtcgacatgatagaaaattgctccggtctctttggccgtcagtgttcccaactcctcatttttgtcacaaaaggcgacttggtattgtgagttgcggaaagctttcactatatttttcccgataccatcggcacctcctgtgatgaatgcttttctaggaggtctgatagcgttgtctgtcagctcctttggttgaggcttgacggagatcgttttcttctttccatgtttgcggcttttttcccatgcagcctttcgggcttcatattgctcatattgtctttctatataattgtctgccataagttttgaaatatatttatcggaatgttattctattgttcaccataaaattaacagctccatagattattattccaatgaattgtgctgtaaattctttgaggcctattgcttcgatcatcagtatcacaaaaagaagttgtatgccataggcaataccgaaagcggtacaaaagagcattatttgttgcccaagactgttttggggattgctggaaggaaagatccaatatttgctccatataaaattatgagtctgagcgatgaggtatgccataatatttgctactatataatttcctttgaatgagaagtaactcattacaatccatatcactaacatggtaataagataatttaaggttcctatcgtagcaaaacgaactaaacgtactgatgctttcatcctctttctttattggtttattttacatggtgaattttcgtgcaaacttactaaaaatctgtgattttaatgcttgtgcaataaaaaagaagcccacttttctcagttcctgtttaaattttcctcaatcgtaatcttatagtagcccatttaaccatttcctctgtcggagcgaatatcagttcatcgtttcggctgatccttctatgatgatccatccatgagaatgatatacgtatccggagcattccgtgcacacgggatgctttatccacctacaacagagtttggtaaaactgctgccactgctaccaccttttccactggaaccacgatgaacaggtcgtttcggagggtggtggcagcacctttttctatgcggtaaaaaggtgtgctgccaccacttttacctttttttatcccaaaacggacggaggaaggggaagatacatgagatgattgccacacgccgggaaaaggagatgggaatggatccacagaatgctgaagccggactgacagaatggaacccaccggcggacaaaacactgactgtagcctgatgttgaaagagtcaactgatattataactaagtattaactccgtcaaccatccttacaagtaagaagaaggagtagtcaacctaaagcgttaaactacaatgggaatctgattgcatcctgccagaactacagttgcctacagtcaaaaccacagtaacaattcagtggaactctggttgcatcttgatggaactaaagtttcaacctgacggaactggttgaaacttgtagcccgtgtacacgttcatacggatgaacaaggcgagccatacgtatcaacaggtgcgccccggcaggatagccgcgaggtatctcactgtcggaaagaatagagaaaggtggtggcagcagcctttttaccgcataaaaaaaggtgctgccaccaccctctggaacgtcctgttcatcgtggttccagtgggaaaggtggtagcagtggcagcacttttgtaaaactccggaagtaaggcacttttatatcatgcaaaataatagtatatcgcaaatgtaccttataaactgtccgattgcaactattcagaatctgtgattaatgaatctcgatgatcctgttcactttggctttttcttcaggagtgcgtttaggcaaatcaatagtcagaacgccgttgctggcattggcactgattttttccttaaccacatcttcgggaagaatcaaagcttgttcgaacttagagtaagagaattcacgacgtaaatatcttctgttgtgatggtcatcctcttttgtttcattctttttctccattgagatcactagttcgttgttttcgctgatgtggatattgaaatcttctttagtcatacccggagcagcaacctctactttataatctttgtcactttcaatgacattaattgcaggggcggtagcgttcgctcttgtcaaccattcattatcaaagaaatcattgaaaatacttggtaaccaattctgattgttatactttctagtcggcatcataattataatctcctatattttaaattgttactagattgattttttaaatctttttatcttgtcgcttttggcgatacactgatgttcttgcaaagtatatgcctgatggcaaaatgtcagccggaagtgaaatgaatttaaatctgtgaagataattttaataaatatcgagatgcttttaaacctttgcagaatttgtttgcagttgagatgcgaggcaaagtgacaatgaaagccattttgtcagcaaatggtggctgttatttatgtcagtatattatctttgcattgttttataaaagtaaccgttaaaaaagaaaaggaaattccatgttggcatatacttatattaagcaggggaaatttgaattgatagagaaaccgaagcctgagttgaaagactcgagtgatgctattgtgcgcgtcactctcggaagtatttgtaccagtgacttgcatatcaaacatggtggtgtaccacgtgccgttcccggaataacagtggggcatgaaatggtgggtattgtagagcagacgggaagtgatgttgaattagtcaagccgggcgatcgggttaccgtcaacgtggaaaccttttgtggggaatgttttttctgccggcatggatatgtgaataattgcaccgatcctaatgggggatgggccttgggatgccggattgatggtgggcagacggagtatgttcgcgtaccttacgctgatcaaggtttgaatcgtattcccgattccgtgactgacgagcaggctttgtttgtaggagatatccttgctacaggattctgggctgctcgcatttcggagattaccgaagaggacacggtgcttgtcattggtgcgggacctacgggaatctgtactttgctttgcgtgatgctgaggaagccgcggcgcattgttgtttgtgaacaatcccccgaaagaatccggtttgttagggaacattatccgcaagtggaagttgtcactccggataaatgtaaggaatttatattgcaaagtagcacacacggtggtgcggatgtagtttttgaagtagcaggaggggaggatacattccgcttggcatgggaatgtgcgcgccctaatgctgtcgttgttttggtggctctttatgaccgtcctcagattcttcctctgccggacatgtatggaaagaatttgattttcaaaaccggtggcgtagatggttgtgattgtgctgagatactccgcttgatagaggtgggaaaaatagataccactccattaattacacatcgtttcccgctggatcagatagagacggcttaccggatttttgagaaccgacaggatggagtgataaaggtagctgtaacaatggagactggaatgtaaattgaaaatagtaaaatataagcgtgtatgcctgttattgaaatatcatcgttgacacattccggagtggatgttttctgcacgttgacggaagctcagttacgtcagcgtatggaatctggaaaaggattgtttatagccgaaagccccaatgtcattagtagggctttggatgcaggatatgaacctcttgctcttatgtgtgagcgcaagcatatctctggtagtgctgcccacattatcgagcgttgtggtgatgtgcccgtttatacgggagacagagagttgttggctacgctgactggctatgttctgacacgtggtgtactatgtgctatgcgtcgtccggtgttgccctctatggaggagatctgccgggatgcccggcggattgtagtcattgacggtgtggtggacactaccaatatcggggcgatattccgttcggcggctgctcttgggatagatgcagtattgttgacacacaattcttgcgacccgttaaatcgccgtgcggtaagggtgtctatgggttcggtgtttttagtcccatggacatggttggatggtacgattggcgatttgaacaagttcggtttccgtactgctgccatggcgttgactgacgattctgtctctatagatcatcccatgttggcggcagaacctcggttggctattgtgatgggaacggagggggaggggcttcctcacaaaacaatcgctgaagccgattatgtggtccgtatccctatggcgcatggggtggattcgctcaatgtggctgctgcggctgctgtagccttttggcaactccggattacggatccttgaaaaaaattgatatatgattcagcttgtttgtaagctcccgataaaatacccgttgtctttattctcttgatctttatgcaaaaaagattatgagaaaaatgaataaagaagaattcttagaaattcgattccgtcagcaacgaagcggtttgaacaaaatgatccattacgagcaaaactcctcccttatgattttgcaggtgagcttatttattcctatatttgccggaaataatcacatattactttatgaaaacaaaatattggatcatctgcttatcaattttctttgtggcttgctcgcgtaatatgaatgatatatacacgggtggaggggaagaagaggagaaaaaaatcaacaaagacgacttttttgattttatcactacacgtaattgccaacttgtcattgactatggcatgaaagtacagactgctttttatctgtatgatgaatatcctatggaattggttggaaatacgtgggagttcaaagatataaatcccatttatgctgcttcgactgatgtgaatggtaaatttatctccaaagtatctttgccggcatacttgaaaaaggtatggctggtaacggatcatgtattggtcgtatcacctgttgagttggaattgctagcagacggactaacctttaattatgctgattataaagcgcaattgtctgccggagggcgttctagagcaataatgggaggagtgggataccctgatggatatgatgtgctggggcattgggatgaaaatggagttcctgattatttattgtctgagaagttggatattcctggtgcttttttagaaagatgcagcagcttgagccgttctatactggtggataatcgtaatctgttggaaagatttccggaactacgtacatcaggaaataatgatatggtaatcactaaagctaccggtctggtagctacttattttgatttctcctctaccgcttgggagaatatggtcgcttattatacgtataaagagggggagactgtagatatagctactataaagaagactatattgatacctcgttccggtaagaatgcccctaaatctttagtcggtgaacaaataagattaaaatattggaataaagaaaatggcaactatgaggatgagttccctaaaggaacgcatattggatgggtcttattaggaatgggattcggaaaagagaaaggtgcattgcttcgttattctaatcccgcgtataatgacaataaagagcaacgttcagttctgttaagcgatcctgaacttgacaattgtttctttatggctatggaggataatgtggatatgcgctttaatgatgtgcagtttgctattatggcatctattccttcttctgtggagtctactcccagtataccggatgaagtaaataaagatgaaatttcgtatgtagtcaaaggggctttggcttatgaggacaattggcctgataagaatgattatgacatgaatgatgttgtgatatattattccagtacggtagtgaaagataaatcttctaacgccttggtacgcaccactacaacttttactccgatgaatgatggcgccacttataccaatggatttggcttccagttggatgatgtggggaaagaacatatagatttggtgcgggtgagtcaagatggcaatgtgattgccgatcattttgatccggacacggaaaagcctgtattagttctttttcccaatataaagcccgttctcaaaaagcctgtgactgtagtgatcgggtttaagaaatatgataaagtaagtgacatggatgcttatcctccttacaatccttttgtctttgtaaatgaacgttcccatgaagtacatttgtcaggatataaaccgacaagtgtggccgatgagagtttacgtggcacaggtagtgatttgagtcaggattccaatggtaatccaatgtactatattgcagaagacaacatgccttttgccataaatatcagtaacattgaattcaagtggcctcctgagaaagtatctattaccacctactatcccaagtttaaacaatggagggattcttttggcaaggattataaagattggtttttatatcctgaggggcagtagagtgctgaaaagtcctgtgaatactgatcattcagtttgacaggactttttatgctctcttctttattttctttcctgcctttcaagtctcttgtccggtctctgtggctatttcttttctccgatcgtccactctttggtccggttatacgtttcccacatacgggcatacaagcctccgagagaaagcagttccttgtgagttccctgttcggccacagctcccttgtccacataaagaatgcagtctgcatccgtaattgtacccagacggtgtgcgatgaccagtacagtctttcccatgatgagataagagaacgcttccagtatcttgccttcgttttcaggatcggaaaaagcggtggcttcgtccagcaggatgataggggcgtctttcagtatggcacgggccagggcgatgcgttgcgcctccccgccggagagatacgtgcctccttcgcccaccaatgtctgatagccattgggcagagcctcgatgaactcatgacattgagcggcacaggctgcctgtgccacttcttcaaaggttgctgtcttgtttcccatgcgtatattctcttcgatagtatcgaagaagagcatattgtcctgaaagacaaaagccacattattcatcagcaccgcggtgggaatctctttgacgggtgctcctcctatcagaatttctccgccttgaacatcccagaaacgggcggcaagcatggctacggtacttttcccggctcccgaaggaccgaccaaggctgttaccgtgccggggagggcgatgaaagatacctctttgagtatcggtgtggtgtcgtaggcaaaagatacgttgcgaaactccaccgaggcatcccgggggtatcggggagtggcagactcttctatctcatccatataaaggatatcgtctatcttccgcacgcccatgttattctgattcaagaagctgcctatccacaagagtttaaggacggggaagaaaacagtcacgccgaaaagcaggaacatcagcaccactggtacaaaagccgcatacgaggcactcccgacaagcagccatacagctacagggatgataaagagcagcgccgaagagagtatggtgaggaatcccacataggtaggttcgtactgcaagttcacctcatttgaaaaattgcggtactccttgatatcgtcattcagttttcggtaggcatcggttgattctgtaaaggtttttaccacttgtattcctcggatatattccacgatgccggcattcatcttgcccaggctctccacatactgttcggacacctcccggattttttttccggtgtacatcttccccatcacatagaatgctgccgccagtactgccaaaactacggtagccaaccgccagtctacgacaaacatgtagccgataagaatcagcgggaaaagtacggcggttacgatgtcggggatgtgatgggcgataaacaattcgatgcgttccacatcatcgctcattattttcttcagctcgcccgaagccctgcgggtaaagaaccctaacggcagacggaccatcttttgtgccagctgcatccgtatttcgtacaggatattgaaagcggcaatgtgtgagagcatcagtgaggcgaaggtgagcgctccaaaaacgaagaaagctcccaatgcggcataactccattgccagatgtatgctttgtcaatcaatgagggggcaagcgcatgttccgccagttcgatgaggatattgtacaccgcaataatcggtacaaactgtacgatggcggtgatgacggccagcagcatcgatccgatgagcagccaacgtttagtgccggcaatttctatcaaccgtgccagcccggtcttacgtttatctgtattcatggtcttgctgtttagttgattgctggaatttccatcctttcacccgttgttgttcctgccagaggcttcgatacagtccttccttttcaagaagcgtttggtggcttccttgttgcaccacctgtcctttatctatcaccacaatgttgtcggcgttaacgacagttcccagccgatgggcgatgatgaccacggttttttctttcaccagatcgttgatggcctcttggatatgcgcctcgttttcggggtcgagcgaagcggtcgcctcgtccagcaatacaataggtgcgtctttcaagatggcgcgggcgatggatatgcgttgcttttccccgccggagagtgtgtttccaccttcgcccaccatcgtgccgtagcctccgggcatggctgtgatgaagtcatggcaccgggctttgcgtgcggcggcttctatttcttcacgggtggcggtctcacgtcccacgcggatgttattatagatggtgtcgttaaagagatacacatcctggaagacgatggaaatttgctgcatcagtgtatgtacggtgtagtctttgatattttgtccgcctagcaggatttcccccttgtccacatcccaaaagcgggcgatgaggcgtgtcagtgttgtcttgcctgatcctgacgggccgacaaaggcggtcagtcctttttccggaatggtgagcgacacatcgcggagtacggggatattggcattgtaactgaaggttacgtgacggaactctatggtaggggccggagtgcgctctatcgttccttccggaagtacaggtgttttgcagagagtgttgatgcgttcggctcccaacttcatgtagttgatgatggctataaaggccagcgcgttaatgagtggggcataaatgaccgatcctgccagcaggaacatgatatatacgggcatggagattttagtgtccagcagcatcgggaatcccagcaacatcagcagcaccaggccaccgttcagcagcgtggaagccagtgtgatggtcggtgcgggcgcagcttccaggcggatgctttcctgcttaaggttgcggaaggagcgttccaggcgttcaaacttgttgccgctcagattgaatgcctttatcagtcggataccttgtatatattcaatcatacgcgaagcggcatctgtctttattttctgatgtttcttgcccaatgtcgccacaaaatggttggtgagcagcatcatggggtatgccagtggaatgacggccgcagctgccagcgccaattgccagttgaagaacgcgagcgatatcaaagcggcaacgggcatggccagaccgccgaagaactggccgatgaggtgtgtggtgagcatctccacattgttgtagtcgctgacaatgtatgcaccgatgtctccggggtctcggctgttgaaaaagctcatcggcagacggcgcaggtggctgactacagccagacggccgtcgcagcatatttcgtagccgtcgcgataggctaccagataggctttctttccgatgagccaaaggcagatgagagagaggaggaggaatgcgcacgcccctgctatattcatgagattgattgtggttccggggtgctggagaggcttgaacacttcccataccacaagaagcatgcttccgtaaggtgcgccacggaataaatattccgcaatggtccagcatatcagcggacgcaatcgacgggggtgtcccattgtggcggaattaagaatctgagagagattgttcat

SEQ ID NO: 440 - DNA, 7222 bp, unidentified
  source 1..7222: mol_type = unassigned DNA
  misc_difference 1890: note = a, c, g, or t
  misc_difference 1891: note = a, c, g, or t
  misc_difference 1892: note = a, c, g, or t
  misc_difference 1893: note = a, c, g, or t
  misc_difference 1894: note = a, c, g, or t
  misc_difference 1895: note = a, c, g, or t
  misc_difference 1896: note = a, c, g, or t
  misc_difference 1897: note = a, c, g, or t
  misc_difference 1898: note = a, c, g, or t
  misc_difference 1899: note = a, c, g, or t
  misc_difference 1900: note = a, c, g, or t
  misc_difference 1901: note = a, c, g, or t
  misc_difference 1902: note = a, c, g, or t
  misc_difference 1903: note = a, c, g, or t
  misc_difference 1904: note = a, c, g, or t
  misc_difference 1905: note = a, c, g, or t
  misc_difference 1906: note = a, c, g, or t
  misc_difference 1907: note = a, c, g, or t
  misc_difference 1908: note = a, c, g, or t
  misc_difference 1909: note = a, c, g, or t
  misc_difference 1910: note = a, c, g, or t
  misc_difference 1911: note = a, c, g, or t
  misc_difference 1912: note = a, c, g, or t
  misc_difference 1913: note = a, c, g, or t
  misc_difference 1914: note = a, c, g, or t
  misc_difference 1915: note = a, c, g, or t
  misc_difference 1916: note = a, c, g, or t
  misc_difference 1917: note = a, c, g, or t
  misc_difference 1918: note = a, c, g, or t
  misc_difference 1919: note = a, c, g, or t
  misc_difference 1920: note = a, c, g, or t
  misc_difference 1921: note = a, c, g, or t
  misc_difference 1922: note = a, c, g, or t
  misc_difference 1923: note = a, c, g, or t
  misc_difference 1924: note = a, c, g, or t
  misc_difference 1925: note = a, c, g, or t
  misc_difference 1926: note = a, c, g, or t
  misc_difference 1927: note = a, c, g, or t
  misc_difference 1928: note = a, c, g, or t
  misc_difference 1929: note = a, c, g, or t
  misc_difference 1930: note = a, c, g, or t
  misc_difference 1931: note = a, c, g, or t
  misc_difference 1932: note = a, c, g, or t
  misc_difference 1933: note = a, c, g, or t
  misc_difference 1934: note = a, c, g, or t
  misc_difference 1935: note = a, c, g, or t
  misc_difference 1936: note = a, c, g, or t
  misc_difference 1937: note = a, c, g, or t
  misc_difference 1938: note = a, c, g, or t
  misc_difference 1939: note = a, c, g, or t
  misc_difference 1940: note = a, c, g, or t
  misc_difference 1941: note = a, c, g, or t
  misc_difference 1942: note = a, c, g, or t
  misc_difference 1943: note = a, c, g, or t
  misc_difference 1944: note = a, c, g, or t
  misc_difference 1945: note = a, c, g, or t
  misc_difference 1946: note = a, c, g, or t
  misc_difference 1947: note = a, c, g, or t
  misc_difference 1948: note = a, c, g, or t
  misc_difference 1949: note = a, c, g, or t
  misc_difference 1950: note = a, c, g, or t
  misc_difference 1951: note = a, c, g, or t
  misc_difference 1952: note = a, c, g, or t
  misc_difference 1953: note = a, c, g, or t
  misc_difference 1954: note = a, c, g, or t
  misc_difference 1955: note = a, c, g, or t
  misc_difference 1956: note = a, c, g, or t
  misc_difference 1957: note = a, c, g, or t
  misc_difference 1958: note = a, c, g, or t
  misc_difference 1959: note = a, c, g, or t
  misc_difference 1960: note = a, c, g, or t
  misc_difference 1961: note = a, c, g, or t
  misc_difference 1962: note = a, c, g, or t
  misc_difference 1963: note = a, c, g, or t
  misc_difference 1964: note = a, c, g, or t
  misc_difference 1965: note = a, c, g, or t
  misc_difference 1966: note = a, c, g, or t
  misc_difference 1967: note = a, c, g, or t
  misc_difference 1968: note = a, c, g, or t
  misc_difference 1969: note = a, c, g, or t
  misc_difference 1970: note = a, c, g, or t
  misc_difference 1971: note = a, c, g, or t
  misc_difference 1972: note = a, c, g, or t
  misc_difference 1973: note = a, c, g, or t
  misc_difference 1974: note = a, c, g, or t
  misc_difference 1975: note = a, c, g, or t
  misc_difference 1976: note = a, c, g, or t
  misc_difference 1977: note = a, c, g, or t
  misc_difference 1978: note = a, c, g, or t
  misc_difference 1979: note = a, c, g, or t
  misc_difference 1980: note = a, c, g, or t
  misc_difference 1981: note = a, c, g, or t
  misc_difference 1982: note = a, c, g, or t
  misc_difference 1983: note = a, c, g, or t
  misc_difference 1984: note = a, c, g, or t
  misc_difference 1985: note = a, c, g, or t
  misc_difference 1986: note = a, c, g, or t
  misc_difference 1987: note = a, c, g, or t
  misc_difference 1988: note = a, c, g, or t
  misc_difference 1989: note = a, c, g, or t
atggacactcaacaaatagatgttatggtagccgacgcctcacatgaggtttacgttgacactattttggaaactatcagaaatgctgctgccgtacgaggaaccggaatcgcagagcgcacacacgaatacgtagcgactaaaatgaaagagggcaaagcaataatcgcgctctgtggcgacacattcgcaggtttcacctatatcgaatcatggggaaacaagcaatacgtagcaacctccggtctgattgtacatcccgattttcgcggattaggattggcaaagcgcatcaaacaagcatctttccaactggcacgtctccgatggccgaaagctaagattttcagtctgacatccggagccgcagtgatgaaaatgaacaccgaactaggatatgtccccgtcactttcaatgaactgacagacgacgaggctttctggaaaggatgcgaaggctgcaccaaccacgatatactggtggctaaaaaccgtaagttctgcatctgcacagccatgctgtacgatccgacagacccgcggaacataaaaaaagaacaagaaagaaataacatttaatatatacagcactatggaagaaaagaagaaaaaagtagtggtggcattcagcggcggactggacacatcgttcaccgtcatgtacctcgctaaagaaaaaggttacgaagtatatgcagcttgtgccaatacgggcggtttcagcgaagaacagctgaagacaaacgaagaaaacgcctacaaactgggagcagtgaaatatgtaacattggacgttactcaggaatactacgaaaagagtctgaaatatatggttttcggaaatgtgctgcgtaatggtacttacccgatctccgtcagctcggaacgtatcttccaggcgttggccatcgcacgttatgccaacgaaatcggtgcggatgccattgcccacggttctaccggagcaggtaacgaccagattcgttttgacatgactttccttgtactggctccgaatgtagaaatcatcacgctgacccgtgatatggcattgagccgtcaggaagaaatcgactatctgaacaaacatggtttcagtgcagactttaccaagctgaaatactcttataacgtaggtttgtggggtacatccatctgtggtggcgaaatcctcgactccgcacagggattaccggaaacagcctatctgaaacatgtggaaaaagaaggcagcgaacaactccgtctcactttcgaaaagggagaactgaaagctgtcaacgacgaaacattcgacgatccgatcaaagcgatacaaaaagtagaagaaatcggtgcggcatacggtatcggacgcgatatgcacgtaggcgatacgattatcggtatcaaaggccgtgtaggtttcgaagcagcagctccgatgttgattatcggtgcccaccgcttcctcgagaaatacacattgagcaaatggcagcaatactggaaagatcaggtagccaactggtacggaatgttcctccacgaaagccagtatctcgaaccggtaatgcgtgatatcgaagctatgcttcaggaaagccaacgtaacgttaacggtacggcaatcctcgaactccgtccgctttctttctctaccgttggcgtagaatcggaagatgacctcgtgaaaacgaagtttggcgaatatggcgagatgcagaaaggctggacagccgaagatgcgaaaggctttattaaggtgacttctactccgctacgtgtttactacaataaccataaagacgaagagatatgattaaagcaggaatcattggtggcgcaggatatacagcaggcgaattaatccgtctgctgctcaaccatccggaaactgaaatcgtattnnnnnnnnnnnnnnnnnnnnnnnnnnnnnnnnnnnnnnnnnnnnnnnnnnnnnnnnnnnnnnnnnnnnnnnnnnnnnnnnnnnnnnnnnnnnnnnnnnnncagcaggcgaattaatccgtctgctgctcaaccatccggaaactgaaatcgtatttatcaacagcagcagtaatgccggaaacaaaattaccgacgtacacgaaggactatacggagaaacagacctgagatttaccgaccagttacccctggacgctatcgacgtgcttttcttctgtactgcccacggcgacacgaagaaatttatggaaagccacaacgtgccggaagatttgaagatcatcgacctctcgatggattatcgtatcaagagtgacgatcatgatttcatctatggtctgccggaactgaaccgccgtgctacctgtacggcgaagcatgtagccaatcccggttgttttgccacctgcatccagctaggtttgcttccgctggccaagaatctgatgttgacagacgatgtttcagttaatgctatcaccggaagtaccggtgccggcgtgaaacccggtgctaccagtcatttcagctggcgtaacaataacatcagcatctacaaggcattcgatcatcagcatgtgccggaaatcaagcaatcactgaaacagctgcaaaacagcttcgattcagagatcgactttatcccttatcggggcgatttcccacgcggcatctttgccactcttgtcgtgaaaaccaaagtagcactcgaagagatcattcgcatgtacgaagaatattatgccaaagactccttcgttcatatcgtagataagaatatagacttgaaacaagtcgtaaatacaaataaatgtctgatacacctggagaaacatggtgacaaactattgattatctcctgcatcgacaacttgctgaagggcgccagcggacaggcagttcataacatgaacctgatgttcaacctggaagaaaccgtaggattacggctgaaaccttccgctttctaaaaacagaagaattatgaaattattcgacgtatatcctttatataacatcaatatagtcaaaggacaaggctgtaaggtatgggatgagaatggtacggaatatctggacctttacggaggtcatgccgtcatttccatcggacatgcgcatccccactatgtggagatgatcagcaatcaggtagcaacccttggtttctattcaaattcggtgatcaataagctgcaacaacaggtagcggaacgactgggaaaaatctccggttacgaagactattccctgtttctgatcaacagcggagccgaagccaatgagaatgcgctgaagctggcttctttctataacggacgtaccaaagtagtgtccttcagcaaggctttccacggacgtacttcgttggcagtagaggctacgaacaatccttccatcattgctccgatcaataacaacggacatgtgacctatcttcccttgaatgatatcgaggcgatgaaacaggaactggcaaaaggagacgtatgcgctgttatcatcgaaggaatacaaggagtgggcggtatcaaaataccgactaccgaattcatgcaggaacttcgcaacgcttgtaccgaaaccggaacgatcctgattctggacgaaatacagagcggatacggtcgcagcggtaaattctttgctcaccaatacaatcatatccagccggatattatcactgtagccaaaggtatcggtaacggattcccgatggcaggtgtactgatcagtccgatgttcaaacccgtctacggacaattgggaactacattcggaggaaatcacctggcatgctcggcagctcttgccgtaatggatgtgattgaacaggaccatctggtggaaaatgccgctaaagtcggtaattacctgctggaagaactcaagaaatttccgcaaatcaaagaagtacgcggacgcgggttgatgatcggactcgaatttgaagaaccgatcaaagaactgcgcagccgactcatctatgatgagcatgtatttacgggagcaagcggtacaaacgtacttcgtctgttaccccctctctgcctcagcatggaggaagcggacgaattccttgcccgtttcaagagagtactctgatcgctcatttgattaataaacagccgacaaaaaagcagcctcatacagaaatatttttcttatccgggctgctttttgttttttcgcaatttaccgttacctttgtctgtaagaatccataaaaaataagcgcatatgaaaatagctattatcggtgcaggaaacatgggtggttctatagcccgcggcctggcaaaaggaagtctgatagcagactcagatatcattgtatccaatcccagcgcaggcaaactggaaaagctgaaagaagaatttccgggcatctccacaactcagaataacgcagaagctgctgcaggagcagatattgtcattttggcggtcaagccatggttcatggaaccggtgatgcgtgagctgaagctaaagagcaaacaaactctcgtctctgtagcagccggcattagctttgaagagcttgcacactttgtgatagcccccgaaatgccgatgttccgcctcatccccaacactgccatcagcgaactggaaagcatgacacttatcgcagcacgcaacacaaacgatgagcaaaaccagttcatgctccggctgttcaatgaaatgggaatgtctatgctcatccccgaagaaaagatagcagctaccacggcactgacttcctgcggcatcgcttatgtattgaaatacatccaggctgccatgcaagccggtatcgaaatgggcatccgtcctaaagatgccatggagatggtagcccagtctgtcaaaggagccgccgcattaattctgaataatgatactcatcccagcgtggaaatagacaaggtgaccactccgggcggaatcaccatcaaaggaatcaacgaactggaacacaacggatttacttccgccgttatcaaggcgatgaaggcatccaaataataccgcaaaattattaattataaaaaaataaccacttgtatgaatgatcaaattaaacaaatcgcagagcgtcttcgcggattgcgtgacgtactggaactaacgtctgaagacatcgcccgcgactgtgacatatctgccgaggaataccggctcgcagagacaggagattacgacatttccgtcagcatgttacaaaagatagcccgcacctataacattgcactggatgcactgatgtttggcgaagaaccgaaaatgagcagttactttgtcacccgtgccggcaaaggcacgagcatcgaacgcaccagagcctacaaataccaatcactggcagccggttttatgaatcgcacagccgatccgttcatcgttactgtcgaacccaaaggagacgacgagcctattcattacaaccaccacaacggacaagagtttaatcttgtgctcgaagggcgtatgcttatcaacattgaaggtaaggaaatcatcctgaaccaaggtgacagtatctatttcaactcaaaacttccacatggcatgaaagcgctcgatggcaaaacggtacgttttctggcagtaattatgtaataacattatggtagaaagatttttagcaaagactaactttgcctcacaagaggattttatcaagaacctgaaaataaatgttccggagaacttcaacttcggttacgatgtagtagatgcctgggcagccgaacaacccgacaagaatgccttactctggaccaatgaccggggcgaaagccgccagttctctttcgccgacatgaaacgctatacggacatgacggcttcttacttccagagcctcggcatcggtcgcggagatatggtgatgctgattctgaaacgccgctacgagttctggtacagcaccatcgccttgcataagctgggagccacagttattcctgcaacccacctgctgacaaagaaagatatcatctaccgctgcaacgccgccgacatcaaaatgattgtagctgccggtgaaggaatcgtattgcaacacatcaaagatgctcttcctgagtgtccgagcgtagaaaagttagtcagtgtaggtccggaagttccggaaggattcgaagatttccatcagggcatcgagaacgctgctccgttcgtccgtccgagacatgccaatacgaatgatgacatctcactgatgtacttcacctccggtactaccggtgaacctaaaatggtagcgcatgactttacctatccgttaggtcatatcgttaccggtagcttctggcacaatctggacgagaacagtctccatctcaccattgccgataccggttggggaaaagcagtatggggcaaactctacggacagtggattgccggagcaaacatcttcgtttacgaccatgagaagttcacccccgcagctattctggaaaagatacaagagtatcaggtgacttcactctgtgcacctcctactatcttccgtttccttattcatgaagatctgaccaaatatgatctgtcctcattgcggtattgcaccatcgccggagaagctctgaaccctgccgtattcgagactttcaagaaactgacaggcatcaagctgatggaaggcttcggacagactgagacgacattgacagtagctaccatgccttggatggaaccgaaaccgggaagtatgggattgcccaatccacaatatgacgtggacctgatagacaacgaaggccgctctgtagaagcgggagaacaaggtcagatcgtaatccgcaccagcaaaggcaaacctctcggactcttcaaagaatactatcgcgacgcggaacgtacacacgaagcctggcatgacggcatttactacacaggtgacgttgcatggaaagacgaagacggctatttgtggtttgtaggacgcgcagacgatgtaatcaagagttccggttaccgcatcggtcctttcgaagtagaaagtgctttgatgacacaccctgccgtgatagaatgtgctattaccggagtgcccgacgagattcgcggacaggtagtgaaagcaaccatcgtattgtctaaagactataaggcacgcgccggagaagaattgatcaaagaattgcagaaccatgttaagaaagtcactgcaccttataaatatccgcgtgtgattgagttcgttgacgaactgccaaagacgatcagcggtaagattcgccgtgtggagattcgcaagaacgatgagaaataa

SEQ ID NO: 441 - DNA, 9758 bp, unidentified
  source 1..9758: mol_type = unassigned DNA
ataaacaccagtcaaatcgaagatttgatttgtttacaggacttaaccatatcttatattatcttagaaattcttaattagcaaacaccctgagctaacatggcatcagcacaggtattcagtattcatggggatttcaaacatttttgtatattacgcgtatactactatctcactctgaaataaactaaatccaacttccacaaatttatgtcttgaaaatttacccacctcatactataataaacataaagagaagcaaccgcccacaaagtggttagcctcgtaaatggttatttaataagccactcgtccgccaagacaggagtggcttatttattttcgcttgttgttcctatctatgtaggcaagcagtgcgattagaaatgaaccgcctaaaaataacaggcttaaaacttcatacatatccatcagcaccacctcccctcgatctctagtctgggaggctaccactctgtacacgattacttctcatgccggtagtgtatcacaatttacataaaccgacaatctccatttcaaaattcttgttcaaaataaacgtaatttcattgattaccctgtgctatgtttttaccctattttataaaaatacattttagtcgaatcatccttgtatattatgcaaaaccgtttgtatactacgcgtatattatatgtatattacttgtaacttatctccttctctcatgtataaaccgcttactttactgcattttcatgcatctggcaaaacacaaaaaccctacacttttgcgttttcctgcaatgtgtagggttctcaatttttgaataattatttatttgttgctaatttattagcaaacaccctgtgcaagcatagcatccacaaccttctcaaagcctgcaatatttgcaccggcaacataatctgtctgtccgccgactgttgcattgtatctcttagcggcatcagaaatgttagcgtagattgtctccatgattcctttgagttttccatcaacttcttcgaatgtccagtgaagtctctcagagttctggctcatctctaatgcagatgtagcaacaccaccggcattggcagctttaccacctacaaataatacgccgctctcctgtaagtgttttgttgcctctaatgtagtaggcatgttagcgccctctgttacagatgtaacaccatttgcaactaacatcttagcatcctcaatgtctaactcattctgagttgcacatggaagggctaaatctactttgtactgccatacaccatgctcaccattctgttttgcatgatattctgcagatggttttgcagcagcgtactctgttaaacgtgcacgttttacttcttttacttcttttaataatgcaacatcgattccttccggatcataaatccatcctgtagaatcagaacatgttacaacttttacacctaactgctgtgctttctcaattgcgtagattgcaacgttaccggaaccggaaactgcagcagtcttgccttcaaggctcatgccgtgatctttccataatgcatttgtcaggtataataaaccatatcctgtagcctgtgtacgggcaagagatccaccgtatgtaagtcctttaccggtaagaacaccttcgaaagaaccacggattctcttgaactggccaaacataaatccgatctctcttgcaccagttccgatatcacctgctggtacgtccacatctgctccgatgtatttggaaagttctgtcataaagctctggcagaatgccatgatctctctgtcagatttaccctttggatcaaagtcagaaccacctttaccaccaccgattggaagtgttgtaagggaattcttgaaaatctgttcaaatcctaagaatttgataattccaaggtttacagaaggatgaagtcttaatcctcccttgtatggtccaatggcattgttgaactgtacacgataacctctgtttacctgaacctgtccgttatcgtctacccaaggtacacggaacatgatctgacggtctggttctgtgattctctcaagaattgcattttttctgtacaattcctcatttgcatcaataacaggtcttaaagactctaatacctcttcaacagcctgtaaaaattcaggttctgaagcatttttttcttttacttttgcgagtacttcatcaacgtatcccattttttttctcctttaaaaatatatttacaaccatgtgaaatcagatatccggcattttttaaatgctccggcattgattccggctgcagatttctcatcaacacgtacattttattataaaatgacggcggacgcaatatttttttctttattcctttaatttagtgaagttttctaatgattagtctatttttttgcaggattcgacttcaaattattcattttgcataaaaaaaatcaacgaattttactttttatattttcaggttataattaatatcatttcaacttatagcaaaacaggtcatcgcataaaaaaattgtttttcgatgcaatgacctctgttctttattctttctcacccttgtatacaaggtgaaaataatcggcaagtttcgccagcgcataaatcaggatcggcgtctcctgctcggtaagctggcttttgatctgagcgatcatctcgtgatgaaactcttcatgatgtttgtaagcagctttcccggtgtctgtcagataaacccataccacacgtttatcctgcgtactgcgctcacggataacatacccttttctggtcagtccatccattgcctttgtcaacgttccggttgtgacacccatcagctttgccaccgttgtcatcgtttttggttcattgactccgattgcctcgatcacatggaaatcattgtaactgagatctttgaattcttctgtcacaagacattttccctcaatctccatgatgtctttaaacaatctgaccaataattcgtttaatgtttcatctgttgtcatccgatctactcctatttctgcggtcagcgcctgattttaccagtttatcaccgttgctccccaggtgaggcctgctccaaatcctgccaacacgattttcattcctttcctcatcataccatgattattgacattatcaagcaaaattggcacactcgccgcagaaatattcccacattcctccagattggtcggaaatttttccataggctgaccaagtcttttcgaaactgcttcaatgatcctgtaatttgcctgatgcaacaggaataaatcaatctcttccaaatgtaagcctgcccgttccactgcgtctgtgaccgcctttggcacggtcttcactgcaaacctgtacacctcctgcccattcatggaaacataggaaagtgccatgtcattttttttataagggttgttcacttttctcgccatgcagtttaagacatcgcccctgaacccatccgaaccctgcaccatggataaaatgccatcttcttcacttacagaaagaactgctgcccctgcaccgtccccaaaaagcacgcaggtgctccggtccgtccagtccatcattttcgacagcgtttccgctccaatcacaagcgcatgctgatatcctccatgttctaaatacagcgccgcagtatctagtgcaaaaagaaaaccggaacacgctgcattgatgtcgaacgcaactgcattttctgcaccgatatttttctgcacctcacaggcaagtcccggaagatgtttatctgcagaaacagttgccgcaatgatgatatccacatcttccgctgaaatttctgcatttttcaacgccttgccggctgcttctgtggacatgccggtggttgtctcctctaccgcaatgtgtctggcaataatccctgttctcgaccggatccattcgtccgatgtttccatgatctgaccaagatcatcatttgtcacgcgaagcttcggaaggcagcttcccgttcctgttatttttaccttcataatattcctctcttctctgtccggtcacaaaacgattcgtactctctgtgcacatagcctctgtgattttgctaaaatttccggaatctcgcatagcgctcggacgcaaactgttctcctgtcctgccattttgtttctcaagaaacttttttatatttcctttcagatagcgtgagattgattcacaggcttttgcgtctgccacgccatattccgggatgatctgttcaatgacacccagcgattttaaatccatggccgtgattttcataatctcacttgcctcttttgcacgttttccgtctttccacaaaatggatgcaaatccttccggcgaaagcacacaataggttgcattttccatcatccatacttcatttccgactgctaaggcaagcgctccgccgcttccgccttccccgatcatgatgcagagaaccggtacttttaatgctgacatctcatagagattccgggcgatcgcttccccctgcccacgctcctctgcctccattccgcagtatgctcccgctgtgtttacaaatgtgatcaccgggcgtccgaatttttctgcctgtttcatcagacgtatcgctttccggtatccttccggcgatggcattccataattgtgtttcatgcagtccttaaaatcttttcctttctggattccgatcacggtcacaggctgaccgtcgagatatgcgactccacctacgattgccggatcatcccgaaagtatctgtcaccatggaactccataaattcatcaaaaatattttccatataatcagtagcagaaggtctgtctactttccttgcggcttttaccttttcccacggcgtcagcccttttgcccttgccgcgcgctcccgcattaactctgtcggctcgtagttatcatccatgcgcaatggatcaaaatcagcaaatccttccctgctgtgatgcatttttaaaatacggtttaaggttattttcagatctttccgttcaacaatggcatccacaaatccatgctctaactgaaattccgcacgttgaaatccctccggaagtttttgtccgatcgtctgctcgatcacgcggggacctgcaaaaccgatcaatgcgcccggctctgccaggataatatctccaagcattgcaaaacttgcggtcacacctccggtcgtcggatctgtcaataccggcacatacaaaagtcctgcgtccgaatgtctttttaaagctgcggaagtctttgccatctgcatcagggaaataataccttcctgcattctcgccccaccggagcagcagaacaaaataaccggaagctttaaatctgtcgcccgttccacaccaagcgcaattttttctccgaccacatgtcccatgctgctcatcagaaatctggcatcacagattccaagaaccgtctcttccccatatattttgcatcgtccgatggtcactgcctcatgcagtccggtcttttccctggctgcctccaccttctgggtatattccggaaaatccagtggattttctgattccagatattcaaaccatggttcaaaggttcctgcatctgccaccatgcggatcctgtttttagtccgcacgcggaaatagcttccgcactcatagcagacatacttattcttttccacttccgccttgttcacttctctcttacatgcggggcagaccactgtacttcccggtattttctgctgatccgctgcaggtggtggtgtcataacttccgcctgcacttcctctttgcggtaagttactgcattttttcgttcaggttttatggatatcagctttcttcttctcaaaattgctggcataatatttcctttctgttacagcttctatgtaatgcctttctattctgttactcaactgcaaaggtgagttctgcaatgcatgcaatttcatctccgacttttgccgtcgcttttcccaccccgatcggtcctttcacttttataatttccgtctccagcgtgagaatatctccgggaactacttttcttttaaattttgcagaattgatggacgcaaaataagctgtttttccacggttttcatcttttccaaggattgcgaccgcaccggtctgcgccagtgcctccacgatcagcacccctggcatcaccggttcttccggaaaatgtcctgcaaaaaaaggttcattgaaactgacgcatttcttcgccactgcacggacaccatactcaatttcttctaccgaatcaatgagcagcattggctgtctgtgtggcaggatttccatgatctgactgatgtttaatactgacatcgctgcctccttatctgcagccattgatatctttgtcagatacaatggtatatttttttaatagaatacttgcattatgaccgccaaatccaagggaattgctcagtgcatactgcacctccatcgaaaccggttctttgcaataatcgagatccagttcctcatccggcactttatagccaactgtggcatgaatgtagtcttcctcaatctctttcacacaagtgataaactcgatcgctccggcagctcccagcatatgtccgaccatggattttgtggaattgaccttcatttcaccggcatgcgcaccaaatgcaagtttgatcgcgcgcgtctcaaagagatcgttatggtgcgtggatgttccatgtgcattgatgtaaccgacctcatccactgtgattcctgcatcctgaatagcatttaacatagctcttgctgcgccgctgccatcttctgccggagatgtgatatgatacgcatccgaagaacagccataacccacaacctctgcatatatctttgcgccacggcgttttgcatgctctaattcctctaacacgaccaccgctgcgccctctcccatgacaaagccgctgcgttctttatcaaacggaatggaacatctcttcggatcggtttctgctgtgagtgctgtgagtgacgtaaaaccagcgattgcggtcggacagatacttccctcggttcccccggaaaccataatgtctgcctcaccatactgaatggcacggaatgcctcaccgatcgtattcgttcctgtggcacaggctgtcacaacattgatactttttccttttaatccaaaatgaatggaaacatttcctgctgccatattagagatcatcatgggaacgaataaaggtcccactctccccggtcctttttctatcagccttgtatgttcgcgctcgatcgcctgaaggcttcccacgccgcttccaatggcacagcctgccatatacggatcttcctgatccatttcaagcccggcatcctcaattgcctccttcgctgccgccacggcatactggctgaatagttccatgcgccttgcttcttttgcatccatataattttttgcatcaaactcttttacttctgctgcaagcttacatttataattagtggtgtcgaattttgtaatttcagaaaacccggttttctgtgcttttacgttctgccagaattcatccacactcagtccgatcggtgtgactgctcccattcccgttaccactacgcgtctttttgccatattgttctcctcatgatatatattctttacatgtgcatgccgccgtccacggagatcacctgtccggtgatataatctgccagatccgatgctaaaaatgcagccacaccggccacatctgacacctgccctgtccgctgaagcggaatctgtttttttaccgcttccctggcagcctccggcatcgcctctgtcatctctgtttcgataaatccgggtgccactgcattgcatgtgattcctctcgacgcaagctcccttgccacacttttggtaagaccgatcactccggctttgcttgcactgtaatttgcctgtcctgcattccccatgacaccggaaacagaagaaatattaatgatcttaccggatttctgtttcaggaaataacgtgaagcatggcggatcgtatggaatgcacctttcagattcgtatcaaggaccctgtcaaaatcttcctcactcattttcatgatcagtccatctcttgtgatccctgcattattgaccagaatatcgaggtgtccatagttgtttatgatcatttccatcatttttccgcaggcatcaaaatcagaaacatcacattgtacaggcgctgccattccaccctgttttatgatttcttttacagtctgttctgctgcgtccggcgaactgttataattgacaatgacaaacgctccacatgatgccagtgtctttgcaatctcttttccgattccgcggccggctcctgtgacaagtgccactttatttttcaaagaatctgttaacatgctcccgcctccacatgacttccgataaactgaataaaatcttccattttatcaatgctgctcaattttacatcccggttcacttttttcacaaatccactcaatgttcttcccggtccgatctctacaaattcatccgcaccatctgcaagcagccgctctatggtctgctgccagcgcacagaagaagatacctgactggcaagcaatggtttcacttcctctttttttgtgacatagtctgccgttacatttgcaatataaggaacaaatgaatcactgatctctactttttttaattcttcttttaacttttctcctgcaccctgcagcattttcgaatgaaacgggccgctgactttcaatggaacaatgcgttttgccccagacaccttacatgtttctcctgccagatgcactgcttcctcctgaccggaaatgacgatctgtccagggcagttgtaattggctatggaaacctcgctccctgtctgctctgctgtctctctgcagatctgctcaattgccgctgcatccagtcctagcactgctgccattgctccaccggccgggacagcttcctgcataaaaatgcctcttttccgcaccagttcaaatgcttcctcagcagtcatgactccggatgcgatcaacgcaccatactcaccaagactcaatccggctgtgacatccggctgataaccgttctgttccaatgccatataaattgcagcttccgtagccagcatacagatctgcgtgtactctgtgatatttattttttcgttctcctcaaaacacagtgccgggatatccaatccagtcacctctgaagcaagatcgtacacttctttacaaatagggatctgttcgtaaaattcttttcccatgccaatatattgggatccctgtcccggaaacataaatactgtctttcccatcctgataaccacacctttctcaaatcttcaaatctgcgcatgtcaggtcattttcttcctgtaagcagcgctctggcatctgtgacaacttcctctatgatctcctgacaggtctgctcttttttcacaagtccggcgctctgtcctgccatcagacttccatgaactgcatccccttcgatcaccgctttgcgcagagagccaagtgtcaactgctctaactcctcaaaagaggcaccgtccttttctaatttcagataatctcttgtcatctgatttcgcagtacccggatcggatgcccggtactcatacctgtcacttcagaatcgatgtcttttgctttgataatgcgttccttataattctggtgtacgatcgattcttttgcgaccacaaaccgtgttcccatctgcacaccttccgctcccagcattat

SEQ ID NO: 442 - DNA, 16544 bp, unidentified
  source 1..16544: mol_type = unassigned DNA
atgggaaaaatcagacattattatgtaggggcctgcctgttagtgagtagtgcggcattcgcccaagttccatcgcattcgatgtatgtgaacgaaagtagtaagagtgtgcctttttatgaagcttattctaattggcaaccgggaactcctttattttcagatgcagcagctgaagatgaagaattctttatttctcgtgtgaagcctaaagaacgtttcaccaattcggctacacaagttgatccggaaatgactccggatagaaaactgatctggtggtgtccaatcggtactgctgatggtggggggtggaaatcacttccttcttacttttttgattccgaagtgtttagtatgtggagctatgtggatatttatggtaattggactgctcctatgattcgtatggccggtgcttttactgatatttgccataagaatggcgtaagaacatcgacgctggcttccgtgccttgggcttcaacagttaccgctactgatggtggccatggacaaacaatgaaagctatgatcgatggtggtgcagataaattattgaaatttctgcgttattatggtattgatggaataggttataattcagagtttagtattggtagtggtttaagtgctgatggattgaagacattgttgtctcagtgttttgccaagcgtgaagcagcaaagtggccgtattttacgaatgcatggtactctttgatgacgagcgggggaaccgtagggggaggtgatgcccttagttcttcaaatcaagattggttccactggaatggaaatcctacatccgatgcatattttatgaattataactggggtgcaagtggtttgtctacttctcagagtacagcaaaaagttttgcgggacgttcctcttatgatgtatatggtggtatggactttcaaggcagatctgtggccgattggattgctttgaagaatgctgaaatatctgtaggtatttggggagcacacaatatgaatatgatttttgaaggaagaggtgagttgggatctagtccgttgactaaacaaaaaacgtatcagttgattagtgagaatgtatttacagggtctacttataatcccgtaaatgatttgaaaatccaaaatatattgagacattctaccactgctacagatttccatggattctctaaattcattacggcacgtagtgtattagcttccgatgatttggctgcagagccttttgttacttattttaatttgggtaacggtactttctttaatgtgaaaggtgaaacaacattcaaaaatgaatggtacaatattggtatgcaggattatttacctacatggagatggtggtttactgccaattttatgggaagagatgtgacagatgtgccgagcaaaggtttgaaagcagaatttacttgggacgatgcttggtttggtggttcttgtctttctatagcaggccaaacagatagagaatatcttcatctgtttaaaacacaatattcgctgaaaagtggtgatgtgctgactattcgttataaagttgtcagcggtacaggttctgtagctgttgcatgttctgcagaaggtaaggaaggtacagaagtttcggctactgttggaaataatattacttcaagcaaggaatgggttgcaaagacaattaaagtaggtacgcttcccggtactttgagattgaacaaagagacgcttgctatgctcggtttaagatttgaaaagacatctgcggattttaaagtgttgattggagaaatttcattaacacgttctgatgctctaactccgaatcagccgataattaccaatcagaagttgttggctaccaattataagggattggatttcaaagtgttctttaagatgaaagatcgtgatgctgctcatccggaagatcctatttataatgaagatgtcaatacttggtattataagatttatatccaacaagaaggtggtgaacctgttatgtgtacggctactacttcatgggctgcttatgtagtgagtgctccgtttgatgtaaatggtgataaaaaggttaagttaggagtatcggctgttgctttggacggtaagagtgaatcagaaattgcatggacaggatggttggatacaccggataattcaactgtagaaggtattgaaatcgataaaccggtgattaagagtggtgagacatttgcgattaaatatattgatccgactcatgcaccggctgataagtgggaaattctgaatgcgcagacaggtgttgttgtaaaagacttcccgagttctgtatcacttgaaacagctcttagtgaaattggtatttatgatcttcgtattacttctggggaaaacatagaattacatcaagccttgattcagatttcttctgaagaagtaggggctatgccggaaataaaaacgctgacggccaatgacagcgatagtcccatttcaatagaaaagggtgataaggtaacatataaatatatcggacgtaatgcagatggatatgtttcgcgtggcttaagattaaatgaaattgcttttggagttccagccgatcaattgaattttaatagccagtctccttttaccattgctttttggttcaaaccggctgtatttaatcacataagcgatggtacgcatcttttaaatatacgtgctgctgaagatcgttggcccgatagcgattggggatggctttggactcatatccaagcttcggataataagttatcgtttaatttgaagaaaaaagaatctggagcaggttcggaaactaaaattatagcagaggactttacttttgttcctaatcaatggtatcatttggcagttgttgttgattatcaaaatggacgtaatgtatcgttatatgttaatggtaagctgattaattccggaggtggtataacgaatgtaaaggactggaagaattcttatacgattatggtaggtggtattgctgccaatagagcaggctttgatggatatttagatgaattccaattatataataaagggctgactgctgaagaagtgaaaaagtcaatggagcatcaaactgtaataccggagtcgttgattggctactgggattttgaaactgaaccgaatgagaataatgaaattctcagtacaggaagtaataagactttaaaaggttatatgaccgaaattaagacagtttcccagggtgtgaaccaatatgttccggtagatatcacttatggaacaggtgcaccatttatttctggtagtatctttaaagttgaaactaaaccatcttggaaattagaagaggctcaaattcaaggtgatattacaggaacgggtgaagccggtagtgtagtagcagcttatccttcagaaggtgaattcaacgctattttgacattggagaacggttggggatcagtatccaaaacttatcgttcggtaacagtgacagatggtggagtcggttttgctgataacgaattggaaattgcttataatgcttacccgaatccgtttgtagatgaattgaatattcgttttgcaaacgagggtacatacgctattgaagtatttgatgctgcaggaaaaatgattgatgcaaaagaaactacggtagccgatggcgaaaatatccatttaagtgtaaatggtgctgctggtatttattttattaatataaaacaggatactaagattctaaaagcattgaaagtaataaagaagtaatattaggtattaacctcaatattatatctatattttgatagaaggggagctgttattgttatataatgtaaataataacatatagcagctccttttgttttatcgttttctaaacgtataatttttttgttaaactaaaaaatctattattgaaaatgaaacattacatttctttgatttctattttggttctgatgagtattctaccgctttggggacaatcgggacaatcattggtactgaatggtacggatcaattaatgaaaatcgcttctcatgatgactttaacgtctcggcagaggagagttttaccgttgcgtgttgggtcaaggtaaatcggtggttagatggtcaacggttcgttgcaaaacggagtatgaccggtactcccaaaagtggatatgaattatggggtggacaaagttcaagtaaattttatgcgaataatgctccaaatactgctgggaatcatgataattctatgagtgtatggtctacagaatttggcagtttggatacttgggcgcatgttgcttttgtagtggatagagtaaatggaaaaatgtatctatatcataacggaaagcaggttggaaattccggtataaaagatattggcccgtggtatgtggaaaatgactatgatgttactgtaggaaccggacgagcttctgcaatggaatatgcatattatttgaaaggtgaaattgataatctccgtttttggaaaagagcgttgtcattggaggaaatcaatgcagataaggtagatgaaatgcctgcatcggaaggattggtcgctgcctatgattttgaaaatattgacggattgactgttccggatgtcagtggaaacgggcacaacggagtacttgtgaattatccggttgatggtccttgtaaagtagcttcagcttctgttgtgcaggattctaattttactgggcgtggtaatgaggatgaagtggtgctaaaggcggtgttggatatggaaggaacggatccggttcagtgcaataaacttaccttgaacatggatggaactacaaatgtacaggatgtgaaaagcattaaggtgtattctactggaaatataaatagttttgatgctcgctatgctgctgttaccgctactttattaggcagttgtaagcctgcttccggagagataaattgtgaacttacaggtgaattgacttcgggaaccaattatttatggattacatatgatatagctgataatgcaacagaagggaacaaagttgatgcaaatatagtttctatcactactgcagatgaaacatatgcttttacggaaggttcagttgaaggggaacgtactatcttattgaagcgtaaactgttatttgcacctggggatgccggttcaaagaactatagaattccagcgattattactgctgcagatggttctttggttgttgcaacagacaagcgtaaaaataatcaaggtgacttgcctgaagatattgacgtggttataagaagaagtgaggatggaggtatcacatggtccgaaccgcaaactattgctgaaggaacaggagcacgtagaggatttggcgatgccggtttagtacatacgacggaagaaaatggccttctttgtatttttgtaggtggtgaaggtatttttaataattcatctccttcgaatcctactcgtacttatgtttgtaaaagtacggataatggtaaaacttggagcgcacctcgtgatatcactgagcagctttatggaacggcatgtactgttaccgagagacaggggtggtatgcttctttctgtgcttcgggaaatggattattgacaaaaaatggacggattatgtttgtagctgctgtccgtgagaattcagcaagcactttgtctaattttgtttactattcagatgataatggagagacgtggaatgtttccaaacgagctaaattaggcggtgacgaatctaaagttgtagagttaagtgatggtacaatcctaatgagtattcgtcgtcagagtaaaggtccccgttactatacgaaatcgactgatggaggtattacatggggagaagtatctgagtggactgaaatgcttgaaccgaattgcaatggtgatataattcgatatacttctgttaatgatggctatgagaagaatcgtttattacacagtatacccaatgacgctgctaacagacggaatgtctcagtttttgtgagttatgatgaagggcaaacttggccggttaagaagtcaatttgtcctaccggatcggcatattcttcattgacaattcttcctgacggtactattggagcgtatgtagaagaaaattatgatacagataatatgtctctctatttcaataatttttctttagactggttgactgacggcgcagatatttattatgcagctggagaaacggaagttgttaagtctcctactttttcggctccggaaggggaatatgaaaattctgtagcgattgaattgactactgctactgatggagcatctatctattatacattagatgggaacactccaaacgaacgatctattttgtatgaaggattgattacgattgaagagacaactactgtgaaagcaattgcagtaaaagatggtttggctaacagtgagattgcaaccgctacatatactattactcatccgggagagtattgtatctgggatgaagatgcttatccaagaacaaatacggatcgtgttgttcagtcattgagtgtaagtggggcttcacagggtggcatagctcaagattttactacagtagtggccggaataggtgctaaaactcaaagtaaaataaattttgataatacggcagatgttttaaatgccactatcggtaatgaactgttcttaacggttgctgattttaatctatattggacacattattacgtgtatgtggattataatcagaatggtgtttttgaatcgaacgaggtggtgtcgtatacacattatagtgaagatgatgggacttatcatgatagtaaaggagatgttgttgatgcaggaaaagtacagagagatcttcccagttttataatacccgataatgctaaattaggggaaacgcgtattagatttaaagccgattggaacagtttggatccatgtggagatgcaagtttggctagtaatagaggtacaatctgtgacttcaccattaatattcatgaggctgtgatgggggttgtttcttttgaacaaacagaaggagccacattgcaaataatgaatggagaagaggaagttactaatggtactcgtttgcctttaggtacagtcctttcagtgaatgctgaagtaacttctgatgattatataatacgtgcaattttggtgaatggtgaagaacttgaaagcaatacatttgtgttggcagaagatgccactgtttcattggatattataaaaggtaaacttgtaaattatcaggtggaaggaaatggaatactttctgtatcagataattcatcaaatgagattgcgagtggagcaattgtgtacaaagggtcggttgtagtaataaaagtgactccggatgagaattatcatgtagagagcgttttgataaatggtgatgacaagacagaggaatgtgtatctgatgttggctattctttggtagtaaatgagcatttggatattattgcgaaatttgcaattgattcttattcattgaattattcttgtaatgaagagtttggaaagatgattgtgcaaaaatcgaatggagatgatgtaatttccggagacttaataccttataatgaaaaggtgacatttacacttcaaccggctgttagatgttatgttgcaagtgtaatgattgatggtgaagaaaagatggatgagatattaactaataaatcattctcactgaatattacaaaagagactactgttcaagtggtatatgaagccgagaaatattccttgactttggcaaacgatacgccaaagaaaggtaaactaatggttaaaagactaagtgacgacatcgaattggaggatcagagtgaaattatttatgatgaggaattgcttattgcttggttgcctgaagagggttgtgaattggccgaattatggataaaagaaggtgaagatgatgaatatgatttaattgaggctgggctgctggaagaattaggtgatagtaaagaattttcttatcaagtattcgcaaatgttgctcttcgtgcagtattcagtggtacggtttctattactaatacggaaatagctaatacgacggtctatacaaaagatggaaaattaattgttaaagatggaaaagttggttgtgaagtatttgtctatgatgttttaggtcaggttgtgaaatctttcatcattgagaatgcgttagagacagttcaactgggaacaacatcctctttatatctggtcaagattgttgatggagcagattgtattgtaaaaaaagtaggtaatatgtaaatgtctttttgatgattgtgaagaatatctgctaatacagttggggataactgtagcagattcctgatgatgcattcagttaatcactgcagggtaaatcttgtagtgattttcttttataatagcttaggaatatccctgttcagatgaataaagccggttttgatttggtaatcgaaaccggcttcaatgtagggtatgtgggtttatgaaccttttctgttgtttatgacgcgcatagctgcggtataaaattcgcagggtacggataataaaataccgttagttcctttgtctttcattgaaacttcaatgtaggctgcattgagaaggttttttacgctggttgcttcccacggactaccggtgaaaacgtctacttgggaaatttttctacttgtgatcatctgtttctggtttttgttgtattctgtttgcaaatatagagcatgttttcaagtccaatgacgaatattcgttcaatctttagaagaattgttgcaaacgttagcaatttaggatatgaattgctccaaatttgtctttttcggtgactgttgatattatgagaaaacaaatatccttaaaaaggaaccggttgcagaaatgtagcgattttcattgattcaaagcgcatgtcattcttgcaaccggtttcctgatatttgaaaagtgaagtttaaggtatacttttatttttcatcgtttttccggatttccacacgacgtattttaccactgattgttttcggaagttcatcaacgaattcaatgacacgtggatatttgtatggtgcggtcacttttttcacatggttttgaagttcctttattaggccttcccctgcttgtgctttatattccttggacaaaacgatggtggcttttactacttgtccacgaatttcgtcgggtactccggtaatggcacactccacaacagccggatgggtcattaacgcactttccacttcgaacggaccgatgcgatagccggaacttttaatgacatcgtcggcacggcctacaaaccatagataaccgtcctcgtctttccaggccacatcaccggtataataaataccgttgttccacgcttcatgggtacgggcagcgtcacgataatactccttgaaaagtcctaatggctttcctctgtttgtacggataacgatttgcccttgctcgccggcttctaccgaacgtccgtcgtggtcgatcagatccacatcatattgcgggttagggactcccatgcttcccggtttcggttccatccaaggaaaagtagctacggtcagtgttgtttctgtctgtccgaatccttccattagtttgatgcctgtcagcttcttgaaagtgtcgaatacggcgggattcagtgcttcaccggcaattgtacaatattgcaatgaagaaagatcatatttggtcagatcttcatgaataagaaagcggaagatggtaggtggtgcacagagagacgtgacgtggtaatcttgtatctttgttaggatgtcacccggggtgaatttttcatgatcgtatacaaatatgttagctccggcaatccattgtccatataactttccccatacggctttcccccaacctgtatcggctatggtgaggtggagactttttggggtaaggttgtgccagaaactacctgtaacgatatggcctaacggataagtaaaatcatgtgctaccattttaggctcgccggtagtgccggaagtgaaatacatcagtgaaatgtcatcgttcgtattcggatgttcaggttttacgaacggggctgctccttggatacctttatggaaatcttcaaatccttcagggatctcgggccctacgctgacaagtttatgtacagtcgggcaatcgggcatagcttcgatgatatgtttggtgatcacttcttcgccggcggcaacgatcattttaatatctgcggcattgcagcgatatacgatatcttttttagttaataggtgagttgcggggattaccgtagctcccagtttgtgtaacgctatgatactgaaccaaaattcataccggcgttttagaatcaacattaccatatcgccgcgtccaattcccaatgactggaaataagaggccgttatgtctgtataatgcttcatatcggcaaatgtgaactgcacatgctcgcctttatcgttcgtccacagtaatgcagacttatttggctcttcggcagcccaagcatctactatatcatatccgaagttaaagttttcgggtacgttaatcttaagatttttgataaaatcctcctgtgaggagaatgttgtttgtgataagaatctttctaccataattaatattacatgatgacggcaaggaaacgtactgtttttccatcgagtgctttcatgccgtgtgggagttttgagttgaaataaagactgtcaccttcgttcagtatcagttctttgccttcgatattaatcagcatacgtccttcaagtaccaagttgaattcttggccggtatggctgttgtaatgtatcggttcgttatccggtttcggttcaacggttacgatgaacggatcagcgctccgattgataaatcctgctgctaatgattggtatttgtatgctctggtacgttcgatacttgttcctttcccggcgcgggttaaaaaataactgctcattttgggctcttcaccaaacatgagtgcatccagggcgataccatacttacgtgctatcttttgcagcatacttactgaaatatcatattctcctgtttctgccaaacggtattcttcggcagagatatcacaatcgcgggcaatgtcttctgctgtaagttccagtacatcacgcaatccgcgtagtcgttcggctatttgcttaattttatcatccatgtatttaatgaattaatgtgtaaatgttaatagtttgttggggtgttttcatgctcgtaataattcttaatggagtttgagttctcatttttattcttggcattatttagaggccttcattgcttttattattgccgaggtaaatccggcatgttccaattcgttgatacctttaattgtgattccaccgggtgttgtcactttgtcgatctcaacactgggatgcgtatctttgtttaacaacaattcagccccgcctattagtgtttgtgcaaccattttcataccgtccttaggtgcgattcccatttcgatacctgcctgcatggcggcctgtacatatttcagcacataggcaataccacatgaagtcagcgcagttgctgctgctattttactttccgatatcatcatggtcagtcccatctcgtcgaacatatcagttaataatttcttttgtttatctgaagcattgcgagcggctataagagtcatgctggcacgttcggcaatggcggtattgggaataacacggaaaatcggcatttccggctcaccacaaaaatgcgctaaatcgtcgaaacaaataccggcggctaaagacacgagtatctgtgtgcgtttcaaacggagtggttcgagtacctcctctattaaccaaggttttacagcagcgattacaatgtcggcattgcttgctgcatccatattgttgttcgttgttttaatgttgggaaagtcggcttttagtttctccaatttcccattcgttgggttggacacaacaatttcatgtccttgaaccaaatatccctgggctaaaccgcgtgcaatggcagagcccatatttcctgcaccaatgatagctactttcataatttgatgttatttagtacgttggagacaaaggtaaatgtaaaaagtgaaaattcgaataattgtggcaggtatttttcttgtggaaaattgattttatgaatttatatgctaattttgttcggtaattataggaataccagtgacttataagataagagtgtatgcttttcctacataagagtctatactttattttgagaggtcgtttcgtttgaaaggacagtaggaaggttgtttttccggatataaaataaatgccggtataatctctgaatagaagacgatataccggcatttttattgttaaagtactttcttgaatctgatgaggaattcatctgcttctgctttgctgaggcagagagggggtaatagtcggataacatttgttccactggctccggtgaatactttctgttcatggatgagacggctgcgaatttcttttaccggctgttcgaactccatgccaatcataagtccgcatccgcgtacttctttgatttgtgggaattttttcaattcttccaataagtaagcaccgatgttggctgcattttcgatcagacgatcttgctcaatgacgtccataactgctaatgccgcagcacaggccaagtgatttcctccgaaagtcgttcctaacataccgtaaaccggtttgaacatcgggctgatgagtacaccggccattggaaaaccattggcgatacctttggctactgtgataatgtcgggtttgatccctgcatattggtgcgcaaaaaatctaccgctacgtccgtagccactttgaatttcatcaaggataaatacggtcccattctctgtacatgccttacgtagctcttgcaagaattctgcagtcggtattttaatacctcctactccctgaataccttcgatgataacagcacagacatctcctttggccagttcggctttcattgcttccgtatcgttcagaggaagataagtgatatgtccgttcgcattgatgggagcgataattttaggattatcggtcgcttctacagccagtgaagtacgtccgtggaaagctttggagaaagaaatcactttggtccgtccggtatggaaagaggccagtttcaaggcattttcgtttgcttccgcaccactgttgatcaggaatagtgagtaatcgtcataaccggaaatctttcccaagcgtgcagccacttcctgttgcagcttgttgataaccgagttggaataaaagccgagttttgccacttggctgctaatcatctctatatagtgcggatgggcatgtccgatggagataacggcatggcctccgtagaggtcgagatattctgttccgttttcatcccatacatggcaaccttttccttttactatgtttatgtcgaataaaggatatacatcgaataggttcatgatgatatttacgattttatgatttacaattagacgattggagttactactattaattttacgatttacaattgaagtaactccaatcgtctaattgtaaatcgtccaatcgtcaatctaaaaagccgatggctttaaccggagacctaccgtctcttccagattgaacatcaggttcatattgtgtactgcttgtccgctggcacctttcaacaggttgtcgatgcatgagataataagcagcttatctccgtgtttctccagatgtatcaggcatttgttggtgttgaccacttgtttgagatcgatgtttttgtctacgatgtgtacaaatgagtcttttgcgtaatattcctcatacatgcgtacgatttcttccaatgctactttggtttttaccactaatgtggcaaagataccccgtggaaaatcaccccggtaagggataaaatcaatctcagagtcgaaactgttttgaagttgtttcagcgattgtttgatttcgggtacatgttggtggtcaaaggctttgtacacactcatgttgttattacgccaactgaaatgactggtggcactaggttttactcccgctcccgtgcttcctgtgatagcatttaccatgatgtcgtcattcagtatcaagtgtttggccaatggaagaagtcctaattggatgcaggttgcaaaacatcccggattggctacatgcttggccgtacaggtggcacgacggttcaattctggcaatccgtagatgaagtcatgatccggtgatgcgatacgataatccattgaaagatcgataattttcagatcttccggtatattatggctttcgataaatttctttgtatcgccgtgggcggtacaaaagaaaagtacgtcgatttcttccagaggaagtgcatcggtaaaagtcagatcacattctccgtagagtccttcgtgtacatcggtaatcttattaccggcattactgctgctgttgataaatactatttctgtctcggggtgattgataagtaggcggataagttcacccgccgtatatcctgctccaccaataattcctgcttttatcataatagttgaaagcttatttagttgaaagttgaaagttgagaattgaaaattgggagttgaaagctggcttgcactattgaactgcatagtagctttcaactctcaactttcaactaaacctcgtggtttgcataataaacgcgtagcggagtggaagttactttgataaatcctttcgcgtcttccgcagtccagcctttctgcatttcgccatattcgccaaatttagtttttactaaatcatcttcagattctacgcctacggtagagaaagacaatgggcggagttcaagaattgccgtaccgtttacattgcgctgcgactcctgcagcatggcttcgatgtcgcgcattacaggttccaggtactggctttcgtggaggaacataccataccagttggctacttgatctttccagtattgttgccatttgctcagcgtatatttttcgaggaagcggtgtgcaccgataatcaacatcggagcggctgcttcaaaacctacgcgacctttaataccgatgattgtatcgcccacatgcatgtcgcgtccaataccgtaaggagcgccaatcttttctaccttctggatggcggcaattttgtcttcaaaaacttctccgtttacggcatgaagttctccctgtttaaattcaagacgtaactgttcgcttccttccttctgcacctgtttcaagtatgctgtttcgggtagcccctgtgccgagtcgagaatttcgccgccacagatggaagtaccccacaatccgacattataggaatatttcagtttggtaaagtctgcactgaaaccgtttttattcaagtagtctatttcttcctgacggctcaatgccatgtcacgggtcaatgtgatgatttccacacccggagccagtacaaggaaagtcatgtcaaaacgaatctgatcgttgccggcaccggtggaaccatgggcgatggcatccgcaccgatttcgttggcataacgtgcgatagccaatgcttggaatatacgttccgaactgacggaaataggataagtaccgttacgcagtacgtttccgaatatcatgtatttcaagcttttctcgtagtattcttgggtcacgtccagtgtaacgtatttcacagctcctaacttgtatgcgttttcttcattctgtttcaactgttcatcgctgaaaccacccgtgttggcacaagccgcatacacctcataacctttctccttagccagatacattacggtaaacgaggtatctaatcccccgctgaatgcaactaccactttctttttctgttccatgatcttaataattagttaatgccccgattgttctattgacgatgcggtacattatattattttaattcttttctttctctattaattggcatattggcacattgaccaatcggcacattattcttcttctttatgtttctccggatcgtaaagcattgccgtacaaatacagaatttccggtttttggctaccaatatatcatggttgatacaaccttcgcagccgcgccagaatgcttcgtcatccgtcagttcgttgaacgtgacgggtacataaccgagttccgtattcattttcataacggcggcaccactggtcagactgaatattttggcccatggccaacgcaggcgggcgagtttgaaagaagcttgtttgatacgttttgccagtcccaaaccgcgatagtctgggtgtacgatcaatcccgatgtcgctacatattgtttattaccccacgattctatataagtgaagcctgcaaatttatctccctccagggcgataatggctttcccttctttcatcttggttgcaacatattcgtgtgtacgttctgcaattcctgtcccgcgtactttcgctgcatttctgattgtctccaaaatagtgtcaacgtaaacctcatgtgaggcgtcggctaccatcacatctattttttgagtctccat

SEQ ID NO: 443 - DNA, 12504 bp, unidentified
  source 1..12504: mol_type = unassigned DNA
atgagcaaaaagaattatgtggtcatggacggcaataccgccgccgcccattctgcctatgcctttaccgaggtggcggcgatctatcccatcacgccgtcctcccccatggcggagaaggtggatgagtggtccgccaaggggaaaaagaacctgttcggcacgccggtggacgtgatccagatgcagtccgaggccggcgctgccggcacctgccacggctccctgcaggcgggtgccctgaccaccacctttacctcctcacagggcttgatgctgatgatcccggctatgtacgccatgggcggacagttcctccccagcgtgatgcacatcgcatcccgtgttgtcaccagcaaccatcactccattttcggcgaccatacggactttatgacctgccgcaccaccggctacgccatgctgatgtccgcctccccccaggaggccatggatctggcggcggtggcgcacctgtccgccatcaaagcgaagtacgccttcatgcactgctttgacggcttccgcacctcccacgagatgcagcgcatcgaggcgctggactatgaggagctgcggggtctgatcgactacgaggcgctgaaggccttccgccgggatgctctgaatccggagcatcccaccaaccgcggcaacaacgtcaaccccgacgtgtacttccagtgcaaggaaggcgctaacgtcaagagtgccatcgtgcccggtaccgtgcagcactacatggacgagatcaataaaatcaccggccgggactacaagctgttcaattactacggcgcgcccgacgccgaggaggtcgtggtggccatgtgctccgtcaccgaggcactgcgggagacagtggactacctcaacgcctgcggacgcaaggtgggcatggtgcagatccatctgtaccgccccttctccgtgcccgatttctccgccgccatccccgccagctgcaagcgcatcgccgtgctggatcgcagcaaggagaccggctccgtgggtgaacctgtgtatctggacgtggtcacggcgctgaatcagaccggacgcggcgacatccgcgtggtgggcggccgctacggtctgtccagcaaggacaccactcccggccagctgatcgccgtatatgacaacctgcggcaggagacaccaaaaaacaactttaccatcggcatcaacgacgatgtgacccacacctctctgacctatgagaacgtggagttcccccatcccggcgagatctcctgcaagatctggggtctgggcggcgacggcaccgtgggcgccaacaagaacgccatttccaccatcggcctggtggctgacaagtatgcccaggcgtatttctcctacgactccatgaaatccggcggcctgacccagagccatctgcgcttcggcgacatgcccatccgcagcacctatctggtgtcctccgccgactttgtggcctgccacgcgccgacatatgtcaagaagtacgacctgaccgaggatctgaaggacggcggcacgttcctgctgaactgcccgtggacgacggaggaactggaggagcacctccccgccaagatgaaacgggatctggcgcggaagcacgcgcagttctatatcattgacgcggcgaagctggcggcggagatcggcctgggcaagcacaccaacaatatcctgcagggcgcgttcttcgccctgaccaaggtcatccccatggatgtggctgtggcggatatgaagaagaacaactacgccacctatttcaagaaggccgggcagaagatcgtggacctgaacgacaaggccgtggatgtgggcgtaaacgccgccgtgaaggtggacattcccgcggcgtgggcggacgcgcaggacgcacctgccgccgagatcagcgccacgccctttgtccgcgacatcgtactgcccatggatcggcagcagggcgacaagctgcccgtgtccgtgttccagaagcacggcgtgctggacggcacgtgggagaacggcacctccgcctattccaagcgcggtgtggccaccgctgtacccaagtgggacgccgcggcctgcatccagtgcaaccgctgcgccatgagctgtccccacgcggccatccgcccggtgctgctgaccgaggaggaaaaggcacaggtgcccgccggatttgtcaccgcgcccgccaagggtctgggcaaggacgctccggcgtatgccttccggatgcagatatcgccctacgattgcctgggctgcggcgtgtgcctgacagcctgccccgccaagggcgcgctgaccatggctcccttcgaggagatgaaggccgagcagccgctgttcgatcaggtggctatggacgagaagtacctgaagaaggatgtcatcagcgacaagagcgtgaagagcgcccagttcgccaagccctacttccagttctccgccgcctgcgctggctgcgcggagacgacatatatcaagcttttgagccagctgttcggcgaccacatgtatgtgggcaacgccgcgggctgctcctccgccatcagcggcggcgcgcctatcctgccctattgcaaggactgccggggtcacggccccgcgtgggagcactccctgtttgaggacaacgccgagtttgcctacggcttcttccacgcgcaggacgccatccgtaaggagctgctgctccgtctggacgccatcaagtccgcgggtattgcctcggaagcggcggaggcctaccagaacgggtggaataagcacgagagctcccgtgccgtcacagacgcgctgctggccgcgctggaaaaggcccagcagacggaggacgtgaaatacatccttgagaacagagcctatctgtccaagaagtccatctgggctgtgggcggcgacggctgggcgtatgacatcggcttcggcggcatcgaccatgtgatggcgcagaaccgtgacgtgaacctgctggtgctggacaccgaggtgtactccaacaccggcggacaggcatccaaggccacgcccaccagtgccaccgccaaatttgccgccggcggcaagcaggtggcaaagaaggatctgggcggcatcctgatgcagtacggctatgtgtatgtggcgcaggtggccatgggcgccgatcaggcccaaacactgaaagccctgcgggaggccgagtcctatgacggcccctccatcgtcatctgctactgcccctgcctggagcagcacatcaaggctggcatgagcaattcgcagctggaaatgaagaaggccgtggagtgcggctactggcacctgtaccgctatgatccccgccggatcgcggagggcaagaaccccttccagctggattccccggagcctgacacggacaagctcatggacttcctcatgggcgagaaccgcttcgcctccctgaagaacaacttcccggagaaggccgacgccctctacgccaaggagatcgccgacgtaaaggcgcgctacgccaagtacaagaagatggcgcaggactgagcgccgcctggcgctgatatctcatgcgctgcgggggaaccgcctgaccgcaggcggctcccccttttcaacgattcccttccctgcacagaaaggagacatgtacgatgtaccaaacgatacgctgcgaaaagcaagatggcatcgccatcgtgaccattgaccggcctgaggcgctgaatgccctgaacagcaccgtcatcgcggagctggagcaggtggtgacggcactggagagcgaccgcgacgtccgctgcatgatcctcaccggcgagggccgctccttcgtggccggcgccgacatcggcgcccagtatccgctggatctggacggcggccgccgctggggtcagcggggcagcgcccttatgcgccgcatcgaaaagctggagttccccaccatcgccgcggtcaacggcttcgctctgggcggcggctgtgagctggccctcagctgcgacatcattctggcctccgagaaggccaagttcggccagcctgaggtaggtctgggcattacccccggcttctccggcacccagcgcctgccccgccgtgtaggtgtggccaaggccaaggagctgatcttctccggcaagatgatcaaggccgacgaggccaaggagatcggccttgtcaacgccgtctacgcccccgaagccctgatggacagtgcgctggagatggccaagtccttcaccaagaacgcccccatcgctgtgaagtacgccaaggcctgcatcgaccggggtatgcagatggacattgacgacggcatcgccgtagagaacgagctgttcgccatgtgcttcgccaccgccgaccagaaggagggcatgggcgcgttcctggagaagcgtcccgccaactttcagaacgggtaaattgcgttatgaagctgaatcaagatgagatcaaaacgatcctgccgcaccgtgagccgatgcttctggtgacatcggtagaagatttgatccccggagaggatatccgcgccgcctttttcgcggatcctaaaatggacatctttctcggacacttcccggaagagccgatactgccgggcgtatactctatagaatgtatggcgcaggcggtggatatcctgctgatgtcaacactgcgctacgctggaaaaacgccgctccttttaggcgttgacaaggtgagtttccgaaaaaagatcctgccgggagacacccttgaaatccatgcaaatattatttccgagaaaagagaaaaagccatcgtcacttgcgctgctgaagtgtatgttcatcaggaatgggcagccaacggcgatataacaatagctatgcggtaaatttaaggaggaaacgaaaatggcattgatgaccgcgaaggagtacatcgactccctgcgtaagctgaacacccgtgtctacatgtttggcgagaagatcgacaactgggtggatcaccccatgatccgcccctccatcaactgcgtggccatgacctacgcgctagcccaggatccccagtatgaggatctgatgaccgccacctccagcctaaccggccacaaaatcaaccgctttacccacctccaccagtccagcgaggatctggtgaaaaaggtaaagatgcagcgactgctgggtcagaagacggctagctgcttccagcgctgcgtgggcatggacgccttcaacgccgtctattcctccacctacgagatcgatgagaagtacggcacccactaccacgagaatttcaagaagttcctcatctacgtgcaggacaacgacctgacggtggacggcgccatgaccgaccccaagggcgaccgcagcaaggctccccatgagcaggccgatcccgatatgtacgtccacgtggtggagcgtcgccccgacggcatcgtggtctgcggcgccaagtgccaccagaccggctccatcaactcccactggcatatctttatgcccaccatcgccatgggcgaggcggacaaggactatgccgtgtccttcgcctgccccaccgacgccgagggcctgtatatgatctacggccgccagtcctgcgacacccgcaagatggaggagggctgcatcgacgtgggcaacgccaagttcggcggacaggaggctctggtggttctggatcacgtctttatccccaacgagtacatcttcctcaacggcgaatatgagttcgccggcaccatcgtggagcgcttcgccggttatcaccgccagagctacggcggctgcaaggtaggcgtaggcgacgtggtcatcggcgcggcggcgctggctgccgagtacaacggcgtggagaaggccagcgctgtcaaggacaagctcatcgagatgacccacctcaacgagaccctgtactcctgcggcatcgcctgctcctgcgagggctgccccaccaaggcgggcaactatcagatcgacctgctgctggccaacgtctgcaagcagaacgtcacccgcttcccctatgagatcgtgcgtcttgctgaggacatcgcgggcggcctgatggtcaccatgcccagcgagacggacttcaagtccgacaccgtggtgggtaacaacggcgagaccatcggcgagatctgcaacaagtacttcgccgcccgcgagggcgtcagcactgaggatcgccagcggatcatgcgcttcctggaaaatatgtgtctgggtgctgccgctgtgggctaccgcacggagtctatgcacggcgcaggctctccccaggcgcagcgcatcatgatcgcccgtcaggggaatattcaggagaagaaaaagctggcaaagaacattgccggtatccagaagtgagagggcggcatggataagaagcaagcatggctccagctggtgcgggagaagtccgagcactatctgaatctgcacgacggcggctttgacgagaaaatgcgggcgcgtctggtgggctgcgattacgaggcgcagactgtcacctacgccttccccacccaggactggcagatcaacgagaagggcggcatccacggcggcgctatcgccgggatgttcgatacggccttcggcgtggtagccaacttcaccgccggagacaacgaggccaccaccacggacatgacggtgtccttcctgcggggcgtggatttcggcatggagctgcacctgacggtgttcatcgtcaaggcggggcgcagccttatccgccagcgggcggagctgaccgatgccgccaccggcaaactgctggccaccgccagcggcagttggatgccgctgtgaccacattatacttaggacaaaacaaggagaacaaatatggatttcaatctcagccgtgagcatcagctgatccgcaagatgatggcggagtttacggaaaaggaagtcaagcccattacggcggagaccgaccgcacctgcgagtatccccgcgagaacatcgagaagctgtttaatctgggcgtcatgggtatgtgcgtccccaaggagtacggcggcgcgggcgccgatccgctggccagtgccatctgcatcgaggagctgagcaagcagtgcgcctccaccggcgacatcgtggccacccacaacggcctgtgctgcgatcctatcatgacctacggcaccgctgagcagaaggccaagtatctgcccatgctgaccaagggtcaccatgtgggcgccttcgccctgacggagcccaacgccggcagcgacgcctccaagggtcagaccgaggccaagctggagggcgaccactatgtgatgaacggcagcaagatattcatcaccaacggctatgtggccgacgtgttcgtggtgttcgccatgaccgacaagagtcgcggtaccaagggcatctctgcctttattgtggagagcagcttccccggtttctccgtgggtaagcacgaggaaaagctgggtctccacggcagccccaccgccgagatcgtgttccaggactgcatcgttcccaaggagaatctgctgggcgtagagggcaagggcttctccatcgccatggcgaccctggacggcggccgtatcggcatcgctgcccagtccctaggcatcgccgagggcgcgctggccgaggccatcaactacaccaaggggcgtgtccagttcggcaagcccatcagcaagttccagaacacccagttcacgctggctgacatggagctgggctgcgaggcgggccgcctgctgacgtatcaggccgccgtggccaagggcgagggcaagcgctacaccaagctggccgccatggccaagctgttcacctccgagcacgccatgaagaccaccaccaaggtggtgcagctcttcggcggctatggctacaccaaggattacccggtagagcgtatgatgcgggatgccaagatcacggaaatttacgagggcacctccgaggtgcagcgcatcgtgatctccgccaacatgggtctgtaagaggagggaatagacaatgaagattctggttaccgtaaaacaagttcccgacacctccggcaaagtcgccgtaaatcccgatggtactcttgaccgtgcgtccatgcagaccatcatcaaccccgatgacctgaacgctgtcgaggccgctctggctctgaaggacgagctgggctgcaaggtcgtggcgttcaccatgggtcctcctcccgccgagggcatgctgcgtgagctgatggccatgggcgtggacgaaggcgttctggtcaccgcccgtgagttcggcggctccgacacctacgctacctcccagatcattgccgccgctatcgatacctacggcatcgagaaggacgacatcatcctggctggccgtcaggccatcgacggtgataccgctcaggtgggtccgcagatcgctgagaagctgcatctgccccaggtcacctatgccggcgagatcaccaaggacggcgacaccctgaccgtgaagcgcatgctggaggacggctacatgaccatcaaggtcaagaccccctgcatgatcacctgcatcaaggagctgaacaccccgcgttacctgtccgtgggcggcgcgttcgagtgctacagcaagcctctggtcaccatgacctatgagaccctgaaggatcaccccctgatcgacaagagcaccatcggtctggccggttctcccaccaacattctgacctccttcacgcctcctcagaagggcgcgggcatgatgctcgagggcgctgacaaggctaccaccgacaagctggcaggcatcctggccgccaagcacatcatctaaggaaggagaaaagaaaatggcttttaatagtgctgataccgctgccttcaagaacgtatgggtgttctgcgagcagcgtcagggcgtgatgatgcccaccaccttcgaactgatctccgagggccggaagctggccaatgagctgggtgtcgagctgtgcggcatcctgctgggcgacaacgttgacggcatcgccgccgagctgggcgagtacggcgccgacaaggtgtacgtgtacaactcccccctgctgaaggactttaccaccgatgcctacaccaaggtgatcgtggaggccgttgaggagctgaagcccgaggtgctgctgttcggcgcctccaacatcggccgtgacctggccccccgctgcgcggctcgcctgcacaccggtctgtgcgcggactgcacccacctggacatcgacatgcccaactacaagggcttcctgcgcgaagcttctaccctgcccgaggagcgcatcgagaagctgggcaccgtgatgatcaaccgtgagccccacgatgtgtcccgcgacctgaagatgacccgtcccgctttcggcggtcacctgatggcctccatcatctgcccccgcttccgccccgctatggcgaccgttcgccccggcgttatgaagaagcgcgagtgcaagaagaacgtggagatcctgcatcccgcttttgagctggctgccgctgacatcaagaccgaggtcgtggataccgtcaaggccgccaagaagctggttgacctgatcggcgctgacttcatcgtgtccgttggccgtggtatctccaaggacgtggagggcggcatcaagctggccgaggagctggctgaggtcctgggcggcgtcgtgggttcctcccgcgcctgcgtggacgccggctggatctccgctgaccatcaggtcggccagaccggtaagaccgtccatcccaaggtctacatcgcactgggcatctccggcgccatccagcacaaggccggcatgcaggattccgagtgcatcatcgccgtgaacaagaacgacaccgctcccatcttcgaggtggctgactacggtatcgtgggcgacctgttcaaggtcgttcccgagctgatcgagtccatcaaggctgccaaggccgccaagtaactacgcttttttccttctctccttacattgcggattcactccaagacccgcgggcaggcccctcctacatcacatccaatacatcccatctttcatctcggcgaaccatggtttatggaaagcttgctcatctctacctgtaccaattttagcgactttcagcctgctccgggtctggagcatctgcaaccggcagtatgctttgagtagaaaaattttattagtgcttcgaggcgaagcataatctctatgagtttgatgtaggcaatgagtccggatggatgtacaaggtcaacggctggttccccaactacggctgttcccgctatcaggtagaagacggcgacgtgatctgctgggtctacacctgcgatttgggtgcggacgtaggtgataactctatgaacggttgagatcgtcagatgcggcttgctttagaaaaagagggagatgggactttggcactgataaccaaagccccatctccctctttgcaaagcagttttgacagcctcaacagaaagcgaatggttatttttcggtggcatgcaagtttaccactgaatgcatagaccttccctacgcggcattaattagatttaccagatattggatggtgttatgtgtcgggcttttttaggctgtaaagagctgctccagagtacagcttgagaacttgtagtggggcaaacggccagtgactatgcggaatgcagcggctatgactgcctgcgccggacattacgcagttcttcacacgcaggaggtcactggttcgagtccagcagtctccaccaaaaagttcctgatttcgcaagaaatcagggacttttttgcatttatgccctcaaataatgacgcggcattttggcgtttttcgcatgacccaaaccgtgacccaaaagccgagaggtcaggaaagcgccggagaggggcggatggcatcatccgtccctctctgtctgttttttgtgggctacatggtctggctgatgacgctgccgatggccttcaggatcttctcatgggtgtgccggaaggagtccggatcgaacatggtgccggtcttgggcgacacaaacaggtagggactgtgtggatgctttgcgtgttcctccaccggcaagaataccggcagcctgaccgacatccaaaaaccaagctgtgatccacctaagaccagtaaccaccaagggagggacttccgtccctcccttggtggttgtccagcagtttgccgcaatcggggcgggcttatgccggcaggttgatatgaccgattttatccagcgcagagagatcaacgctttccacatacgctttgatctcgtcatcgccgagagagtcacccggctgagaaaccaggctgataaatgcgttctcgccgttgtaaaggacaataaactgatggttgccggagtaaacagacactgtctcgccacgcgcggtggtatacgaccattcatggtattcatgggcatcatccagagaaaggcagtcgatgctcatgctccccttcacccgacggtttatggcgatggtgcagaagcgttcctcctcgccgcccgtacgccaatcatccccgaaggagaaggagccgtcgttccatacccgataatcggggacgccctgccgtgacgggctttccagcgtcaaaaagccatcgctgccgatgatctcgcaaaagctcgtatatccggagccttcgtatagagcgtcccacggcttgagatcgtatttctcgctgatctcaaggaacttgttgaccagtgtttcggtgtaaagaccgttgtagacccttcgatgggcttcgccccagtcgcccagaggctggtgcagcgcatctccgttatagccgtttgcttcgtaggcgctgaggaaggcgttgaactcgcgggaggcctcgtattcgggggagccgatgcagccctgcatgctgatggtcattccgtcagccagctttttgcctgcatattcaccgttcacatagttgtcggaaacgatctggctgcccatcacagcgtctctgataccaaacagattcaccgcgtaggcccctgcgcacatggcgcacaaaagcgctatgacagccgccaccagtaccgatcttctgacagttctctttttgtgaatcgtatagttttccatgttcataatctccttttcggcatcagatgcctcaaccgtctgcatcaggtcgatggcatccagtataaacttcggatcaatattgttgaacccggacagaaagtcaaacgatgtcatagcaatccctccttagataaatatagccgtaatttctgcctggttcggaaaagtgaggtttttactttgctttgtgaacacttgaacctcaaggcaatgtccgctatggaagcaaagaaccagtagcgacacacaaagatatttcggtcgtctgctgagagtgtgcaaagaaattgattgaccgccgcggcaaactccttcctctcgcattccgcttccacggaatcaccggaagcgatggtgtccttcagctcgtccaatacaagatcaaactcaccgccgccgcgtttccgggcgtactgctcccgcaacttcat

SEQ ID NO: 444 - DNA, 7831 bp, unidentified
  source 1..7831: mol_type = unassigned DNA
tcagccattgtatgcctccttaatcactttttcaaatttatcttcgcctacgcgctcgatcgtaaattggaaacgctcgcttggatttgcattgtcatcaaagaactggatcgctgcatccgttacgcggaacaatgtctcttcgtccttgatcaccggcacgacttcttctcctttgtgaatgcggtttccgaaaagtccaccgaaggatacgagatatcctgtcgtcacatcccaggcatcggttggacacgctttggcgcatcttccgcagtagttacacttactttcttccactttgatctttccgtcttccagtttgatcgcatcggtgcggcacgcttttacacacacaccacactggatacaggcatcctctttccattttacgatagaggcacctttcactccgacatcgttttcctcggacttcaaacagttattctggcatccggtgacaccaaatttgaatttatgaggaagctctcttgcaaaatatctctcgtccagtttctgagcgatatcgtaggaatcaatgtttccacttggacagatctgatttccctgacaggctgtgacagtacgtacacgtgggccgcagacacccggcttacaatcgcctttctccagttctgctttcacttcatcgatctgatccagtttgataaatgggatctctacgccctgtctggatgtcagatgtacatgtccgtctccatatttttctgccacttccgcaatcttagccagctgctttgctgtcagatttcctcctaccactgccagtcgcagggaaaagttatttttttgtttctggcgcatgaatccgccttttttcagtgtagcataatctactgccataattcacttcctccttatttcttctcaatcgcgtatttaaaatcttcgatgatatcctgaatatcttcaatgccgacgctgattcggatcaggtcgtcaaatactccggcatcttctttctctttttccgtgctgtgcgcattcagcgtcgattcgggatgaatgatcagggactttgtatctccgatattggagacaatttttggtaattttaaatcattcataatctggaaagcacgttctttgcttccgacccggatcgtaagtatcgcgccatagccatgttccagagttttttctgcagtctcgtgccatgggctgtctggcaatgccggataatttactttgatgtccggatactgcgtcaaaaactcggctaacttttcggcattgaaacaggcacgctccatgcggagtccgagtgtttcaagccccagcatattgtaaaatgctgtctgtggtgccatgcaggcaccggtatttcgaaacaagccatttctgagtttcgcggtaaatgcaaattttccaaattttgcatattctttcatgccgggatatttttctttatcccatttgaagtttccgctgtcggtgatcacaccgctgatggcatcgctgtttccatttacatatttcgatgtcgaattgacgacgatgtcggcaccaagttcgagtgggcggacaagatacgcggttgcgaccgtgttgtccatcacaagcggaagtccgttctcatgtgccatctccgccagctcgcggatgtctacgacatccagtttcggatttccaatcgtctcggcaaagatcactcttgtcttgtcattgatcgctgctttgactgcctcttcgtcatgaatatcgacaaatacggttttgatcccaaatgcctcaaaatcatgaaagacatcgatggaacctccgtataaactcgtgcttgccagaatttcctctccggcattcacgatattaagtaaggcattgaagatggctgccattccggaagcacaggcgatcgaagaaagtccattctccaatgctgtcatccggttttcaaaggctgtgatcgtcggattattcaatcttgtatacgaaaatccgtttgccttattatgaaacaatttttcatgctgttctgcagacgtctgatagaaggcgctggattggtagattggcgtgagcgtcgctccggtcgcctcatctcccatttttccactgtgcaaaagtgctgtgttgaatctcatacgttccctccattttcgtctcttcaaatgtagttgccattgcgtacggatgcttctccataaaccgactgtttgcggatataggctgccacttcttctacctccgtaccattttcactccaattcgtgatataattttcatttttatttgtaatgctgtctgcctgttttttgtcaacaagaagcaggacaacgattcctgcgcggtgcaggtgtttgagtaccagagaaatgtcctcgccctgtgccggtgcatacagatacgtatgtctgccatcgatgtgaagaactttttccacatcttccacaaacgcacgattgactttatcggatttgataaattctaccgtaactgccgtctgtcctttgactgctgcgcggactttgcggtccacacgtccttcatacagaccatgctcttcagcatttacattttctaccactccacaggcagatgtcatattagttacacggtcaatgagaataaattcacccattgtcttatgtttcttaaattcatctacgacgatcttgtctgccagtgagatcttacataccgcgatctcgtttttgctgagcgtttccaccggtttctgctcgccggtattgacatcaatcgcatattcaatcttggtaaccgctcccgggatggtctttgtacccagtttaaagaagaagttctttccactgatgagttcatcgtcgtccatccaaaggagtgtcgttgtcaaggtcgatgcgattttcacctgagaatccacagaaagcacgcagcctcttgatacatctacttcgcggtcaagctggatcgttaccggctggcctttcaccgctttgtcgctctgcttgtcgccgacataaatactctttactttcgctgtctcattgctaggcagggttgtcagttcgtcgccgacatgaatctcgccatcttccacctgaccctgaaagcctcggaatgtgtggtccgggcggcatacacgctgtaccggcatatagaaacctatttcgtggtcgtcttcagaaatgtcaatgttttccaagtatgtcaggagtgcctcaccgtcataccatttgatattgtcggattttgtcgtaacattgtcgccttctgtcgccgaaaccggaataatcttgacattagcaaggctgagttcttcggaaagttccttgatctgtgcttcgatctcgtggaatctctcttcgctgtaatccacaaggtccattttgttgacggcaaatacaaaatatttgattcccatcagctcacagattcttgcgtggcgtcttgtctgtacgagcacgccctgttttgcgtcgatcaaaatgactgcgaggtcagcaaaggaagctcctactgccatgtttcttgtgtattcttcatgtcccggtgtgtctgcaacgatgaagcttcttttctctgtcgtaaagtaacggtacgcaacgtcgatcgtgattccctgctcgcgctctgccatcaatccgtcgagaagcagtgagtagtcaatctcgccgccgcggcttccgactttactgtctaattccagtgctttttcctggtcggtatacaatagctttgaatcgtataaaatatgtccaattaaggttgattttccgtcatccacgcttccgcatgtaataaatttcaataatccgctcatattagaaatacccttctctctttcttcgttccatactgccagctgcttcattgtcgatcactcgtgtcgttctctcggaagatacggcgctcagtgtctcgtcgataatttcgtccagtgtcgtcgcagtggactcgcatccaccggtaagtggataacatcccagggtgcggaatcgtacactcttgtactcgatcttttcccccggacgaagtctcatacggtcatcgtctaccatgataatgttgccgtcgcggtaaacgaccggacgtacttttgcaaaatacagagacgggatctcgatattttcacggcgaatgtactgccagatatccgtctcggtccagtttgacaatgggaatactcgtacttcctgatgtttctgaatcttggaattgtacaatttccacatctcgggacgctggtttttcggatcccacgcatgatgttcgtttcggaaagagaatattctctcttttgctcttgatttctcctcgtctcggcgtccaccaccaaacgcagcggtaaatccgtatttgtcgagggcctgtttcaatgcctgtgttttcatgatatcggtataagcagaaccgtggtcaaatggattgattccgtcttttaccccttgttcgttaatgtactcgatcatatcgatgccgagttttttggccgttttgtcacggaactcgatcatttctttaaatttccatgttgtattgacatgtaaaaacgggaacggcggtttctccggataaaaagctttcattgccaaatgcagcattaccgagctgtcttttccgatggaataaagcattaccggtttttcacattctgcagccacttcacggatgatgtagattgcttctgcctccaatttgtcaagatgtgaaaactcactcatatctgtgtccttcctttcgctagtacttatttgattcttttttgttgataataacctgttctttgctgccatcttttcgtaatatgttccagtataactgattttcttccgaaagtacagtcatcttgcttcccatacctccaatatctgctcccaggtaaagagcaatcgcgccaaaccggcactctttgatacaggatgagcatccccagcagtctttcgggtacttgatataggcttttttgtcgtcgtccatcttgatcaaacttcccggacaaactttcgcgcaggcggtacagcctttgcacaatgccttgttaattgctatgctcataatgctcctcccttccaaccaggtctcggaagcggatgatgatctcgccatcttccattctggaatttacatattttaaccatttctggtcttttttaggataatctaaattttcggcaaaactgtgccatcttgtctcttttcttgcttccaaatgtgcaataacgacaaggcacacggtaagccgttctctcaactcatagacaaacatcaattcatgcatatcctccgctgcaacatcctcgctgagttcgatcagctgtttgatcttgtctttcgcaagtgccagctgcttttcattgaactggtaatgcgtcgaaattcctccggcgtaattgtccatgactttctgcatcgcctcttccaaggcttcgacggtaaacatatcgttggttcctgtcaaataatggttatattcttttatcttctcttccaatgccgtttcttcttctgcctcatttaccggcagttcctgcccggcatccagttcttttaccatatgaagtgccgcgatctcgccttcgaccattgccccggtcacgtatttctgcggacatcctccggcgacatctcctgccgcatacagtccgtggatcgtcgtctggcggtccgtgtccacccaatatccgctggcggtgtgtccacccacgatataaggttcggttccctcgatttccacattctgctcgctcggtttcttgccggattcaatccatttgagtgtctggcttggtgccatattgaggtaagcttttttcaatgactcatcctgctcgtcggaaattccttcggtccgcagataacaaggacctcttccctccagattttccatcaccgttccatacactcgttccgaagtcgtcagaccgtatttatcttcgtaaacttcgccttttgcattgacctgttttgcgccgacgccctgtgcgatggttccggtcggtgcaatcgtatctttgcaccggagagcgataaagcgcatctcaaaggttgtcatctcggctccgctccgaatccccatcgcatatcctgcgccggtattaaatggcggataccacattttatgtcttgaaaatcccggattgttcggacggtaaagccctgccgctccaccggtcgcacaaagcactttctttgcgcggatctcgtacgcagtgttttcttccatcgaaaatccaaacgctccgcggatcgtattattctccacaatgtaatcggttatattaatccggtttaatacggtcacattcggaaggcactcaactgccgaagccagcaacggcttcatattttcgccgttgatctttatatttcgatttccgcgtgcgacgtattctccattttcatctttcaaaatgacaagtccgagtttttccattttttccgttacccggttgaggccctctgacattgtcataagcagatcttctctcacgatgccatccgcatcttttttcgcatattccacataatcttccggctttctgccttttacgatatatgcattgatcgcgttgacaccggcagccaggcagccactccgcttaatatttgctttttccgcaataatgatcgaataatcggatttttcgcggatcgtcaatgcggcgtaacatcctgccgttccaccaccgacgatcaaaatgtccgtatgaagtatttttttattttcaatctgcatcgcagctcctccttgaatttcctgttctttttgtgttggcaatttgcctgtttgccagctgccctacgggatgcttcgcagcttacgctgctagatataaaacacgtcttgttcctgcatctctttattttcgagcagatacgtctgcgcctcgtcaaacacatacaatcggtagatcaacacatgtactgtctcgccgacggacaccagatctttttccagcgaccgctcgccgacaacctcaattccgtttatatccacggtaatgtcgatgcggtttccgcggaataccacgtcttttacgacgccggtctctgccgcgctgatgtactgatcgagttttccactctttgatatttttataaattccggtcggatgacggctctgtctgccccctcgacctggtcaaacccttttaatttcccatattcttccaccaccgaagaccggccgatgaatttggcgacaaatggggttcccggtgatttgtaaatttctaccggcattcccatctgctcgatggttccgtggttggtaatgatgatctcatcggctacctctacggcctcatcctgatcgtgggtaacgaaaatactcgtaattcccagtttttctaccatttctttaagccagctccgtagctcggttcttactttggcatcgatcgccgcaaatggttcatccagcaaaagtacctgtggattcggcgccaatgctctggcaaatgccactctctggcgctgaccgccggacagctgattcggatatcgtttttccatccccgaaagtccggttaattcgagaagttctttgactctctctttaatctgttttttcggcatcttctgcaattccaggccaaacgccacattgtcaaaaactgtcatatatcggaacaacgcataattttgaaatacaaagccgatgccccgctttgatgccggaatgtcattgacccgctttccgtcgatgaagatatctccggaatttggattttccagccctgcgatcattcgcaaaagtgtcgtttttccgcttccggaaggtccgagaagcgcgaccagttttcctttttcaatcccgaaactcacattgtcggaggcaaggaaatcgccgtatcgcttgtatatgttcttcatttctacgtacat

SEQ ID NO: 445 - DNA, 6767 bp, unidentified
  source 1..6767: mol_type = unassigned DNA
ttaaactttcagttttattttgcctttcaccagcagtcctgtcaactgtacgatgatgatggagaagacaagcgatttgagcagtcccggtacaccgcttcccaatgcttccggataagcccagccggctaattgctggacggagtaccatatatagggaagaatgtagcaagtgagcgttgccgttcctgcgggtttgattatatcgaaccggttggttttgccctttacatcggtcagccaatagaaaaagccgaataacgggaagaaggcggcaagacaataaaacagccaggacggggtagcctgtatcttggagataatccagtatggatgcgaaaccagtgcaagaatcaacatgccggcaccaaggatgcagagcataccgatgaatttgccggggtgttcgcgattggcgtagcgttgcatgagcaaggaggtcagcagacccgacattccgaatgcgtgcagcgtccagtcactgggaatgaaaggcaacaacaggatacggcttccgtactcttccgggataaggccggaatggctgattacagcgagcgttatcactgcaaaccatgcaaccgcgtttttacgcaggctttcgcgggtgaacagatagatgccggcacatacggcatatgtccagcctataagaccgaggattccccaccaacttgtatggaacggtttcccgttgaggtctttataaataaccagcgttgcaagcaataccacgcctgccactttcattacggtgaaaagggctttttttgtaccttcagcctttggatatactccccatgtcaggaagaaaccgattaccataaggatagtaaaccaggaatgggaaagaccgccttcaatgccgccgctgttaagcgagaacagccccatggcaatgagcgccaccgtacgccagaatatatgtgcaatgacctgtgtggttgtatcaccctttttataacggttctgtatggcaaaggatactgacatgcccatgcagaacagaaaggccggaaagatggtatcggaaaatcccagcatatcctcatcggcagcggcgtgcatcagccagtgaggaacattcttcaaaccgggaatgtcgtttacgaagagcataaggaacatggtgagtgcgcggaatacatctaccgcagccactcgttggagtgttaagtttttcatgataaatctgttttgggggttcaaggggcaaatataggaaagaatttctcaatatggggtatcaggttataaaaaagccattcaatcgcagtatcattgcagttgaatggcttttagcacgtttttaaaggaattccttattcaaacaaggatttggcgattcccatttccagtcctctcagctctgccaatcctctcagacggccgatgcaggagtaccccgggttggttttcttcttcaagtcatccaccatctgatgaccatggtcgggacgcatcgggatggaaaccttacggcgctgctgcagctcgaggaaagccttcatcacatggtacatatcgacgttgccttccagatggttggcttcgtagaagttgccttcctcatcgcgttgcgtgctgcgcaggtgcacgaagttgatgcggtcgccgaactgctccatcagggcggcacagtcattggtgctgcttacgcccaaagaaccggtgcacaggcacagaccgttgctcttgttgggaacagcgtcaatcagagcctggaaatcggcgccgcagctcatgatacgcggcaggcccaggattgaacagggcgggtcgtccggatggatcaccagctcgatgccggcctcgtcggcaacgggacagatttcgctgaggaaatatatcaggttggagcgcagcttttcgggggtgatatccctgtagcggtcaagctctttctggaactgctccaaggtaaagctctcttccgaaccgggcaggccggcaatcatgttgcgtaccagcaactgcttgtcgtcttccgtcatctgctcgaagcgggctttggccctggccttttccgcgtcggtgtaatcggcttccgcaccggggcgcttcagcaggaagaggtcgaaagcgatgaaggccgcgcgttcgaagcgcagggcgcggctgccgtcgggaagctcgtaggcaaggtcggtacgcgtccagtccagtacgggcatgaagttgtacgtcacgatgttcacaccgcatttgccgaggttgcgcaggctttccttgtagttgtcgatataccgttggaaatctccggtctgcgtcttgatgtgctcgtgtacgggtacgctttcaacgaccgaccagcggagccctgcggcttcaatcatctccttgcgtttcatgatttcttccaccgtccacacctcaccgttggggatgtggtgcagggcgttcacgatgccggtggctccggcctgtctgatgtcccataggctgacggggtcgttaggaccgtaccagcgccaggtttgttcacaaagtatcatattgtaatggtataagtttataaagtatatgtctgtctattatgaatgaggatgtgccaaaatacacttgatgatttctttttaggtacggattacacggattccacggaaaaagggataaaataaatccgtgtctatccgtgtaatccgtacctaaaaagaaacagatagcaagtgagttttattttggcatactctcacggatttcatcagatggagaatgcgtcgaaaccgccgtccaccaccgagagtgccccggtcacgaagctggaagcatcactgatgaggtagtggatggttccgaacagttcttccggttcggcaaagcgtccgcacggagtgtgggcgatgatggtctttgcacggtctgtgtacgaaccgtcggggttggtgagcagcgcacggttctggttggtgagcaggaatcccggaacaatggcgttcacgcggagttcggggctgaatttggttgccagttcggtcgccatatagcgtgtataattgccgatggccgctttggcggaaccgtaacctaccacgcgcgtcagcggacgaagggcggattcggagcagaaattaacgatggcgcctttcttgttctttgccatgacgtctacgaacaccatggtgggaagcaccgtaccgaagaggttcaggtctaccactttgcggaatgcgtccacatcgaggtcgagcacggtcttgtccggagcgatggtagcgcccggcatgttgccgcctgcggcgttcagcagcacatcgatagtgccgaagcgttcgaggatggctttcttattttcttccagcacttccttgttcagtacgtcggttacgagaaacagggcttcggactttcggttaagctcggcttccagttccctgcctgcctcttccacacggtccagaattacgattttagctccttgttcggccagatagttggcgatgttttttcctaaaatgccacaaccgcctgttatgacgattactttgtctttaatgtcgaataagtttttcatgatttatgtatttagttatacagatgtgtattctttaggtttgtatggcgaagttatgaaaaaggtctaagatattgaaaatgagcataggttattcgctcattatggtaataggttacgaataagagagttatctccttaaatatacttctgcgcgttgcgtaaccttcaaagaactcttcaagtacaaaagtacaaataaaacgggagattacgacagaatctccctacttttttcactctaatttggcttttccgtaaaagcgatttaactccgtcggtacaccatagccaaaacaagttttgacaaccatgtcccgactatccgcataagcgaagaaaagggctttgcctcatgcctaaacaacaagtttagactgatgaagcaaggcccatttcttttgggcttatgccacaaaggtgcttttacggattttctgagatttttttctttttgctgtttttttgagccggtagcggaaagctgcatgtgaccgcccacccataaatgggacaagccgtcacccacagcaggcaaatcgggaagaatggtttatttgcccgaccaaacgggtttggccagacggataaaccacacttccttgcaggtagtttgcccggtttcacgcttccggcagtatttcctttctctttgtcttttcttctttttgtggatttttccctgaagttttctctcgaatctgcctctacttccgtttacctccatttttacgcctttcagtagccgcatcagtcagtcattttcgttctgggcgcaaaggtaattccgggattttacggggatgcaaggtcgagcctcctgttttctggaaaaatctccagccctgcgggtagtatttttccgaaaaaccttgcatcccctaatccctacctttttgagcacccgaaacgaaaacgaccgatgcgacagaaagacgcattaaaaaaaatgtcggataaacgagaggcagataagatagtttgaaactcaactccctcagctcttgaatccgcattaaaaacaaaaaaatcaaaaacaacgtagatatgacagcaacggcaaatttcagacaagtggcgcagaacataggacttgcagtatgcggtttaatcgtgcgcaccgcctttgggatgttcggcatcctcttgggcatcatttcagagattgtaaacggattgttccgagtggcaataggtataatcgtggctatcctttccaccattgccttcttcggtcttatcctttggttattcaccctttaatacttaccgatatggcaaagagaaacagcaagacagcagcacagcagtgcagatactatgaggtggacaacatcttcgagtatatggtggaaacatacatcaacggcaatatatctgtgttccgtgaactctaccacgaactgaacaaggacacccgaaaggattttaccgacttcctattgagcgaagtggagccgacctattggagagagatactgaaagaaacaatctaaaacaacagcgatatgaaaggaactgaccattttaagaaaacgatactgatgtacttggagcaacgtgcagaggaagaccaactctttgccaaaagtttcagcaaccctgccaagaacatagacgactgcgtgacctacattctgaactatgtgaagaacagcggttgcaacggcttcacggacggagagatattcgggcaagccatccactactatgaagaaaacgagatagaagtgggcaaaccgatgaactgccaagtggcggtgaaccatattgtggaactcacggcagaggaaaaggcggaagcacggcagaaggctatccaaaaatatcaagaagaggaagtccgcaagttgcaaaaccgcaacagaccggcagcgaaaaaagaaactattgtacaaccctccctatttgacttttgattatgaaacccaagacacgcatacaaaaagaggtggcaagactttccgccaaccttcaccccatatccgcaacacaaattgattgggcataccgccattgtgttgaacatttcggctaccgcaccaagaaaggaaacatcacttgttccgactgcggtcacgagtggcacagcaacagcggattatgtgatagccttgatggttgtacctgcccccaatgccgtgcagaactcaaagtgcgagacacccgaaagcgcacccacaaggaaacgcggtatttcagcgtgataaccacctgcaaaggctatcagttaatccgtgtggcacaggtcagatgcgagagcaggaaaggcgagccgatgaaattctactgccacgaggttgtgcagcgttggatttcacccaaaggcatcatcactgacatggctctgcttcgtggcttcgctttctgctattgcgatgtatgggctttggatagtaatatggaggtcagaccacacaacagcctttatgatgatgttgtggcgtgggggaatgtgtatcccaatatgaagatattgccccaactcagacgcaatggtttcaagggcgattttcacggcatcgcccccgtgcgtcttttcaaggctttgctttcagacccaagaattgaaacccttatgaaaggcggtgagattgaggatatgaaatactttcttttcaatccaatgatagccgatgaatgttgggcgtcatatctgattgccaaacgtcataaatatcagatacacaatctctccatgtggtgcgactatctacgtatgctcaaaaaactcggtcaagacctccgtaacccgaagaacatctgtcccgaagatttcatggcggcacacgacaacgcaacccgaaaaattgaagccatacacgagaaggaaagagccgcagagcaacgccgttgggagattgaaaggcgtgagcgtgagcaacagcgacaactccaacgaaagaaagatgcggaggatttcatcgccaacaaatccaaattcttcggcttggtaatcacggacgaggaaataatcgtcaaggtgcttgaaagcatagacgagtattacaacgagggcaagacgcagaacatctgcgtgttcggcagtgaatactataagaaagccgacaccctcatactctcggcaaggattggcggtgagataattgaaaccgttgaggtggacttgcgcaccttcaaagttgtgcagtgtcacggcaagtacaaccaagacaccgaatatcacgagcgtatcatagaccttgtgaacaagaacgccaaccttatccgtgaacggatgaaagcggcataa

SEQ ID NO: 446 - DNA, 14736 bp, unidentified
  source 1..14736: mol_type = unassigned DNA
ttatggtgtgatttccacaccggtgaagtacatcgtgtctacatctccggcatatccggtctgcatatactcataaaaatgagtgggctcatcgtaatcatagaacaggaaacgtcgttctctggcatctccttccttgtaatcaaagatggcatccccctgtttgccatccagaagtcgtgtgtaggcttccagataatcagattgggaaatgggagcagaggaaatctgtagctcatcataatgctcaccgacaccctttacgaacagaataggatgctgccgtttctcggaactgtcatcatcctcaatgttgtatccgtggtccgacaggatcataatggccgtattatcatagacaccgctgtctttcagtttttgcagatacgtagccacgattgtcatgctggcttcaatgctttgttcgtaggtgccgttttcaatctcgttcatctgtgcatcctgatgccagggactgtgggcgcctaccagatggatgaatctgaagcatttgtcatcggtcagtgttaccggtgtctttttcaggtaggtatagaagacctgattgtcggaagaaaagagttcgtaatcactgatatcatcggtcttctccagtgaattgaattccgccgggatggtgaggcagaagcgtttgagatcaaaaggcatgtatttgaatccgaccagcttgatttccagtttcataaattgtgcaatggaagagatcgtgggggtcgtgtcgatcatattttcaaatcggaacatgctttcttccagacggtaagcgtcctcctcatacattcccatgcggtatcctctggcttccagatcatcaaagaaaggagcttcccgatagactctctttgcatattcgataaattcttcctgatcctcataccattcgccggagaagaggtaaggaattgaatatacggtgaatggataggccgacatcgtattattataataagtaaaatcagaaagagtttccttatattcgggatggtgttcgatcacctgtgacatgatgtctccgtctactgtgtccagaaccagaagtacaaggttttgatcggtagacatttccagttccccataggtggtgttgatcatagaaaatttgtgttccaggccctgttttgtaaaccctagcgttacaagagtcaccaacagaaccagactgatcagcccgctgacagcacctgctgcatctgccacctttgtaagcgacagctttttcaccgtcagtatcaccagaaccgcgactgccacccagagagcaacggagccgatacgcaatccggaatactgtgcccaatccaccgtacttccatccagatgaggcagattgcctatcatgaaattgccctgaatataagtgcagaggaacgcaatcagataaactgtgagaaatccatgatatagcctggtatttatcttcgaaacgatgaaagccagcaggaagctgacacccgtaaataccgcaaacatcaacagacagagcgggatcagatcataaaaatcaaaccagaattcatatttgttattaaaataaatttccaatggagcataaagaaacaacataaatcctgccgcaacagaaagtaaaccggcggaacgcagccggagctttgactctttcacaaaaaaaacctcccgtatgttcaaaatggatacttgcaaagtacaactattatattttgaaacaaaataattgtcaaatagcggcttaattgtcaggatgcataacccctcagatactttcatacactgtaaaaaagtatcctgaggggttttcctttgaaagactatattgaagaacgagctatagggatagcgggctatatcatcgaccacaacgccacggtgcggcagactgccaaggccttcggcatcagcaaaagcacggtacataaggacgtgacggagcggctggcccaggtgaatccggcgttggcaaagcaggcgcggaaggtattggatgtgaataaatccgagcgtcatatccgcggcggactggctaccagagagaagtatctgcaccagcactagatattcgatgaggcaaatcattctatacgggaaagtgtcttgaaataccgggtaccaacttatataatggatacatagctatatgggacaaagtagttgggacataagatacaaaagatatcaggacctttgcgcagcaggatcacttatgaggagagaaaaaacgaaatggcaacagagtttctgaatgatgcacggaaagagatcgagggacggacagaagacttctgtggggaattaaaagcattctatcagggcaacggggaagcggaacagaacctgatggagcagacaacccagcctttctggcaaagtctgcgcctgagcagaaaaagactgcggcagcgggaactgacggtggatatggagatgcaggagccggcacgactggcggactatgatggtccctggaaggatggctatgattatagctgccgccgtacccagccggtaaaaatgagacggacttattaccgcaagggaaaaaagattgcgttcctaaagacaccggagattgcagcggcaagctttttgaaagcggatgtgcagggagatatggttatctgccctaactgtggacatgagggaaaactgaccagctatatcgatggctgtgatgcctgcggggcaaagtttctcgtcagtgattttgagacaaaggtatccggattttctctggaggaggacgcaagacagaaaagtatttccaactttatgaaagccggtgcggtggtgggaattacagcgatttctcttgcggtactggccatctgtgcgggcggcattatgtttttgctgttggcgttgggcaggaacggatacaatgcggtaaaggcagccgcagccatgatgctgggaattggtctggctccggtatttttccggtcgttgttttacatgctcattatatttattgtaatgttgatcgtgatggagactcgcagaaagccgagaattcaagacgaatcgaaagtaaaggccgcaatcccggaattctccacgggtaattttcttcagaatctggaataccagctgcgaatgatccatctggcggatacggcagagcaggtacgctttttcgcatcctgtgatctggatacggtggtggcacggtatcagaatgtggtggactgttgcatttgcggtgtgcgttttctggaggcggagacacggggagagtcttacagaatcagcgtggaagtgaggacccgattgacactggatacaggaaagaagatccggaaccgttatgaggagatccggctggaactggaaggcagacaggatgtggtaacgcagcacagcagggcactccgggaatacaaatgccccaactgcggaggcagtgtggacattttgggcggcggagtctgcgaatactgtaataccgcggtggactaccgaaattttggctggatcatcacttcttatacaaatctggggcagccagagaatccttttgcgaaaatactggcgggagcactgggaagttatctgctcattttgtttttgagtctggtactcatggcgcattccgaggatggaaaagatacttttgagatcttacagagtgtccggatgtcaacggaatatctgaaagcggtgcagcaggatattatctatcccgatgctgtgatttcagattgtacggagacagacagcgaagatggaacttttacttcaataaaggtgtactcctgtggggaccgggatgcagtaaaagaagcctacaaaactgcactgctggaaaagggatttctggagatgcagcagtacccggagggattttctgtctttttgccggaggatccgtcagaatatgccgtggattcggaagaaggaatgttctatcttgtgatctgcgcagaaaatgcaccggagggaattacagtaactgcgaccttgatggacgaaaattggaacccggtgcaggaataaaatagaatacatacatacgacaagggacccgggcaaaagcttccgggtcctttttagagggaaagtgttggtagctgactgattactattgggtgagaggaattctgtgaactactctgcgatagagcttccacaggagcacagcagggaaactgactgccagatatgctgtggataaaagtccggtaacaccgcctacgattgcaatgattaaaattccaatattcataatgaattcctcaactttctgtcattctgtacaacattcgatgaagtccttaaaaacttcacataccgtattatagtaaacagatacccccgggtgaatagttttgagcgacccttaacaccattttgtcgggatatttacaaaatctttgcaacacgtttacagaatcttaacggcaggacttacgggcgggaacgatcccgggagtaaggtttgcaatcacaggaaatatcaagtataatagagaaaattgactgttacccggggtggaatagtcggagaaaataaaacggaggtaggaatatgagtatgacactggaacaggctaaggagaagcttgcaaagtatggtcaggaacatgttctgaagtattacggggagctcaacgaggaagagaagcaggggattctgaatcagatcgaaactacggatatgagcattctggaagcttgcaagcataaagaagatctggcaaaaaaaggagtgatcacaccgttggctgccatgcagttagacgaaatcgaagcaaacagggaggaatttaccgcaaccggtatcgaagcgatccgacagggcaaggtagcagctgttcttcttgccggaggcatgggtaccagactgggttccgataatcccaagggcatgtacaatgtgggtctgacccgtgaactgtacatctttgaatgcctgatcaataacctgatggaagtcgtgcatcaggcagacagctggatccacctgtttgtgatgaccagcgataagaacaatgacgcaacgatcgcatttttaaaagagcatgatttcttcggatacaacgcggattatgtccacttcttcaaacaggagatggctgcggcaaccgattatgaaggcaagatctatctggaggaaaagggcaagctgtccacttcccccaatggtaacggcggctggttcatttccatgaaaaacaatggcatgctggacattgtacacagagaaggcattgagtggatcaatgtatttgccgtggataatgtattgcagcgaatcgcagatccctgcttcatgggagctactattcagaaaaattgtgtggtaggctccaaggtggtccgcaagaatgcaccggatgagaaggtaggcgttatgtgcttagaggatggcagaccttctatcgtagaatattatgaactgaccgatgaactgatgaatgctaaggatgagaagggagaacccgcgtataattatggtgtgatcctgaattatctgttcaaggtacaggatctggaaaagatcatggcagagaagatgcccctgcatatcgtagagaagaagatcccgtatctggatgagaacggagaaccggtgaagccggaggctcccaacggctacaaattcgagagtctggtactggatatgatccaccagatggacagctgtctgcccttcgaggtagtcagaagaaaagaatttgcgccgatcaagaacaagaccggtgtggactctgtggaaagtgccagagaactgctcaccgagaatggtgtggtgctgtaaacatttcgacagattttcacaacataaggttattgaggaatcgatagaattacagtaatctgatactgtaagaaacgaagaaaaaatttcatccggctctgacagatgagagattgtgcagccgccatagtgaacaaatagtattgtcctatgcacggcggataggagagagtgtatgagaattttggtaacaggtggtgccggattcatcggcagtcataccgtagtggaattacagcaggcaggctatgatgtagtcgtattggataatctctgcaatgcaagtgagaaagtgatccccagagtagaagccatcacaggcaagaaggttcctttctataaggcagacattctggaccgtgaagctctggaagagatcttcagcaaggaacagattgacgcagtcattcattttgcaggactgaaggcagtcggtgagtccgtacagaagccctgggaatattatgagaacaatattgccggtaccctgaccctggtagatgtcatgagaaaacatggtgtgaagagcattatcttctcttccagcgctaccgtatacggcaaccccgcatttgttcccattacggaggaatgccccaagggacagtgcaccaacccttacggctggacgaaatctatgctggagcagatcctgacggatatccagaaggcagatcccgaatggaatgtgatcctgcttcgttacttcaacccgatcggagctcacaagagcggtaccattggcgagaatcccaacggtatccccaacaacctgatgccttatatcacacaggtagcagtcggcaagctgaaagagctgggtgtcttcggtgatgattacgatacccccgacggaaccggtgtacgtgactacatccatgtcgttgatctggcaaagggccacgtaaaggctctgaagaagattgaggagaatgcaggactgaagatctacaatctgggaactggtgtgggctacagtgttctggacatcgtgaagaacttcgaagcagctaccggcgtgaagattccttacgtgatcaaaccccgccgtgcaggcgatatcgccacctgctattccgatgcttctctggcagagaaggaacttggctggaaggctgagaacggcatcaaagagatgtgcgaagactcctggagatggcagaagaacaatccaaacggatacgaagaataatctatagtttagtcaatggaaagttagcatagctacgagccatgcagaaatagagtggaacacgtcgtgggagcttgcgcacaagcgatgctgtttcgctctttttttgcatggttcgtagcgtagggctgtcatgcaagggagcctgccgcaaacatcctgttcattccatcctgtctttcaatgctttgcgagaaaaaatcaccaccttccgacaatcattcttggaaggacattccatctgacgtgggcgttttgtgctttctcataatatctgtacactataggcatttctattgctttggtgcaaatcgcatcaaaatagcaaaatcagtacaaaaaaacttctaaatccaacattttttgtactgattttattatttttcccattttagcgaaaataagctctaataaaaggccaaaatctcctgcttttgtatttttttagcaaaaaatggcattttcaatacaaacagaacttccggagtggtggcagcccatactacagctggttgttgacattttcttgaaaagtgttagaaggcaggggcagtgcggacacgatgtcatccggagattttaagctgtggtatgggatacttgagtatacagtgcaggagcaaatttgagtgtgaaaaatcttcgctttacatttagaaactttttacgttgataagcttatcattaagagaaaaactgtaaagttcattatttgcagacggaggaaaatgtctgtatggtccggaatacctgctctactgtatccgtcatattggtcatggcattgtcggtatgcatagcctcatccagggataccacgttccgcagaatcgggaaaaaggcatcaatgccctctgcgttgcaggcaacggcctctttggccacgcagccggaaaaagcaagtaccggtttttcatattttttggcaatcttggcaacaccgatgggagcttttcccataaccgtctgaccgtcaaggcggccttccccggtgatcacgacatctgcatcccggatatatttttccagatgggtttcttccagaatgatcttaataccggattccagtgtggcattgcagaaggtaagaaaagcaaatcccataccgccggcagcaccggcaccgggatatttggcatcggcatgaggaaactgttctctggccagagcggcataataagccagccatttgtccatctgcaggatcatagtggaagtagcgcccttttgcggtccgtagatggcggaacatccctgctttccgcagagcgggttggagacatcgcaggctatgcggaaagtacattccttgagttcgggaagcacatgatccgtagcgatggattccagatcctccagtcctttggctccgaagcggatctgatttctgtttttatccagaaagccaaagccaagtgcctgcagcattccgacaccgccgtcattggtggcactgccaccgataccgacaataaaatgccggcagccgttctggattgcatctttgatgacttcgcctacaccgtaagtggtggtgttcagaggattcttttcctctccgctgacctgggtaatcccggcggcaccggacatttcaatgattgcggtatgggtctcgtcgacgatgccgtaaggacagacaacggggtgaccggaaggacctgtgacctgcacctgtgtcatacggccgtcacagccgtttaccagagcatcgacggtgccctccccgccgtccgccagaggacggacggtaatatgtgcatctttataaacacgtttgatccccgtggcggcgctcaaacctgcctgcatggaggtcatacttcccttgaaggaatcgatagctattactacattcataaggttcctttccgctgccgccggaattcggccgacaactgtcgttttcgtatagattttcggaaaatggcataatttctgaggatattatagcaacaccggaacaaaagaggaatggttcccggagaaaaataaaatttagcgtggtacagtggcaaaaacatcctataagatcattgcatctgagaaaacaatccagtataatgaaaggagtgcacatttagatgcacattacgcataagaagtggaataacaggaggacgagcatgattcagttaacacagggcggcgcttacctggtaaacggtacggacatcgtagcggataccccggaagcagccagtcagatacaggcgaagaccggcattacgatctccaaagaagaagcagcgaaaaacaccatggcatatggtattctgcaggagcataatacctccggcaatatggacaagctgaagatccgtttcgacaagcttaccagccatgatattacctttgtaggtattatccagaccgcgagagcatccggactgcagaagttccccatgccctatgtactgaccaactgtcataactccctgtgtgccgtaggcggcaccatcaacgaggatgaccacatgtttggtctgacctgtgcgaaaaaatacggcggagtctatgtaccccctcatcaggcagttatccatcagtttgccagagagatgttagccggcggtggcaagatgatcctgggttccgattcccatacccgttacggtgcactgggtaccatggctatgggcgagggtggtcccgagctggtaaaacagctgttgaaccagacctatgatatcaatatgcccggcgtggtagctgtatacttaaagggtgctcccgtgaagggtgtaggtcctcaggacgtggcactggctatcattggcgcagtattcaagaatggctatgtaaaaaataaagtaatggaattcgtaggtcccggcgtggcttccctgagtgctgatttccgtatcggcattgacgtaatgaccacagagaccacctgtctgtcctccatctggaagaccgatgaccagatccgtgagttctatgagatccacggacgtaccgaagactataaggaactgaatcccggccaggtggcatactatgatggattgatcgaggtggatctggacaagatccgtcctatgattgccatgccgttccatcccagcaatacttacaccatcgaagagctgaatgcgaacctgatggatattctggatgagacggaaaagcgtgcgaaagtaagtctggacggtgcggtagacttcactctgaaaaataaagtaaagaacggcaagttcattgtagatcagggtatcatcgcaggctgtgccggcggcggattcgagaatatctgtgcggctgccgacattctgaagggcagatacatcggtgcggatgagtttactttaagcgtatatcccgcatccatgcccatatacatggagctgatccgcaacggctgtgcggctaccatcttagagaccggtgcagtgatgaagactgcgttctgtggtccctgcttcggtgccggtgacacacctgccaataacgcattcagtatccgtcactctaccagaaatttcccgaaccgagaaggctccaaactgcagaacggccagatcgcttccgtagctctgatggatgcccgttccatcgcagccaccgcagccaacaagggtgtgctgacttccgcaacggacttcgatggagatttcggaaaatacaaatatcatttcgatagcaatatttacaagaaccgtgtcttcgattcccacggtgtggcagatgagagcgtagagatccagttcggccccaatatcaaggactggcccgctatgggtgccctacctgagaatctggtactgcaggtagtatccgagatccacgatcccgtaactactaccgatgagctgattccatccggtgagacctcttcctaccgctccaatcctctgggactggcagagttcactttaagccgtaaggatccgcagtatgtaggacgtgccaaggagatccagaaggcagagaaagagcgtatgaacggcggacatccctgtcaggcagttccggtactgaaggatgttatgggtgaagtaaagaaacagtatcccgatgcaagtcgtgagaacaccggattcggttccactattttcgcagtgaagcccggagacggttctgcccgtgagcaggctgcttcctgccagaaggtattaggcggctgggcaaatattgccaacgagtatgccaccaagcgttatcgttccaacctgatcaactggggcatgcttcctttcctgatccagcccggagacctgcctttcaagaatctggattacctgttcattcctggtattaagaaagccgtggaagacaaggccgaggaaattaaggcatatgtggtaacaaccggagaaggcatgaaggaattcaccctgaagctgggagagctgaccgacgaagaacgtcagatcatcctgaagggatgcctgatcaactataaccgagtgtaactattcagagacatgtgactaaccatcgcagatgcgtttcgcgaagagaggctgaatagttacaatgagaagtaaggagaaaaaatatggaatttaacaaaccggtatccaaccccatgatggtgggatccattgaattattaaaagcagaggacaccccggaacacagacagatgttcctggatgaactgcagaaagcaaagttcctgtctccggtcgtgatcgatccggtgcctgtgcccgatgaaaacggccgggtgaccatcgcaagagatgccaaagtacagttcccgatgctgtccaccgaggacggtcggaagttcttcatggcgttcactgactggacagagctaaaaaggtggagagatgaggagaatcagcagactttcgccatgaactttgacgattatgcgggaatgctgctgcgcaaagatgcacagggcaatatcagcccggcgctgggattcgtgatcaatcccttcggtggcaacatcgtggtgaccagagaaatggtagccagcatgatcgcagcaaagctgaaagcagccggcagaccggtgcctcccgcacccggaacccctggcgctcccactcagcccaaacagcagtaaattaacactaaataaaatgtccatagcggacgatataagtagtagggaggtgacaaggccagtcacttcctgctacttattttttacagtttgataatgacaccacggatggtaaccagacagaggcatattatatgtattctgtttctttaccatctttttttagtttaacagttcagccatgcaatatcatatgttctgcgtgggtgctggcacacaaagcagaacatatgatattgcatgagcggagcgccgcatgtatgaaataaaagatgagccgcttagcggcgtcgactgcggagcaggcgcttttatgaatacatgcggcggtgaactgttaagcgttacaggaagcgcgccctgttggttcgtggtgaggtcggggaaaggagaaaattacagatttgagaattgattccgcaagcataggaatggattccgccagaagctatcacgcttctaagacaagcgtcagacgatttgagataacggattatcaggcaggtctgacagatgtatccactaagggacagaagacaccgaatggtgaggataccacacagaacacggaggaacaggagaacactgcagagaacaccacgatgacagccaaagactggcagagtcgtttgctggtatcttctgccagatgggatatgcgaagcagtgccagtgaacagacattgtctaccatccgggaatatacggtgcgttatatttttgatttattattcccgtccaggaacagcactttgcgggactggatgcaggaaaacggatggagcagcggtaatcagaccggaaacagctggaatacagggaatagcgtaaataatacccagacgaattccggcagcacacagggaaccgcaacacctgcgtcagacgtgttcaatctggtcacgtcccgtgtgaaaatattgaactatgtgagcgagacctggaacatagaacaggaggataccagtttttccaccgtgggaagcgtacggaccaaggatggcagagagatcaattttaatgtaaatgtaaatatgagccgcagatgcgaggaatactacaaagagcaactcaatgtagcagaattcacgctccatgatccgctggtgatcaacctggatactgatgtggcagaagtgtcggatcagaccttttattttgatctggatgccgatggcaaggaagaagagatctccgtgctgaatggcagcggctatctggcactggacaagaacggtgacggcactatcaacgacggcagtgagctgttcggcacccggaatggggatggctttgcagatctggcgcagtatgatgaggatggcaacggctggatcgatgagaacgattccatctggtcaaaattaaaaatctggtgcaaggatgaaaacggcaacgacgtactgtacaaactttctgacaagggtgtcggtgctatctgtctgcaaaacgcttctacggattttaccctgcagggagaccgtaaggctcaggacggcactaccaatgccaatgcgaccaatgctgtggtccgcaagaccggtattttcttatacgaaaacggaaatgtgggtacggtacagcacgtggatatggctgcctatgccgcacaggcatagaataaatataactattcagttacttcgccctataaatagcatcaaatgttcttacgaatgcaaacattcgacgctatttacatggctctgaatagttccaaataaatgcaaatttcatatcgaagacattctgaataaaacccatgaatcgggcaagactataggataaaccagggaaagtggttgaaacgattgtatagcaggcagttgactcagggaacaggaaggatgcggataggatatgagaagaaataaaaagagcggtattaacaaagaacgtattataatgttagcctcttcagcctttgtactggcagcattgaccatgacaggggtctatatgaaggggcagaatgtggagtccagggatgatggttataccttggacttcactgcgcttcccaacaatgcggatgacaaattacaggagatcacggagaataacgacgaacatcttctgaaggaggacgagaacatccccggactgacggcaaataatacagcgggaaatgagatcgcgggaactcctgtcaccgaggatgatctggactatatgccccaggaggtaggctccggcaacgtagagattccggggctgacggatcaggagaccctgctggaggccgcacagaaagagcagcagaattccgatgccgaccgacaaaaggaagagaccgggggaaagcagacagcaggcggggatgtggtcgttgagaagacactgcactttgcagaaagcgacggattacagcaaccggtgcagagtgatattctgatgcattactctatggacaagagcacttattttgctacactggatcagtataaatacaatcccgccaccattttttccgcggaagaaggtacggcagtgaccgcttgtgcacagggaaaagtgacttcaatcttcgaaaatgaggagatcggcaaggcggtgaccctggatctgggtgacggctatgaggccacttatggacagctgacggagatcacagtgaaagagaattcctatgtgaatcccggcgacaccatcggcagtgtggcagcgcccacgaaatactacagcaccgaaggaagcaacgtatactttgctctgacccacaacggggaaccggtgaacggggaggcattgttccgctga

SEQ ID NO: 447 - DNA, 5274 bp, unidentified
  source 1..5274: mol_type = unassigned DNA
tcagatcggcacatcctgccactgcccgccgatcagttcgcgggtggatttgaacccgttttttttcagcagctcgaatgcttccgcacgtccgtcgttcaccaggtccgggtagtggcagtcggagtttaccatcaccggaatattcaactcgcggaggcggtgcagatagtcggtatgcggatagacctcctgttttttcacgaggttttttgtgttgacttcgaccatcaggcccttttctgcgatcaggtgcaggcagtcgttgagcggtttttgataccagtctgcttgcaggtcgaagccttcgcatttgtggccgttcatgtatatcttgtccatgtggccgacaatgtcgattccgcctgcctcgatcatttgctgtgtggagctgaaataatgggcgaccaacttgcggatatctccgtcgtagtaggtgtcgacagacttctggtattcccggaaagagccgtcgatgcacaccatattctcttctgcaagcggctgtgcgattggcagaaagtggatggagccgatgcggtaatcgagcggcaagttacggaagtaggggatggatgcgttgtagctcttgtctaagaaatcgatttccagtcccacgtatatttccaaccggtcgttgtatttctttttcagccgttctatttctgtcagatattcgggcatatcatctttcgacatgttccagaatgtttcgaacggcaatggtgaatgggatgaaaaaccgtaggcgcggaacccgtgcgcaacagcgaatttaacgaagtcttccggcgtactccgcccgtcacaaaatgtacaatggctatggtagttactgagttgcataaaattttacttgtaaaaagacaaagataatttttttatcccgaaagacaacctgtttgataaaaaaaggcttgattgctgccgagggattagcggcggaatcaagccttgaaaacacttaaaggatgaaaaaattgtatgttttattttattacattcagttctttacccaccttgataaatgcttcgatagctttatccagatgttctgtttcgtggccagcggacaactgtacgcggatacgggcctggtctttcggcactaccggataatagaaaccggttacataaatgccttcttcttgcatcttagctgcgaaatcctgagataatttggcatcatacagcataacggcgcagatagcggactgagtcggcttgatatcgaaaccggcagctaacatcttttcgcggaaatagctgacattgttcatcagtttcgtatgcaatgcgtcgctttctttcagcatcttgaacatttccaggctggcacctacgatagcgggagcgacagagttggagaacagataaggacgggagcgctgacgcagcatgtcgatgatctctttctttccggttgtgaatccgcccatagcgccaccgaatgctttacctaatgtacctgtgaagatatcgactcttccgtatacattatattgttcagccacaccgtgtcctgtcgggcctacgacaccggcagagtgggattcgtcgaccattaccaatgcgtcgtatttttctgccagttcgcagatcttgtccatcggagccacgtttccgtccatagagaacacaccgtctgttgcgatgatgcggtgacgttgtgcctgggcttcttgcaggcaacgttccaggtcggccatgtctgcattggcataacggtagcgttttgccttgcaaagacgtacgccgtcgatgatggaggcatggttcaaagcgtcggagatgatcgcatcctcttcagtgaacaacggttcgaacagaccaccgttggcatcgaaacaagcagcgtacaggattgtatcttcggttttgaaataatcggagatagcagcttccagttgtttgtgaagatcctgtgtcccgcagatgaaacggacggatgacatgccgtatccgtgtgtgtccatagcttctttggctgccttgatcagacgttggttgtcggacaggcccaggtagttgtttgcgcagaagttcaaaacgtcgcttcctgcgtttactttgatgtcggctctttgaggagtggtgatgatacgctcgttcttatacaatccggcagctttgatgtttgccaattcctgagtaaggaaatctttcagtttaccgtacataactttgttttttgttagtatttctaattaagttgacaattatatctcttttatcgcagacaagtggcaaaatatcttttcgaaacctttttctttgtctctgatttgtctgccgatgcggcaaaggtcatattttttttgaatatataggctaaaaaaatacaagaaattcataccggaatgtttttattctctatacctttgccgcagaaaaacttaaaagaacatcaaacgcaatgaagaatgtattagtaattggttctaccggtcagattggatcagagttaaccatgaagttgagaggtatctacggtggaaacattgtagcaggttacatccccggacaggaacctaaaggtgaactgttggaatcaggaccttctgcaattgtcgacattacaaacgaacagcagattgctgaaactgtatctaaatataaagtagatacgatttataacctggcagccttgctgtcggctgttgcagaagcaaaaccgcagctggcttggaaaatcggtatgggcggtttgtttaatgtattggaagtggcacgtgaaatgaattgtgcagtattcactccgagttccattggtgtattcggcaataacacaccgaaagacaagactccgcaggatacaatccgtaacccgcgtaccatgtacggtgttacgaaggtttcaggcgagttgttgagtgactactataatatccgtttcggtgtcgacactcgttccgtacgttttccgggtcttatctcttatgtaacacctccgggtggtggtacgaccgactacgcagttgatatctattattcggctgccaaaggcgagaagttcgtatgtccgatcaagcagggtacattcatggatatgatgtatatgccggatggtctgcgtgcagctattgaaattatggaagccgattcgacgaaattcgttcatcgtaactctttcaacattgcctctatgagctttgatcctgaaattatctacaacaatatcaaaaagtatgttcctgatttccagatggaatatgatgtagatccgttgcgtcaggctatcgcagaatcgtggccgaactctctggacgacacgtgtgcccgtcaggaatggggctggaaaccggaattcgacctggatgccatgactcaggatatgttggcaaaattgaaagaacgttttaacaaataagaattaattccccggtcattaactgatcaataggagaaaaaggcgactgtccatccggatcgtcgcctttttgtttgtatcgtttttattcagtattgtaggcagtttcaataacaatgtgactgtttcttgtgtaggaaacgattaagttaaaagtgcatgaaaaattatgttgtaaaacatgaaatagttaaatcaggttaaggaaaagtactttttcggtgaaatattatgctgtataacataaactccctatatttgcatcgtgtttttcatggtattagatttaaggttaacaatgaagattggctgtccgtgatggatggccttttttattttatgccagtcccgattctttccggttaattctaaaacacgtcttgtcttttttcaatcccttattgtaatatctttcaaaaatgcattggttcaaatcgaaactattaccgcatctattttagttttctaccccgtttaaatcaaattacatgcaagggtaatcttttttaacaaacatctattttagcatattattgtatatcagatttttatgtgatatttgacttttaagggggatactgttgttttttggaggtgagaattggtgtggatggtggcaaaatgggttccgatttactgtaaatgatgccgattaattatgttatatagcatgttttcgttaaatagatttaaataaatgagatttccaagtgaaaatgtatgcttcataacataaaatgcctatatttgcactgtgtttttcatggtattagatttaaggttaacaatgaagattggctgtccgtgacggatagcctttttttgtttttatccggatcatccattcttttggtattcttgattatatttgtatctctgaaaaggattcattgtaactaaaatatcatagtatggaaatgtacaaagcaaatgataaccggtatgccgatatggcgtacaggcgttgcggacggagcgggttgttgttgccggccatctctttaggattgtggcataattttggtagtgtggatgcgttcagtaactttattcagattgcgcatgctgctttcgacaatgggattacacattttgatcttgccaataactacggtcctgtatatggatcggcagaggaaaacttcggtcgtatcttgaagaaaggtttggggctgtacagggatgagcttgttatttctacaaaagccggatatgatatgtggcccggtccgtatggtaactggggaagtcgcaagtatctgatggcaagcttggatcagagcttgaaacggatgggtctggaatatgttgatatcttctattcgcatcgtccggacccgcagacaccgattgaagaaacgatgggagcgttggcagatatcgttcgacagggaaaagctttgtatatcggaatttcgaactataatgccgaacagacagaaaaggcgcttgctgtcttgggggaacatcgtgtgccttgtctgattcatcaagcgcgctattcgatgttggatcgctggaccgaaccggacctcttgcctctactgaagcaggaaggggtgggaatgatcgctttttcgcccttggcacagggtatgctgacggacaaatatctgaacggtatccctgaaaattcacgcgcagccaaatctacaggccatctgcaacgcgagcaggtaacggaagaaaagataagtagagttcgccaattgaataaacttgcaaaacaacgtggacaaacgcttgcagaaatggcactcgcctggttgttgaaggacgaacgggtaacgagtgtcttagtgggggccagttcggttgcacagttgacggataatttgaaggcgttacaaaacaaggttttttcaacggaagagttacaggcaatagagagtatattacaataa

SEQ ID NO: 448 - DNA, 14073 bp, unidentified
  source 1..14073: mol_type = unassigned DNA
ggaacttctgctcggccttcttgccggtcagaacagccttgtcgcagttgatgacaacaacgaaatcgccgcagtcaacgttgggggtgtaatcgaccttctgcttgccgcgcagcagaacagcggcctcagcagcgacgtggcccaggctcttgccggtagcgtcgagcaggtaccacttacgctcgacttcagcgggctttacgagagtagtgctcatatctatttcctcctgataagctttttgtacgtttcaggcacccttttggggcgcgagtgtcagtatacaacacaaaaacgcgcctgtcaacatgatttttggattttttcggcggaaatttttgaaactctcaaaatcgctcgttttctctcaaatcctcttgatttctgaatttcgatttttgcaaaagttttttgctcgccccggcatatttttgccatttgcccgctacaaatcccgctgcggttgtggtatactataaaggatatgggcggtgcaccgctgcccttgccaacacaaggagaatacatccatgccaaatgagatcgaccgcacttcttcggcgcagcgccgcagctccaagctgctgacggcgatggccattttcatctgtctgggcatcgcagcctacatggtgctcaccctgctggtgaaccggcagacccccgcgacacccgacacccactataccggcacgaacggcatctctgtctaccacgacagcagcgtgtggagcgtgtgccgcatgaccgaggacgcaaccctcggcaccgtgctggagcttgccaccgccgacacggcagacagcgaggattatcaggccgttttgttacagcggggcaccgccgacagctacgaaagctttatcgaggactcggaagccgacctcaagcaggcctacggcgtcatcaagccccgcaaggtcaacctgaccgtggagggtgcagcggtagaggcggtgcgctgcgatatccgcacctactacgccgtgctggccaccattacctacgacagcggcgatgtggtctatgtctcggcgctgacaaagctggcgtccatcagcgatgtggtcaatctggtagaaagcgtgagcctgtcatgagtgatcttcgtgcaatgcagcggctctgcggtttaatgcgcaaggccgtacaggactatgaaatgatcgcccccggcgaccgggtgatggtgggcgtttccggcggcaaggacagcgtggcgctgaccatcggcctttccatgctgcgcaagtacatcggcttcgattacgaggtggtggcggtcacgctggacccgcagttcgaccatcagcccatggactactccgcgctggcagagctgttccggcagcacggcatcccctacgaggtgcgccgtaccgagatcggccctgtggtgttcgagtaccgcaaggaaaagaacccctgcgccctgtgtgccaagctgcggcggggcgcgctgcacaccgccgcgcaggagctgggctgcaacaaggtggcgctggggcatcatctggacgatgccgtggagaccttttatatgaacctctggcgggagggacgcatcggctgcttctcgccggtgacctacctctcccagcgggatctcaccctcatccgccccatgctgctggcaaccgagtacgaggtgcagtgcgccgtgcgggaggcgggcttgcccatcgtgaagagccgctgccccgcagacggcgttaccgtgcgggaacagaccaaagaatttgtgcaggagcgctgccgtaccgaccacgccttccgccaaaagactctccatgctttgcaggagagcggcattgacggctggcgtcccgtccacacgggccggggcagctttatcgtaccaaaaaaggaaacagatcatgcagaaacaaccgtttgaaaaacacgtctgggccgagatcgacctcgaggcccttcggtataatttccgggaggtaaaggcccgggcaggggcgctgcccctgtgcgcagtggtcaaggccgacagctacggccacggcgcggtacagtgcgcccgggtgttcgccgaggagggtgccgcatggctggcggtcagttgcctgaccgaggccgtgcagctgcgcaaggcagggcagactttgcccatcctcattctggggcatgtgcagcccgcctacgccgccgctctgatccagaacgacatcactgtggcctgctactcccttgcgcaggcacgcgccctgagcgaagccgccgtggcggcaggcggcagggtacacatccacctcaaggccgacaccggtatggggcgcatcggctttgccctgcgcaccgattttgacgccgccatccgggagatgctggaagcctgtgcgctgcccgggctggaaatgaccggcctgttccagcatttttccgtggccgatgacaccgccccggagaatgtggcctatactgccgagcagcacgcactgttcgtgaaagccttccacgcactgaaggccgccgggcgggagcctgcccttgtgcactgcgataactctgccggggtcatgctgcacccggactggccggagggactgccccgagagcgctgcatggcacgccccggcatcatcctgtacggctacgaccccagcgacgaggtgcgctttgggcgctttaagccggtaatgaccctcaagaccgtggtgagcatgatcaaggagatgcagcccggccagtgcgccagctacggccgccgctttaccgccgaaaagcccactaaggtagccaccctttgcaccggctatgccgacggctacccccggcttttgagctgcggcaagggcgtggtggagatccacggcaaggcctgcccggtactggggcgggtgtgcatggatcagatgatggtggacgtgaccgatgtgccggaagtgcgcgaagacgatgaagccatcctgtggggcggcaccgtgagcgacaccgcagagaccattgcccgcaagaccgacaccatcccctacgaagtgctgtgcggcgtttcccgccgcgtgccccgcgtctaccgcgaccacggacagatcgtggccgtggaggactggatcttagaagcataaagctgcccggaggaactacatggcaagagacaacatccgcaacttctgcatcattgcacatatcgaccacggcaaatccaccctgtccgaccgcattctggagctgaccaagagcgtggacgagcgcaccatggaggatcagatccttgataacatggatatcgagcgcgagcgcggcattaccatcaaggcgcgtgccgtaaccatgaactacaccgcaaaggacggcaagacctacgagttcaacctgatcgacaccccgggtcatgtggactttgcctacgaggtcagccgcagtctggccgcctgcgagggcgccattctggtggtggacgccacgcagggcgtggaagcgcagacgctggccaacacctatatggcactggagcacgatctggagctggtacccatcctgaacaagatcgacctgcccagcgcccacccggacgaggtggcgcaggaggtggaggacgtgatcggcctgccctgcatggacgcgccccgcgtctccgccaagactggcctgaacgtcgatcaggtgctggagcgtgtggtcagcgatatccccgcccccaccggcgacccggacgcccccttaaaggcgctgatcttcgacagcatctacgacagctacaagggcgtcatcgtctacatccgcgtgttcgagggctcggtgaagcccggcgacaccatccgcatgatggctaccggcgcagagttcacgctggtggaggtggggcacatgggtgccacctccctgaccccctgtgcccagctgcaggccggtgaggtaggctacctgaccgccagcatcaagacggtgcaggacacccgcgtgggcgataccgtcacgctggcagagcgccccaccgcagaagcgctgcccggctaccgtcaggtcaagcccatggtgttctgcggcatctaccccgccgacggtgccaagtaccccgacctgaaggacgcgctggaaaaattgcagctgaacgacgcctccctgacctttgaactggagaccagcgccgcgctgggcttcggcttccgctgcggtttcctgggtctgctgcacatggagatcatcaccgagcgtctggagcgggagttcgatctggacatcatcaccaccacccccagcgtgcgctaccgtctgaccctgaccgacggcactgtggagatgatcgacaacccctccagctacccggaccccagcaacatcgtcaagcaggaggagccctttgtggatgtgcatctgtacactcccaacgactatgtgggcggcctgatggatctgtgccagagcaagcgcggcgtcctgatcgatatgaagtatctggacgatgtgcgggtggatctgcactacgcgctgccgctgggcgagatcgtgtacgacttctttgacgccatcaagagccgcagccggggctacgccagctacgactatgagttcaaggagtaccgcgagagtgatctggtcaagctggactttttgctcaacggcgaccccgtggacgccttgtccatgatcgtgttccgggacaacgcctacgccaagggacgccgcatctgcgaaaagctgcgggacaacatcccgcgcaacctgttcgagatcccggtgcaggcagccatcggcggcaagatcattgcccgcgagacggtcaaggccatgcgcaaggatgtgctggccaagtgctacggcggcgatatctcccgtaaaaagaagctgctggaaaagcagaaggaaggcaaaaagaagatgcgtcagctgggcagcgtttccctgcccagcgaggcctttaccgccgtgctcaagctggatagcgacgacgattgatctgcaaatatgcaaaagggatgctgcgtgcgcggcatcccttttttgatgggaactcccaaatgtgaaatccgcccatggcagagatgcactctttgcttttcctactaaatatgttataatttatttatatatcagtttttgtatccgtttttggaaagatgggctgcggccttgtgctgcgcccttctctatgcaacgttccccggcagaaaggatgtggcctttatcaaagcaaaacacggaaaaggcgcagcgcaaaacagcagacatacacacagtggcggcgcacagagggcaacgcccccctggaagcaggtgctgctgacgctgctggttcttgttgccctgctcgccctgctgggcggggcgctgtggcagaatatctgctataaccgcacccactatacggcagagttctatcagatccattcccgcaagctgacccagagctgccgggtcgtttttctgaccgatctgcatctgcgggagtacggagcagataactgtgagctggtgcaggatgtccgcagccttgccccggatctgatcctgctgggcggcgactttgtgacctacggcgaaggcaccaattatgataatatgctttccctgttccgtcagctgagcgagattgccccggtatgcggagtgctgggcaaccacgaggacgagctgtattttctggacaacgaccgggaactggtggaaaagttcaccgccgccggggtgaccgtcctgcgcaatcaggaggcgcgctataccatccacgacaatgtcatcagcattctgggcgtggagggcagcccggcggatttttccaactacggtgccagcacctttatggacagcgtggagccgcagacagactacgacctgcgcatctgtctggcgcatgtgcccacctactttaccgagcatctggaaaattattcctttgagctgggtcttgccgggcacacccacggcggcatcgtgcgtctgccgaagatcggtccgctttataccgccgaggagggctttctgcccgactatgccgggggcagctatacgcttgccaacaacgccaccctcattgtaagccggggactgggcgattccagctgggcgccccgcatcaacaatgtgccggagctttcggtcattgacatcgattaagcagcctgcgctgcgcgtgcaggccgctgcaaaagggtagaatgccatggatgacatcaaagaaaagatcaaacaggcgctgcgccatatctggacaaataaataccgcctgtttctctgcctgctgaccttgtgctgtctgttcgggctggttcactatttcaaaagtgcggacagcgccactgccagcatctccttcaattactccgaggcttcgctgggcttgaaccccaacaagacccgcttcaacgcctacgagatcgtgtcggacgaggtgatggagcgcgccatccggcgggtgggcctgcaggacagcctgactgcctcccagctggcagagtgcctttatttgagcccagacggcaccggcagcgccaacggcagcgagtatatcagcaccaactactatctctccatcaacacccgcaagctgaacctgggcaaccgcaagcccacagatcttttgcagagcgtgtgcgaatcctaccgggagatctttctgagcaactactgcgataaccagagcatcctcaaggaaaaactggaagtgaccaccgcgtgcgaaccttacctgcgactgaacgagctggaggtgcgcgccgctgcgctgaaccgctatctgaacgcccgtctgggggaaaacaaaagctttacggacgatacaaaccccgacccttccaccaacaactttaccacactgggcaaaatgatcaacaatctggtggattacgacctgcccaacgccatggcctttgtcatcgagggcggcgttgcccgcgacccggccatgctgaccagcattctggaatacaagaacaaaatcgacgatattgacatgcgcacccagcaggcttactatgacgccgacaaaaagggcatttccatctacgaaaaatccatgacctccatcatgatgatccccaccgtggatgaagcgagcgagtactatatgtcccgcaccaagaccgccatggatgcgctggcgcgggcggcagacgcttctctggccgatgccactgactaccagtccgagatcgtgagcacgaattatgtgatccagaagatccgggagctggatgccggccagccgcgtctggccgaggcgcaggccatggtgaacaagctggagaccgccatcaacgagatctcggagcagttgtttgtactggacaaggcgtatatcaagtacaaatcccagaactatatcacctttacctacggctcggcctccttcctgcagcgcctgagcctgaaaaagaccctgatggagtccgttgccgtgatgctgggcagcgcatggctgctccacgaacgtaaacgcagaaaggcaaggcaccgcagatgaaaaagtttgagatcctgcgctatctgaagcgtttcagcctgctgatctttctggtgtcgctggcaggtgcggccgccatctacctgtatgcggacggtcggcagaagtacactgcatcggtcattatccgctataccaacgacggcatctcggacggctacaccccggacggcagtgagctggacgtcaacgagatctactcctccaccgtcatctcgcaggccatggatgcactgggtgcttccgggcggctgagcaccatccgttccaacatctcggtgaccccggtgatctcggaagatcagcagaccatcaacgaggcactgctgcaaaagggcgaagaggtgacctatttcccggatacctacaaggtgagccttgtggtggatggagagcagggcgcgggttatgcccgcaatatgctggatgccatcatccagagctactgcacctattatacggaaaaatatgtggagcagaaactctcgctcaacccctcgtccggtctgctggacaatggctacgattactacgagtgcatccgcattctggaaaacgataccaacgagatgcaggactatctgctgagcaagcgggagcactacccgaattttcgctcctcccgcaccggctacacctatgcagacctgtgcgatatctattccgacttcaaaaaatacaccatcccggcgctgtacgcctatgtgctcaacggcccgcaggtgcgggacggcacggtgctgcaggaatatctggccaacaccatcgaaactgcaaagcagaacgaacagatcaccaccgagcagcgggacagtctgtggagcctgaccgaccagtatgtgtacaagaacgccgatctgctgcaaaactactttactgaccggggcgaggtggtgtcctcggactatatcctgaataacatcgagctggaaggtgctggcgataaggcacagaccacctacgacggtctggtgctgaaactggtatcgctggaacagcaggtcgcatccagccagatcgaccggcagtttcaggaggagatcctgcaaagcttccgcaacgtggattttggcggtacaggcgagcagcacgccaagatggaaagcatgatcaacgactacgaggcgcagctgaaaagctactacgagatcatcaataccagcagcaaggagctgaacctgtacatcagcgcggattatctgaagatgatcagctcggtgcaggtggctgccgccatcaatgtcaagctgtatctgatgctggcgctggtgctgttctttgtcatcggctgctgcggtgcaattctgctgggccgcatctcggatgcggtggattatctgctgtatgtggacaaaaagaccggtatgcccaaccgcgaaaagctcaacgtgtatattaccggcatggccgaccgcatcctgccggaggactatacctgctttgctttgcagctggacaacctgaccgagatgagccgccgcttcggctaccatgtgggtgacggcatcctgaaggatttttccggtcttttgcagctgatgggcgataccgacggcacggtgggctacaacggcgcgggcaagttccttgccttctttgatgaatgcagcacccggaaggcagaggtcatgatccgcatcctgcaaagtcaggtggacgagtacaataagctcaacccggagtaccccatcctgttcaccgccgcatgggccaccacctcggaggaggagctctaccatgtgcgcgaccttgtgcgctgcgcacagaaaaagatgtccctgatcgcagaggagggcggcgctgtccttgccggaacggagcgtggtgaagcatgatccagaaccgacgcgcttatcagctgatccactgccgcacccgcagccgtctgctggcgggcgctgccgccgtgtgcggcgcagcctgcggccatgcagaccttgggctgtaccatctgctgcaccggggcggtgccccgctgccggacagcacacaggccgaccgcgccgcgctggcagccctgtgcccgaaacctgcagcagaagagacctgcccgctgctgccgccgcaggacccggcggtgaccctttcggtcattgtgccggtgtacaacggcgaagctaccatcggcccctgtctggacagcattttgcagcaggagaccagctgcaccgtgcagctgatcgtggtggacagcgattccaccgacggcacagccgccgtgctagaacgctaccgggcactgcccggggtgttgctgtgcaattgcagtgcgccccgcagcgccgccgccgcccgcaacgagggactgcgccacgccgtgggccgctggctgatgttcgtggacagcgacgatctgttattgcccggtgccatccgcaccctgctggaggccgcacagcgccttgacgccgatgtggtgcagggcggctggcagtacctgtacaccgacggcacccacggcccggtgcagcgctacccggcggcagtctacgccggtgccgccgcgccggagcggttcgagctgcccgggatgccatggggcaaggtgtaccggcgggaactgtttgcacaggtgcgctttccggcttactatacctgctttgaggatgccatcatccattttctggtattccggctggcaaagactgtggcctctgtgccggagatggtctatctgtggcgcaaaaaccccaaggggcttaccgccacaagtcagcaccgccctgccgccgtgcagagctactggatcatggagcagctgacggtgcaggatgctgcgctgggcctgccccacgatgcgctgtaccgctgcaccctgacgctgcagctttcggctttctgctatgccaccgtatccggcctgccgccggaaacgcagcaggctgttttccggctgtgctgtgctttgtacgcaaaggcactgccgcaagagggcgcactgccccgccgcgcccgctggggtgcccgggcgctgcggcagcaggactttgggctgtggtgccgctacggcagaagatttcagttgttataatataaggagtacccatgatacgagtgctgcattcggtcagcaatatggaccgcggcgggatcgagaccatgctgatgaactactaccggcatatcgaccgcgaaaaggtccagtttgattttatcgtcaacaagcaaaagcccggcgattacgacgacgagatccgccgtctgggcgggcatatctaccagagtccgggattaaacccgctgcactacccggcgtatctgcgctttgtgcagcagaccgtggccgcagacccccgcatccgcatcctgcacgcccacaacgaggcgatggggctttatgccctgaagggtgcggagaaggccgggctgcaagtgcgcattgcccacgcccataatatctggatcgtccgggactacaagtggccgctgaagatgttctgtaagcagctgctgcccggcgccgccacccacctgtgggcctgcggccgggatgcgggcatctactactttggcaaagcggactgggagcgccggggacagatcattcccaacgccatcgagccggagaccttccgcttctcccccgccgtccgcgccgaaatgcgggcgcgctacgggctggaggaccgggtggtgctgggtcatgtaggccgctttgatgtccgcaagaaccacgagcgtctattggaaatctttgccgcctttttgcagctggagccccgggcgatgctggtgctcattggtaccggcaggctggagcaggctgtccgtgcacaggcgcagacactgggcatcacagaccatattctgtttgccgggttgcaaaacaatgtggccgactggtaccagatgatggatctcttcgtcatgccctcccgctttgagggtctgccggtggtggggatcgaggcgcaagccgccgggctggggtgcgtattttcggacgcagtgccggcggaggtgctgctttcttcccatgccatccagatcccgctttccgccagcaatgcagactgggcagcaggcttgcagcggatgctccaccagccctgcgaccgctctgctggtgcagaactgatccgacaggctggctacgatatcaacatcgccgccgcccgcttgcagcagcagtacctgcaactgggagggcaggcgtaaccccccggcggctgcgggaacacccacaataaaaggagagcccttttcatgcgcacattggatcagatcctgaccaaaaaggattacagccggaaaactccggcctctttgttttataaggacagcccgctgtggcaaaaactgctgaccatcggttgcgtggtctttttggccggtgccgggctgggagagtggaaaccaatcaacagcgcagtgggcggccttcccaaagccatctctctgggggtgatcgggctggcaatgctgtacactctgttttacccggacgaaaagcgtctccgggagttatggaagcctaccctgctttatatgtccctgatggcggcgctgtttttctggtcgatggtcatctggatcgaaagctttgccgcagtgtcttccatgatccgaagctgctccaagatcgtgttccagagtattgccatcctcactgccgtggcgctggtctatctgttccgggaaaaagccatcgagctgtttaccatcagcatctgcattgccaacacggccatcatgctgctgagcattcctggctacggttttgcagccagcatccagtctctcgttacctgtctgatcaccttcggtgatgcggatggctatgcgctgcagctggagattcacgacctgacctttgtgttcgggcagatgatcttgtactacgccgtttttgctcctcgtactacccggcaggaaaagcgcaagcgctggctgtatctgctgctctgctgctggttttttctggtcggcatgaagcgcatcgccatcccggcggtggttctgttcgtcctgatcgctctgcttctccgcaagcgcaaagtccccggctggttttacccggcagtgggcgtctgctgcatcctgttttttctggcattcctctactgtgtgcgctacggtgttatttcaaggttgctgaacagttttggcattgacatgatgggacgggactatctgtggagcatggcgaatccctactatgaattttctatcacctatatcggccgcggttttgaatatgtggacaccatcatcgcccagtggtataatgacggactcatcaaccagccttaccccttccacaacgacatcctgaaggtctttgtagaggtaggctttccgggttttctgctctggtccagcatccagtatgttctgactccgctgttctggcagcgctatgcagaccaagagaccacgttgctgtatctgtccgagctaggctatatgacggtgacctacctgaccgataataccgccttttatttctggagcacgatggcgctgcgtctggtgacgcttgcctacgccatggagcgcaaaaagcccccggaacccaaggtgtggatgccggacagtcggcaggagatgcgggaccgcatccatattctgatgaaggaagtgtgacggcaaggagtgaaaacaatgccctgtatctcgtttatagtgcctgtttataatatggagcgcctgctgccccgggcgctgcgctcactgcgggcgcagactttgaccgacttcgaggccattctcatcaacgatggctctaaggacggcagcgccgcgctgtgtgcacaggctgttgccgaggatgcgcgctttcgcttcatcgaccagcccaacggcggcgtagccgctgcccgcaacgcgggtctgaatgctgcccggggagagtatatcttctttctggacccggacgactgggtagagccggatgcggcagaagtgctgtatcatgccgcccggaatgctgatgcggactgcgtggagtttgggctgtatctggacagctatgatgaaaacgaccggctgctgcacacgcagaccagcggcagcaccctctccggcgtgtaccggggcgcgcccttcaaggaacatttcgacgagacggcttcctcgtatctggtcaccaataagctgttccgccgggcgtttctggagcagcatcggctgcgtttctcctgccatcagctgggggaggacgggctgttctttgtagccttttatcgtcaaaatcccggctgtctggtggtgctggaaaagccgctgtaccactacaccgctgcccggcggggcagcctgtccaacagctaccacccggagcgtctggaggataacttttatctcagcgatgcagtgtgggacaccgttgccgcatggggcttacaggacagccccatgcaccgcgcaaaggcgagctactgcacgatccgcgacctgatgatgggaatcaagaatcttggatgcagcccgctttccctttccgagcagactgcttggctgcgcagtaccctgcaaaagccccgggtgcgcacggcggtgcgcagcaccccactgcacgccatgcagagccggaacgaccaggtaaagctgttgctgctcaagctgcggctatgccgcgcggtgctgctgctctcgggcgcaaatcagcgtaagaatacctgaagagaaacgcaaaaatccccccgctgccgact

SEQ ID NO: 449 - DNA, 11618 bp, unidentified
  source 1..11618: mol_type = unassigned DNA
atgggaaacgagcagcttatgaaccaagaactattcaacccacaatcttcttccgtaagttcctcccgaatcatttacaccccatcaacctttgcccggacatccttgctccatctgcaggaggtcggctctttgcaggctgttcacccgcatatatctcagagagagaatctggtgtcgtttctttgctttatcgttctgtctggcgaaggtgaactttcctacgaggggcagacctatcaattgcacgcaggcgattgtgtgttcatagactgccgaaaagcctacagtcattctacctcggatgacctctggtcgctccaatggtgtcacttctatgccccatcccttccggctgtgtatgagaaatacaaggagcgcggcggtcggccggtgttccacccggcggatatcaagccatttacggatttacttacagagctttataacttagcttcctcatccgattacatccgggatatgcggatcaatgagaagctggggacgctgttgacgctcctgatggagcagtcttggcatccagagagtgcgacaataagccggaagagaatggaactggcagccgtgaaggagtatttagacgatcactttacagagaaaatcatgttggaagagttggcagaaaagttctttatcaataagttctatctgtccaaaatcttcaaagagacttacggaacgacggttaataactatctgatctcaaagcggattaccagagcaaagcagctgcttcgcttcacagatatgactgtggatgaagttggtgttgcggttggcatggaagatgcaaactacttcagccgaatgttccgcaaagtagaaggaatcagtccaagagaatatcggaaacagtggtgacattgaggcacagcgagaaatcgctgtgctttttttgaagtatgtcgtgagaatgaaactatctgtatctgtttcttctccggggcggcgtatacaaaaaatatgacagaaaaagctaaatgggggaggtatctggctatgaaggacttattttttcatgattctcaggatgactcccccattgttttttcagaccgcgttctttacaccccgacatcttttgcaaagactgcccttttatatctgcaggagatcggaagcctgcaggcaaagaagccgcatacttcctcccgcacccgtctgtcatcatatctgtttttctgtgttaattccggctccggtgagctggaatatcaggggaggcggtataagctgggtaagggggactgcgtattcattgactgtcagctgccgtactcacacagtaccaatacagacctgtggtctctgtcgtggatccatttttccggtgtgaccatgcagactgtttatcagaaatatcaggagcgcggaggacggccggtattccgatcggataactttgccgatttccagtcactccacaggtcgctgtttgatcttgcagcttcagatgactatatccgggatatgcggatcaacagtggcttgaatgaactgctggtactgctcgtgaatgagtcgtggcacccggcagagcatccggaccgggcactgaaaaagcagaatctgttgccggttcggaactacctggaagcgcactatacggataagaagctggaggacatcggctaccggtgcggtcttggcgcaccacattatttcagccgcatcttcaaacaggtcgagggcatcacaccgtcggagttccgtgagaagtggggcgaggcggggcactgagacaaaagaaaaaggaaagacacagaaaccggccggatggctggaaattctgagaaaagaggagagaaagaaatatgaagagcttgtattcaatgtttttatcccaggcctatcaggactgctgggatgattacaaccgttccgtgaaactgaaaaatttccccagatgggattatgtgatcctgacggcatccaatgaccagcaggcagagggattccgcaggcagatcgaggagcggaaggagtatcttccggcagggacaaggtttgcagcggtcccggaccggggtggcgagcgtgtgggttccggcggtgcgacgctggaggtgttaaagtatctccatgagcaggagggagatttccggaagctgcgggttctggtcatccattccggtggtgacagcaagcgtgtgccgcagtattccgcactggggaaactgttctcgccggtaccccatcagctgccggatggacgcagctctacactttttgatgaattcatgatctgcatgagttcagtcccgtcccggatccgtgaggggatggtgctgctgtccggggatgtgctgcttatgtttaatccgctgcagatcgactataacaatgtcggtgcggcggcaatctcctttaaggagcgcgtggaagtcggaaagaaccatggtgtgtatgtgaacggggaagacggcaacgtgaaatgctgcctccagaagaagtcagaggaggaactgcgaaaggccggtgcggtgaatgaggcaggctgtgtggacattgacaccggtgcgctgatcttcagcaccgccatgatggattcgctgtattccctgatcgggacagaggaagggtatgaccggtatgtcaacgggacggtgcgtctgtccctgtatgcggattttctctatccgttagcggagaattctacgctggagcagttttatctggaaaagccagaaggggaattctgtgaggaactgacagaagcgagggaacaggtgtggaaggtgctccgtccttaccggatgaagctgctgcgtctggccccggcgaagttcatccactttggcacgacaaaggagattctggcactgatgtgcggcggcgtggaggagtatgccagccttggctggagcagccgtgtggcaagcagcatcagcggcagcacggccgggtataacagcgtgctgagcagccatgcctccattgggaaagactgctatctggaggtatcctatgtccacagccatgcaaaggtgggaaacaactgtgtcctttcttttgtggacatccacgatgaggtgatcccggacggggtggttctgcatgggctgaaacagcgtgacgggaagttcgtcgtgcgtatctttggcgtgcaggataatccgaaggagaaccggctgtttggcagggatctggatgaggtggcagaaaagctcggcacggctctctgggatggcggaaaccataccctctggacggcagaactttatccggagaaggacaccgtgagggaagcggtggcagcggcgctgaacctgtatgcgcttgtgaccggggaaggcaggctggaggactggaaagagagtccgcgcaagtcgctgtgttccggcttcaatgcggctgacccggatgccatcatcgcatggaatcgccgcatggcagaccttgtgatgatggatgaactggcaaaagcaatccgcggacaggtaccggcacagacgcttccgaagcgtaaggcactgacgaagatccagagacactggctggaaaaacgccttgcaagggcagatttcagtgagaagctccgcctgcattattatcttggtgtggtgctggaggatgagaacgagatacagaagtgctttgggaccatccagtcggaagtgctggaggctacggtgcgcagtctcagctataatgagaaggcacacatcgtgaaggatgcccataccgtggaactgccgctgcgtgtgaactggggcggcggatggagcgatacccctccgtactgcaatgagcatggcggtacggtgctgaatgcggcgatcctgctgaacggtgagaagccggtggtggtgaagctggaacgcatggatgaactgaaggtagtctttgacagccgtgacatggatgtacacggggagtttgaggagatcggtgagttacagcgcaccggagatccgtttgatccttttgctctgcagaaggcatgtctgcttgcctgcggcatcatcccgatgaaagggaataatctgaaagagatactggagcgtctgggcggcggttttgtcatgcattcagaggtgacaaatgtaccgaagggttccggccttggaacttcatcgatcctttccgctgcctgtgtgaaggcggtgtttgagttcatggggatcggatatacagaggaagatctgtattcccatgtactggccatggagcagatcatgtccaccggaggcggctggcaggatcaggtgggcggtgtcacaccggggctgaagtacatcacttccatgccggggattgaccagaagctgaaggtagtacatgtggaaatcccggaggaagcaaagaaggaactggacgagcgtttctgcctgatctacaccggtcagcgcaggctggcaagaaacctgctccgtgacgtgatcggacggtatgccggcaatgagccggatagcgtgtttgcgctggaggagatccagaaggtggcggcgctgatgcggtttgaactggagcgcggcaacgtggatggctttgcgaagctgctggattaccactgggagctgagtaagaaggtggatgccggaagcagcaacacgttgatcgagcagatcttcagcagcattgaggagctgattgatggccggctggtctgcggcgcaggcggcggtggatttttgcaggtcgtgctgaagaaaggcgtgacgaagaagcaggtggcagagcgtctgcatgaggtgtttatggacagccttgtggatgtggcggactgtgagctgttgtgggaataagagatatattgtgtgttcgagacaggtcgagactttcgcaaaactgcatggatacagttgcgtatatttcgtaggcactaaaaaaccaatattatgctaataaagcactactttaacacttaagagaatgtgccttaatttataaaatacaagtgtgcgacaaaatgaagcacaatccatcaaacgtcagagaggaataaaatacatgaaaaaggcacttatcacgggtatcactgggcaggatggttcctatctggcagagtttctgctggagaagggctatgaagtccacggcatcgtccgccgtgcttccatctccaacacggctcgtattgaccatctgattgagaagaacgcgattaccctgcacgacggagacctgaccgattcttctggtctgatccgtctggtgggcgaaattaaacctgatgaaatctacaatctggctgcgcagagccatgtccaggtttccttcgatgcgcctgaatattccggcgatgtagacgcgctgggcgttctgcgtgtgctggaggctgtccgcgtctgcgggctgacgaagacctgcaaggtgtatcaggcttctacctctgagctgtacggcaaagtcgaggagattccccagcgtgagaccaccccgttccatccctactctccgtacgctgtcgcaaagcagtatggtttctggatggtcaaggagtaccgcgatgcttacggcatgtttgccgtcaacggcatcctgttcaaccatgagtctgagcgccgcggcgagaacttcgtcacccgtaagatcacgctggcagccggtcgtatcgccgagggtttgcaggatcatctggaactgggcaacatggattctctgcgtgactggggctacgcgaaggactacgttgagtgcatgtggctgattatgcagcaggataagccggaagacttcgttattgctaccggtgtgcagcacactgtccgtgactttaccgagaaggctttcgcagccaatggcatcaccatccgctgggagggtactggcatcgacgagaagggctatgatgcagcgactggcaagatgctggtctgcgtgaatccgcagtggttccgccccaccgatgtggacaacctgtggggcgaccccaccaaggcaaagaccgtgctgggctggaatccgcagtccacgacttacgagcagctggtggagatcatggccaagcacgaccgtgagcgtgcaaagcgcgaaaaggcgctgaaggcagttctgtaatttggaaagaaggcaattctgttatgatggaaaagaatgcgaaaatttatgtcgcaggtcatcgcggcatggtgggctctgcaatcgtccgtgaactgcagcgtcagggttacaccaatatcatcacccgtacgcacaaggagctggatctgacccgtcaggatgctgtggaagcgttcttcgcacaggagaagccggagtatgtgttccttgctgctgctaaagtcggcggcatcgtggcaaatcaggaagctttggctgattttatgtatgacaatatgacgctggagatgaacgtcatccacgctgcatggaagaatggctgcaagaagctggagttcctcggctcctcctgcatctatccccgcatggcaccgcagcccatgaaggaaagctgcctgctgaccagtgagctggaaaagaccaacgaggcttatgcgctggcgaagatctccggtttgaagtactgcgagttcctgaaccgccagtacggcaccgactacatcagcgtcatgcccaccaacctctatggccccaacgacaactatcaccccacccacagccatgtggttccggcactgatccgccgcttccacgaggcaaaggtcaacggtgtagagagcgttacctgctggggcgatggctctccgctgcgtgagttcctgtatgtggatgatctggcaaacctgtgtgttttcctgatgaacaactactccggtaacgaaaccgtcaatgccggtaccggcaaggagctgaccatcaaggagctgaccgagctggtcgccaaggtcgtgggctacaccggcgagatcaagtgggataccaccaagcccaacggtactccccgcaagctgctggatgtgtctaaggctaccaatctgggctggacgtacaagacggaactggaagacggtctgcgcctgtcctacgaggacttcctgaacaacccgatgcgtgcagagcgctaaaaataaacaaacgatttgaaaaggtcgtgtgtttgtgcagaaccacgacttttttgatagaggcaggaggaaaattatgaatctggtgttattgtctggaggctccggtcagcgcctatggccgctttccaacgatatccgttccaagcagttcatcaagatcttccatcgcgaagacggcgagctggaatccatggtgcagcgcgtctaccgtcaaatcaaggcagtcgatacggatgcaacggtcaccattgccacctccaagtctcaggtctcggccatccacaatcagctgggtgagaatgttggcatcagcgtggaaccttgccgccgtgataccttcccggccatcgcactggcagctgcttacctgaaggacgtgcagggcgtcggcgagaaagaatccgttgtcgtctgcccggtagacccctatgcggagaatgattactttgagacattgaaagcgctgagcgaccgtgctgccgtcagcagtgcaaatctggtcctgatgggcattgaaccgacctatcccagcgagaaatacggctatatcatccccatcggcaaagagcaggtcagcaaggtgtccatgttcaaggaaaagcccacgcaggaagtggcaaaggactacattgcaaagggagcgctctggaacggcggcgtgtttgcgttcaagctgggctatgtgctgaaacgtgcccatgagctgatcgattttgtggactataaggacctgttcaacaaatatgacaccttgaacaaaatcagttttgactatgccgtggtggagcacgagccggagatcgaagtcatgcgtttcgcaggcacttggaaagatctcggcacatggaacaccctgaccgaagcaatggacagccaagcagtaggcgaggcgctgtttaatgagaagtgcgagaacgtccatgtggtcaatgagctggatgtgcctatcctctgcatgggtctgaaggacgtggtgatctctgccagcccggagggcattctggtctcagataaggagcagtccagttacatcaagcccttcgtcaacacgctcgaccaccgagtcatgttcgctgaaaaatcgtggggaagctttaaggtcatcgacatcgacaaggcttccatgaccatcaaagtaaccctgaatgcaggccaccagatgaactatcacagccaccagcaccgggacgaggtgtggacggtcattgcgggcgagggcaagaccgttgtggacggcatagagcagaacgtgaaggtaggcgacgtgatcaccatggccgcaggctgccgccatactgttattgccaaaacaaaactgaagctgatcgaagtacagctgggtgaagcaatcgacgtccacgacaagcagaagtttgcactggaagattgagatacaacaggagactgttgggaaggatacttttccctgatgcatacattcaactgctaaattgtggagtgtatatcatttatgcattaaagagccgctcatatagcgatagcaatcggaagaatttttccagcgcctgatttctctccccgcgcaatggggcagtccgctttgcgcgtgttgatgttttttcaacttgcatacagccatccgcttctctataataataggtaactgtgatcaaacgatcgcggaaagcgaaaaggagcgttggcttatgaagattgttttgctggaatcacttgctgtcagcgatgaagtcctccagaaatacacgcgcgatttggagcagaaagggcacaccttttgcgcgtattcccgctgtgaggatgaagcagccctttgcgaacgcgcgaaggatgcggatattctcctgctggcaaacatgccgctgaagggcagcatcatccgccaatgcacgcatctgcaattcattgatgtggcgttcacaggcgtggatcatgtggatttgcaggctgccgaggagatgcatgtggctgtcagcaatgcatccggctattccaatgagtccgttgcggaacttgcgctgggcatggcgattgactgcctgcgcaacgtggaggcggtctccgcgcgctgccgtcagcaggggacgaaggaggggcttgtcggccgtgaactcggcggaaaaacggtcggcatcatcggtttcggcaaaattggcaggcgtgcggcggaattgttccatgcctttggctgtccgattcttgcatatgacagcaatcccattgcgcaaatgccggattatgtgcagcaaacttcgctggatgaactgctgcgtcatgcggatgttgtctccctgcattgcccgcttgtggaaagcacgcgcggcctgatgaatgcggaacatatcagcatgatgaagcatcgtgcaatccttatcaacacttcgcgcggccccgttgttgattcgcaggcgctggccgatgcgctgaacagcggacatcttgctgcggcagcggcagatgtgtttgaaatggagccgcccatcccgcgggaacatccgctgctgaacgcgaagaactgcctggtgacgccgcacattgcttttgccagcgaggaatccatgcttcggcgggctgaaattgtttttgacaacctctatgctttcttgcatggcgaacagaaaaacgtgattttgccgcgctgaggaatcgcccatgaaaatttatgtgaattgtaatcagcctttccccggtatggggacgaaggcttgccccttttcaaccattcagcaggcggcagatgctgccatgccaggggatgaagtgctggttgctcccggcatttatcgggaggatgtacaccctctgcgcggcggcagcgaagaaaaccggattatctaccgcgccgaagtaccggggcagagtgtgattaccggggcagaagtgctgtcacagtgggaagaatgcggctgcggcatctggaaaaccgttatccccaacgacgtactgggtgaggataatccgtttgcggatttgatttcaggcgactggtactacgatgatgccgccgagcctgtacaccgggcagatatatatcttgacaaccgatccctgcgcgaggttttcacgcgggaggcgctgcttgccgctgaaccgtcgccgtatgcgtgggatacggaattctcccgcaatgtgtggatgagcgaacgcacagagacagaaacgaccctctatcttcatttgctctgcggttctcctgatggtcatcttttggagtacagcgcgcgccgccattgcttctaccccatgaaaacgggtatccattccatcacgctctccggctttgttttttgcaaggcagcgccgcaatgggcgccgccgacagcctatcaagagggcatggttggcccgcactgggcaaagggatgggtcattgaggactgcgagctgtatgaaagcaagtgcgtcggcatttcacttggcaaataccttcagcccaataacgaaaacaagtggcgccgcttcgggctgaaacatggaacgcagaatgaacgggacgccatctgccaggcgcagctggaaggctgggatcgggcgcatgttggcagccacgttatccgccgctgcaacattcacgactgtgggcaggcaggcattgccgggcatcttggctgcgttttctccgtgattgaggacaaccacattcaccatatcaacaacaagcaggagctgaacggcgccgaaattggcggcattaagctgcacgccgctattgacaccatcattgcgcataatcacattcaccattgtacacgcggattgtggctggactggcaggcgcagggaacgcgcgtgacgggcaatacatttcaccacaatcagccgctgtgcgggcgaaaaatccgcacacagctgagctttggcgaagacatttttgttgaggtcagccatggcccgaccctgattgaccacaaccttctgctcagcccaatggcagggcgcatcagcacacaagggattgcatttgcgcagaacttgattgccggttcgtacacctttgtcggtgcgggaacaaacaacgccgggctttctcgccctgattccgtgcgctacacgccttaccatgtgccgcatcagacggctgtggcgggcttcatgtctattctccacggcgatgcgcaattctggaataacctgttcgtgcaacagccgatttctgaggaatatacggcctacatcaacagcattggcaaaaatcagctgtgcgaaatgaacctcatcgtcggtacgctgccctatcagggcttcccgacagaaagtgaatacctgtcacaatttacaccagagcgcattgcaggcgaccgcggcatttactatggtcatctacccgtcaaggcgggcggaaacgtctatctgaacggcgcgcagacggcggattgtgatattggcagtgtcaccgtgccagcccctgtgacttttgcagtcacggaaaacggcttgacaacaaacctctatgattttcttccagcggtggatacgaagtgcgtctgcagcgatgtgctgggcagtgcctttgagcctgagcagcgctatgaagcgccggatggatcaccgctgacgcttgatacggatatgtgcggacagaagcatgttccctctccgctgccggggccgtttgccgcaccaatttcggaactgcatttttaa

SEQ ID NO: 450 - DNA, 24470 bp, unidentified
  source 1..24470: mol_type = unassigned DNA
  misc_difference 16767: note = a, c, g, or t
  misc_difference 16768: note = a, c, g, or t
  misc_difference 16769: note = a, c, g, or t
  misc_difference 16770: note = a, c, g, or t
  misc_difference 16771: note = a, c, g, or t
  misc_difference 16772: note = a, c, g, or t
  misc_difference 16773: note = a, c, g, or t
  misc_difference 16774: note = a, c, g, or t
  misc_difference 16775: note = a, c, g, or t
  misc_difference 16776: note = a, c, g, or t
  misc_difference 16777: note = a, c, g, or t
  misc_difference 16778: note = a, c, g, or t
  misc_difference 16779: note = a, c, g, or t
  misc_difference 16780: note = a, c, g, or t
  misc_difference 16781: note = a, c, g, or t
  misc_difference 16782: note = a, c, g, or t
  misc_difference 16783: note = a, c, g, or t
  misc_difference 16784: note = a, c, g, or t
  misc_difference 16785: note = a, c, g, or t
  misc_difference 16786: note = a, c, g, or t
  misc_difference 16787: note = a, c, g, or t
  misc_difference 16788: note = a, c, g, or t
  misc_difference 16789: note = a, c, g, or t
  misc_difference 16790: note = a, c, g, or t
  misc_difference 16791: note = a, c, g, or t
  misc_difference 16792: note = a, c, g, or t
  misc_difference 16793: note = a, c, g, or t
  misc_difference 16794: note = a, c, g, or t
  misc_difference 16795: note = a, c, g, or t
  misc_difference 16796: note = a, c, g, or t
  misc_difference 16797: note = a, c, g, or t
  misc_difference 16798: note = a, c, g, or t
  misc_difference 16799: note = a, c, g, or t
  misc_difference 16800: note = a, c, g, or t
  misc_difference 16801: note = a, c, g, or t
  misc_difference 16802: note = a, c, g, or t
  misc_difference 16803: note = a, c, g, or t
  misc_difference 16804: note = a, c, g, or t
  misc_difference 16805: note = a, c, g, or t
  misc_difference 16806: note = a, c, g, or t
  misc_difference 16807: note = a, c, g, or t
  misc_difference 16808: note = a, c, g, or t
  misc_difference 16809: note = a, c, g, or t
  misc_difference 16810: note = a, c, g, or t
  misc_difference 16811: note = a, c, g, or t
  misc_difference 16812: note = a, c, g, or t
  misc_difference 16813: note = a, c, g, or t
  misc_difference 16814: note = a, c, g, or t
  misc_difference 16815: note = a, c, g, or t
  misc_difference 16816: note = a, c, g, or t
  misc_difference 16817: note = a, c, g, or t
  misc_difference 16818: note = a, c, g, or t
  misc_difference 16819: note = a, c, g, or t
  misc_difference 16820: note = a, c, g, or t
  misc_difference 16821: note = a, c, g, or t
  misc_difference 16822: note = a, c, g, or t
  misc_difference 16823: note = a, c, g, or t
  misc_difference 16824: note = a, c, g, or t
  misc_difference 16825: note = a, c, g, or t
  misc_difference 16826: note = a, c, g, or t
  misc_difference 16827: note = a, c, g, or t
  misc_difference 16828: note = a, c, g, or t
  misc_difference 16829: note = a, c, g, or t
  misc_difference 16830: note = a, c, g, or t
  misc_difference 16831: note = a, c, g, or t
  misc_difference 16832: note = a, c, g, or t
  misc_difference 16833: note = a, c, g, or t
  misc_difference 16834: note = a, c, g, or t
  misc_difference 16835: note = a, c, g, or t
  misc_difference 16836: note = a, c, g, or t
  misc_difference 16837: note = a, c, g, or t
  misc_difference 16838: note = a, c, g, or t
  misc_difference 16839: note = a, c, g, or t
  misc_difference 16840: note = a, c, g, or t
  misc_difference 16841: note = a, c, g, or t
  misc_difference 16842: note = a, c, g, or t
  misc_difference 16843: note = a, c, g, or t
  misc_difference 16844: note = a, c, g, or t
  misc_difference 16845: note = a, c, g, or t
  misc_difference 16846: note = a, c, g, or t
  misc_difference 16847: note = a, c, g, or t
  misc_difference 16848: note = a, c, g, or t
  misc_difference 16849: note = a, c, g, or t
  misc_difference 16850: note = a, c, g, or t
  misc_difference 16851: note = a, c, g, or t
  misc_difference 16852: note = a, c, g, or t
  misc_difference 16853: note = a, c, g, or t
  misc_difference 16854: note = a, c, g, or t
  misc_difference 16855: note = a, c, g, or t
  misc_difference 16856: note = a, c, g, or t
  misc_difference 16857: note = a, c, g, or t
  misc_difference 16858: note = a, c, g, or t
  misc_difference 16859: note = a, c, g, or t
  misc_difference 16860: note = a, c, g, or t
  misc_difference 16861: note = a, c, g, or t
  misc_difference 16862: note = a, c, g, or t
  misc_difference 16863: note = a, c, g, or t
  misc_difference 16864: note = a, c, g, or t
  misc_difference 16865: note = a, c, g, or t
  misc_difference 16866: note = a, c, g, or t
attgtcaatgattttacgtaattttgcaaactctttaactacgacaaactataggtttcgcacgtgttcaaacgcactatcaagataataatatggaccattacgggtctgtatctcaccatcgttacgcttttgcacattcccttcatacagaacactatcggggagtgtgtaggcgatgcattgtctgcgaagttgggcacgaaggtgagcatcggacgcgttgaccttggatttgtcaaccgcatcattatcgacgactcgcagatgctcgaccagcagaacaagcagatgctcaccgtgtcgcgtatctcggtgaaggtgaacctgttggcacttgccaacgggcagatagaaatcacctccgcccagttcttcggactcaacgctaacctctacaaggctacgccagagacgaaacccaactttcagttcgttatagactcgcttgcttcaaaggacaccacgaagcagcagacacctatcaaccttcaaatcaactcgctcattatccgcaatagctcggtgcgctatcgcctactctcaagcgcatcagtagctaaccgcttctcgcccaacgacatcgaggcgcagaacatcagtgcccacttcatagtgaaccgcatcaccaacgactcgctgaacgtgaaggtgaaacgcctctcgctgaacgagcgttgtggcttaacgctgcgccgccttgcgctcaacgccatcgtcagtcgcagcggagcacagatagagaagttgcgtctggaactgcccaattcgaccatcgagagtaagcgcatagcagccacataccgcatgaacggcgatgcacccgacatgcagtcgctgcgctttgaaggcactttaaacgcatcgcgcatcacaccccgcgacatagcctgcttcgtgccccagttgcggagcttcgacatgccattggctttaagcattggcttcaatggcactggcaacagtctgaacgtgagccacttaaacattgagaacattgaccacagttttgtcttcaatgccaaagctcacgttctgcgcaacgcccaaacgatatggcacgcggaggtgagccgtctcttcgcttcgaacgagactattggctctatttacaagaccattacaagcaacgaattgcccgacatcgtgaaccgcctcggcgacgtatcgctcaccgcaaaagccgacggcacggatgccgacggctcgctgagcacacagctcaactgcgctacaggcagcataaaactgacggctgcaaagaagcagaagactctgcgtgcgcacgttgagacacacaagttcgagctcggcaagttgctcaacagcgacaaggctggcatcgtgtcgctctcgctcgacgcacaaggcagctcgaaggacaacatcggcgtgagcggaagcatctacgacatcagcttcaacaactacacctatcgcaacatcaaccttaaagccgactacatcaataaagcactgaacggctccgcaaccatcgacgaccctaacctgcgtgccaccgtagaaggactgtttgaacatcgtagccccaccccacatctgcgcgtcaccaccgacgtgcagacgtttgcacctgctgcgctcaacatcacaacgaagtggaacggtgcacaattcgccggcacagccacatgcgacatcaagggcaacaatatcaacaatgcggagggacagatcgacatcgccgacttcacgatgcagaatgccgactcgtgctacgctatacgcaacatcaacgtcgagacaggcttcaacgacggcaaccacttcctcagtctgaagagcgacttcggcacaatcgacctgaacggacatttcagctacagctcgatggtaaggagcctgttgaacctcgttgccgacaagctacctaccataccaggactcaaaaagcaaccacaaaccgaccacaacgacttcactatcaatgcgtcgatacacaacaccgaatggctacaacgactgttgggcgtgcctcttgagatacaccgtccgctcagcctcagcggtgagctcgacgaccgcaataacagtatcgacctgtggtgcgacgtgccctcgttcacatacgccggcaccaactaccgcgacgcttacatcaacatcgagtcgcccggcgacacgctgaaagccgatgtacgcataaagaagattgcgcagaacggcaaggcgttggcactgaagctgcgtgcaggtgcgttcgacaaccacctgaacacctccatggagttccacaacgacgcacgccggtcgctatcgggcgtgctgaacaccagtgccgtcttcgcaaagaacgaaaagggagaatcgacagcatacatcgacatactcgaatcgcgcaccaccatcggcgacacaacatggcacatacaccccgcccgtgtcacctactacaaagaccatctcaacatcgacgggttccacgttagtcatgccaaccaagagataggcatcgacggcaccgcgacacacagcgttgacgactcgctgactgtgaagctgaagaacgtggacgtgaactacgtgctcgacctcatcaacttccactccgtagagttcgacggcagggcttcgggcacagcacaactggctggcatcttcggcaaagcaccgctcatcagctccgacctgcaggtagacaagttcaagtttgagggcggacgcatgggcacactctttgccaaaatcggctacaactcggaggaaggacgcatcgagttcgatgccgtggctgaggacgagggcgaccgccgcaccatcatcgacggctacgtgtcgccacgcaacaagtacatcgacctcggaataaaagccgaaggcacaagagcagagttcctaagcggattctgcgatagcttcatggacaacatcgatgccagcatcaacggcaaggtgaatgtggtgggtgcgttcaaggacatcaacctcatcggaaaggcgaaagtagacggcagcgtacgactcactgcgctcaataccacgtatgctctgcgtggcgactcggtgcacttcctgcccgacgagatacgcttctgcaacgacaccatatacgaccgccacaacaatataggcatcgtgacgggcggattgcaccaccacaacttctccaactggacatacgacatcgacgtagaggctcaaaatctgctcgcatacgacacacattcgttcgacggcgagagtttctacggcactgcgtacaccaccggcacttgccagatacgcggaaagagcggcgaggtgactatcgacgtgaacgccacaccagagcgcaacagcatattggtgtacaacgctgccgacaacagctcgctatcgtcgcaggattatatacaatggcgcacacacgaggtgaaggattcggttgaaacagagaacaataacaataatcatgtaaacataggcacgaacatcaagctcaacttcctcatcaactgcacacccgacgctacgctgaaaatcatcatggacgaaaagacgggcgactacataaagctcaacggtgagggcgtgctgcgtgctacgtatttcaataagggcaccttcgacctctacggcaactactatgttgaccacggaacctacaaactgactatacagaacattatcaagaaagacttcgagttcctcagcggtggctctatagcgttcggaggcgacccgtataacgccacgctcgacctgagcgcactctacgtcgtgaacagcgtgagccttgccgacctgaacatcggcaactcgttctcgaacaacaacgtgcgagtgaactgcctgatgaacatcaccggcacaccggagagtccgaaggtgtcgttcaacctcgacatgcctacactgtcgaacgatgcaaaacaaatggtacatagtctgctcaacgccgaggaggagaccaaccaacaggtgctctacctgctcgccgtaggtcgcttctacgcacagaacgacaacaacaacggagcatcgacacagcagttcagccaaacatcgctcgcaatgcagagtttccttagcggaacaatcagccagcagataaacactctgctcagcagcgtcataaacaacaacaactggaacttcggtgcaaacatatcaactggcaccgacggattttacaacgctgagtatgagggtatcctgtcgggcaaactgctcaacaaccgactgctcctgaacggacagttcggctatcgcgacaacccgaacacaacaaacaacttcatcggcgacttcgacatgaagtacctgttattcccgaacggcaacttggctatcaacgtctacaacaagacgaacgaccgctacttcacacgcaacagcctcaacacgcagggattgggcttgattatgaagaccgacttcacccgtatatcagacctgttcttctggaagcgcagcaagaaagcaaaagagaagaagaaataggagggtatggcatcctgccatacccacgcagcctactaagccctcacaccatctattaaaaaaccatactgcctatatggacttgccaaagatataaccactacaacctaacgacatctatgaaccgaatcatctgcatatatatccttctatttcttggcgtgccatgcctcgcgcagcaaaccaaggaacactcggcatacgcatggttgccactatttgaacaactctgcgactacgacgacatcgaggagcacgatatggaggacatgttcgaacaactctgcgaactcgaacagacaccgctcgacctaaacaaagctacggacgaagacctgctacgcctcttcttcctgtcgcccaaacaacgcgaagacctcaccgaatatctcgaccgctaccgtccactgcgttcgataggcgaacttgcactcgttgaatctgtcgacccactacgcaaacaactgctcgaaagcttttgcttcatcagcgaagcgaacgaggaacgcccatttcctacactgaaacagattgcaaagtacggcaagaacgagctggtggcagctacgcaagtgccactatacgaccgcgaaggcgaccgcaatggatacctcggatacaagtataaacattggttcagatacacattcaaatatggcgactacgtaaaggcaggactaacaggagcgcaagacgcaggcgagccgttcttctccaactgcaacaagttgggctatgaccattatgcctattatctgttagtcaggaagttgggacgatttaaggcgattgcgctcggacagtacaagctaaggctcggtttaggactgactatgaacaccggcttcacgctcggaaagacggcaacgacaaccatgtcaatacccactaacgctatcacaaccaactcttcgcgctctgaagcttactatttgcaaggggcggctacaaccatcagcgtaacaaaacatctggatgccacggcattcgtgtcataccgcaaggttgacgccacgcttaacgccgacggtacggtgaagacactgctgcgcacaggctaccaccgcacgcagagcgagatagaacaacgccacaacacctcacaattcgtcgccggaggcaacatcaactggaaagctaacggcttacgcatcggtgccacagccttcaacacagccttcaaccgcccactgaaaccaaacgaagcacaagcctatcaaaggtatgcgcctaaaggtatgagcttcttcaacgcaagcctgtactacgtctacacccactatcgcttctgcttcaatggcgaaacagcaatgaatggtgacgctgccgtagccactctcaacaccataacattccaagctaccaacaatctgcaactcactgctatacaacgcttctactcttaccgctaccactcgcttttcagtgcttcgttcagcgacggcggacacatacaaaacgaaaacggagtgtacgctgccatagcgtggcatccaattgcaaaactaaccctgacggcatacaccgactatgcttatcacccttggccacgctatggcgtgtcggctccgtcacattcgtgggacaacatgctgcaaaccagtttccagccgaatcgcaaatggacaatctcagcacgctaccgactacgtttacgccaaaaagactacaaagaaaacgacaaggcgaagacccaattagccgacaaaaatgagcagcgagcacgcctcactgtaggttatgagagtggcatctggaaaacgaagacacagattgatgctgcctatacgctcatcaccccacccctctcttcaacaatagtgagcaaaggatggatggcattgcaaacaatcgcggtacgcctgggacgtttcacattggctgccaacgctgcttacttccacaccgacgactacgactcacgactatatgcctacgaacgcaccacactctacaacttttcgttcccctcgttcttcggtgaaggcatacgtggtgcgttgtttttacgtgccgacatcagtaaggacctcgtactgataggcaaggctggcactacgaaatacttcgaccgcaacagtatatcaaacgctctgcaacagataaaccaatcgtacaagaccgacatcgacctgcaactaaaatggaagttctaaccacagttgtggtgtatattacacaaatcacatcgaaacacttggcacatcggctatttttcagtaattttgcacactaaaaagttgcacattgagaatgattaaacaatacttattattactgtttgtggcttgtctgtcgttcggtacttcaaaggcacagacaagcgattcgcttattgtaaaccgcttgcgcgcagagggcgtgaagttctcgcacaacaacacagtgacgctgttgatgaacggacaggagaaattcgacgacatgttccacgcaatacgccaagcacgcagcagcgtacatcttgaatacttcaacttccgcaacgactccatcgccaacatgctcttcgacctgcttgccgagaaagccaaggaaggcgtagaggtgcgcgccctgttcgatgccttcggcaacagctcgaacaaccgcccgctgaagaagaaacacctgaagtcgatacgcaaacgtggcatcgagatatacgagttcagcccattacgcttcccgtggattaaccaggtgtttcaccgcgaccaccgcaagattgtaatcatcgacggacagatagcctacaccggaggcatgaacgtagccgactactatatcaacggcacagaacaggtaggcgaatggcacgacatgcactgtcgcatcgacggcgacgaggtgaacacgctacaagccatcttcctgcgtatctggaacaaaaccgctaaacaaaacatacacggcgcaaagtactaccgaggcatacgtggcggatattactttgaaggactaaagcccgacacctgtcccactgctggaaagaagatggttggcatcatcaaccgcgaaccacgcaccacaaaccgcatcatacgcaccttctacgaaggagccatcaacgatgccaaggacagtataaaactcattagcccttacttcacactcataccgaaggtgaagaaagcactgcgcaaagctgctaaacgtggcgtgcaggtagaagtaatgatttcggaacgcggcgacattccgctcacacccgactgcgtattctacaacgcacacaaactgatgaagcacggtgtgaaggtgtggatataccgccctggcttccaccacacgaagataataatggtagacggcaagttctgcaccgtgggcagcgcaaacctcgacgcacgcagtttgcgcttcgattacgaagagaatgccgtcatcatcgaccaatgcaccacccgacaactcaacgacatgttcgaacgcgacaagaagaagagcgttatgctcacgcccgagtattggaagacagaacgcacaggctggcaaaagtttcgcggatggttcgcacatctgctcgcaccatggctgtaacgacaaaagaataatacgcaaattatataacagtaatacgctaaaatatgcactaataagaaaaaatagttgtaattttgcaaaaacagattattaacaaatcgtaagaatgtattacttcatatatttcataataaagacattgtcatacatccccttctggatgctatatgccatatctgacatcatgtattatccactctactacgtcatacgttatcgtagagagattgtacgcaagaacctcaccgagtcgttcccagaaaagagcctcagcgaaataataacgatagagaagaagttctaccgattctttatggacatgctccttgagagcagtaaaatagcttcaatctctcccgacgagataagaaagaggatgaagttcgtgaatatagacaaaacgaacaaactgcttgacgaaggaaagtcgttggcattcttcatggggcacttctgcaactgggagtggatgacctccgtaggtctgtggataaaggacgatgtagtatgtgcgcaggtatatcacaaactcatcaacgaaacgttcgacaaaatcataaaacaaatgcgtgagcgcatgggcaatatatgcgtagagatgcgacatacggcacgatttgtagcaagcatgaaagccgagaacaaggcgtgcatggtagcactcattgccgatcaatcacccaaaagaagacaaataaaacactatgtgaagttcctaaaccatatggttccggtactggtggggccagagaagattgctaatcacttcgggtatatgcctattttcgtaaatgcgaaaagagtgaaacgtggctactacgagtgcgaattctcactgctacacaatgacccaacatcactacccgattacaaattaacagatttatattttgaacgcttagaagatgaaatcagaaagcaccccgagtgttacctctggacacataatcgtttcaaatatgcaaaaaactaataacaattacactactcattattaaatagataaatatggatattgattttgtggttacgtgggtcaacatggacgaccctgaatggcagaatgaattttcaaaatattcgggcaacaaggacaacacgaagaacggagtgtcgaaagctcgtttcagagactacggcttcctgaagtactggttccgcggtgtggagaagttcgcaccctgggtcagaaagatacacttcgtgacaagcggacagaagcccgactggctcgatgagaacaatccgaaaatacacctcgtaagccataaggacttcatacccacagagtttctaccgacatacaactcggtggtgatagaacgctacatgtaccgcatacccggactggcggagcacttcgtctacttcaacgacgacttcttcatcatcaaccacattgaaaaggagcgtttcttcaagaatggtctgccttgcgacatagctgtattcacctacaatccctcatggtcgcaatggtatgtgcgcataaagaacaacatacgactcattaaccgccacttcgacaagaaggaagtgatgaaacgctggcacgacaagtggttccacaagagctatggcacaaaggcacgctggaactatctgctacgtttctataataagttcatcacgctacgtgtgccacacaacgcacaaccctatctaaagagcaccttcgaagaggtgtgggcaaacgaaagcgacgagctaacaaggacttccgtaaaccgcttccgcgccttagacgactacaccccagagctattccgcatctggcagatatgcaagggcaacttcgagccttacaatacatatcaggacacgaagatgttcccactgatggtgaagtcaaaaaaagcgataaaagctatctacgagcagtcgtactcgcttatctgcctgaacgacaacgtacacatacgccactacgaggaggtgatgggaaatctgagagatgcattccagagcatcctgcccgagaaatcgagcttcgaacgttaaagaacctacgattaatcagaacgattagcctatgaataaagtattagcagagataatagcaggagttattccgcacaagatgacacgcaacagatggagaggtattctcagatatggcatcttcaacgcaatcagattgaagcgcgaaatcagcagaaaccacaccataccaaagtttcaattggctatctgcgccatcgccaagaacgaaggcccatacttcaaagaatggatagaatggcacttggctcacggcgtagaccaattcttcatctacgacaacgaaagcacagacgacactaaagacatactcgaaccatacataaagcagggcattgtcaactacaaaccatggccaggctatcgtatgcagttggcagcctacgacgactgtctggagcagcaccgcttcgacgcacgctggatagcattcatcgacctcgacgagtttatcgtgcccgtacaggatgctacgatacccgacttcctgaagcgcttcgaggcattcccggcggtggagatcaactggctcgtgtacggcagcggaggcaataaagagaagagcgacgaggacgtgatgaaacgcttccgcttccactccctacccgaccattaccttaaccgccacgtgaagagcatcgtgaacccacgccgagtattcacaatgataggatgccacgaggtggcacgcatcaacggcaaggctgccgactcacacggcaatatcatcaagaacaacttcagagagcgtacaccgcaacaggacgtgatacgcataaaccactacgccgtcaggtcgcttgaagaattccgcgagaagcagctgcgaggcagagccagcggcaccaagacatccgtaccgatggactatttcaaccagtacgacctcaacgacattgaggagaaacaataaacgatacacattatgactgaaaacaagcataaacagcaggttgtcatctcgatgacatcgttccctgcagccataaagtttgcagagcaagccgtgcgctcactcctcaacggcagtgtgctgcccgacaaactgatactatatgtcacgctgtcgcaattcgcagaaggcgaaatgcccgaaacgctgcttgcacttgcaaagcaaaaccccgtgttcgagatacgcaactacgaccgcgacatacgctcttatcgcaaactgatacctgcactggctgatttccccgaagctatcatcgtaaccgtagacgacgatgtgtattatcacagacacatgctgaaggacttgctcgacctgcacgcacagatacccgacgcaatactggcgcaccgcgcaaagcgcatcaagtacggaatgccgtacaggaaatggagcaaataccgctggtatcacttcctcttcaagcgcatacaccgcagtttccagaacatccagaccggcgtaggtggcgtgctctaccctccccactcgctaaaggcggacatgatggacgtagagctgttcacaaagctcgcaccaagcaccgacgacatatggttctgggcggcaggagcggcaaacggcttccccgtcgtgcccgtgccgttcggacgcaacaagccgcgcggactgcataagcctaaagagttctcgctgaaaacgagcaactttaaagcaggagtggaccgcaatgtgaaggctttcaatgctatttgtgaatattacccagaggtaaaaaaacttatagagaaacaataaaaacaatatggatatagacttagtatatctttgggtgaacggcaacgaccctaaatggcaggctaaacgcgatgcttgcataggacgtccgtcgggaagtcaagcacattgcaaaggcagatatgctgacaatggtgaactaaaatatagcttgcgttctgcagagaaatacgctccttggattcgccgtatattcatcgtcactgacaaccaaataccagaatggctcaacactgacaacccaaaggtgcagatagtagaccacacggagataatgccagcggagtgtctgccgtgcttcaactcagcagtcattgagatgttcctctgcaatataccaggactttcggagcatttcctctacgccaacgatgatacgtacttcggcaagcccgtacagccacaggacttcttcgacaaagacaatcttccaaaggtattcctcttccgcaaaccgttcagaaaactggcgctattctacagagaaaaggtgcttggaaagaagttgtccccaaccttaacgctattaagaatgcagcaaaactggtagagaagcactatggtaaatattatggcggaaaaccccaccacaatatcgacgcttacttgaaaagtacgttggaaatggcgaacaagaagtttgagaacgagctaagaccaatgcgcacccatcacatgcgttcgtcggaggacatacagcgttgtgcttactcttatgtggctctcgcagaaaaacaagcacatctgtgctacgtttctgcaagacattcgttcagaatagagatcgagaacagaaatctttataagaagtttgaagaatataatcctgtactattctgcttcaacgattcggaacacgccactgacgaggatagagcatatgctattgaattcataaacaacctattccctgttaaatcagaatttgaaaagtaaaaaaagccctatggacattgatttggtatatctttgggtcaacggcaacgacccgaaatggattgcaaagcgcgatgcctgcatcggtaagccgacagacaagcaggagaactgcgctggtcgttacgcagacagcggcgagctgaaatatagtctgcgatcagtggagaagtacgctccttggatacgtaaggtattcattgtaaccgacgaacaggtgcccgaatggctcgacacgtcgaacccgaaggtgcacgtggtagaccacaaggagattatgcccgaggagagcctgccctgcttcaactctacattgatagaacattatcttgacaaaataccaggtctctcagaacactttctcttctcaaacgacgacatgtatatcaaccgtcctgtaagtcctgctaccttcttcgaggccgatgggttgcctatactatacatgaaccgtaagcctttccgcaaacttgcgctattcttccgagataaggtggtaggcaaaccattgagcatgtatctgaaaataatcagaaacgctgcagaacttgtagagaaacactacggaacatattatggatgcaaacctcatcacaacatcgactcgtatctgaaaagcacaataacgtttgccaacagaaagttcgagaaggagttcagccatatggtccaacatcatatacgttctgccgacgatgtgcagcgaagcgtttattcatacgtagctcttgccgagaaaaagggacacttacgttacgtatcgcagtcgcattcgttcagactacacatagacaaccacaaactttacgagaagtttgaacgatacaatccggtattcttctgcatgaacgattcggagtttgctaacgacgcagacagaaaagctgccatagaattcctcgaccgacaattcccgaagaagtcgcagtttgagaaataacaatacacaaatcgcacgaaggttacatatgtaatactcgtgcgatttgtttttaataatcaatctgttttaactggtcgtagtccttttgctactgtataatacaactcttttgcaatattctctctcgttcctacagcatcgtcgaagaaaccggtctttgccaaatccgtaatgtacttcaccagactatccgtttgtggtccttttcccattttatacagaactcttgaactacccgttagaatagcccattttatattacgactccacaaacgcagacgctccgtgttgccatgttcttcatatagcttctgtgcataagagagacccttaagctgagacatcagacgttctaccccttccgtagctttcgatattgatttatgattgacataatagtaataaagcggaagatgagtgattgtggctttcactggttttaacaacaactccgaccaccagggaagatcttcaaacttcaatcccttgataaattttatatcctttatcaaagagcgtttaaacagatggcgccaaacgtagcaatgttttatcggatatttgatatcaggatggcgccagtcggaagcatgtttcaaagcatcgtcagtaactaccgattttgatagtttaagactatacctaaacggcatacgccatggacggacattgatagtgttcattttcaacttatgcatcaagcgtagctgaatgtttatatatacaacatccttataccaactcaccatatccgtcccgtcacgcttaatcagctttacagcaagttccaatgtctgaggatggataaagtcgtcagagtctacaaacattacatactcagcatcagcgagagccatgccttcattacgggcatgggaaagcccaccattagcttggtgtactaccataaagcgagaatctttggctgcatattcatcaagtatcgcaggacagccatctgtagaaccatcatcaatacagatagcacgccaatgcttatacgtttgttttaaaacactattaagacaacgttgcaaatatggttcaacattataaactggaataataatatctactctgttagtattcataattgtttgtctgttatatacgattacgtttgtttgcaaagttagtaaaaaacaccataacacccaagcatacagacttttattaagaccaataatgatagttcttttatcttaatctactatttatacatagaaaatggcgaaagttataaaactttcgccattttcttgtgcactattcaatttaattattcattcaacaatcgctccaattcgcgcaccattacgccagcattgcgctccttttcagccgtcatattggcaggtgtaaactcagcaagcttcttgttaaggcgtgcaagacggctcttgtcgcccgttttcttgtactggttgcgcaactgccaaatcttctcggcatcctgcaagccctctacgaggcgctcgaagcgtatgctgctgcgcggacccggatagatgctgtatgtgtcgccggcagcccatgtacggaagcgcgaatcgcgcagtgggtcgcgagtccagctgtttaccgaccagcgcagatagccgtcgtagtcgccagctacggcatgtatgcctatccatgcagcatcggcagggttagagaacgagaatgtgccggggaacggctccgtgcagcaagtgtaataggtgctgatctgtcccttcgcacggcgctccttcagaacgttctccgggaagcgtgcaccgtaagggatgcagagatagtagagatcggcctgtatctcgtcgtgatagttgccggcaagcgtaatcttgaagtcgggatcggcttcctttatcacctttatagccgcctgcatagcctccatcgagcgctcgtccatagagatggcggtcttctcgaaccaacctttctgcttcagatggcgggcgaaatcgcgcaagaaactaccccagtactcggcatacgcctcgtcgccgggctctgctttgatgaactgcacgcggttggtagcctcgtcatagtagtcgaaactcagttcccagggtatcatggtgtagcaggagatgagtcccttcacacctatttcgttcatcataaagtcgacccagcggtcaaacaccgcatagtcgtacttccatgagccgtccaaacgcttgatgcgtgtcaccatactgtcgaagtgatcctcggtttgtccgttccacggcttgtgcataatgctggctgttatggacgatagtccggcatcagccaccattttcattatcggacgcattgcatcgaagtgttccttgctccacaacggcaccttatagtagcgtgctacggcatacgggttctgccacaggtcgaggttcaagtgccactcgcgtggactgggtagcgtgcggttcacgacctgtaggctgagattgagcaccttgtcgtccataccgccgccacgcacggtgattgtaccagtgtatgtgccgggcttagcgtcctccggcacccatacgttcacccacagaggctgcgctgtcttgcgctgcacgggcagccacttgttgatgtcgagcgcgtcggcaacgatagacgagtcccactctgccttgttctcgcggcatccgcagccgcccttgccgtccttgttcagctcgtcggtcatcacgtagcgcacgaagtgggagcgcaccttcgaggcaggaataacgtttgcgcccgaacgcaggtcgctcacgagcatctccacatcgttcagatcagtattcgtccagagtacagcctgtgcatttacgcgctcgccacgccacgccttcagcgtgcaagcgttgctgagtttcgcaagctgcggcacatgatgcttgccgtagcgcacgtcggttgatgcccaactgagcattacgggcgacttcatcgcagcccacttggcatccgcgtcgtgcggcttggtgtccgtcagctcctcgtattgacccaacgggaactcctctgcctgcatattgcgctgcgcggaagcggtgagcgcacagaagagcagacccgaagaaagcagataatgtcttacgttcattgttattgttttgagattagttattattcttaatataattttgctactgttgggggtatgccgtgatagaatgagcatgtaatgtcgcacctctgatggcgtgcatcggtcgatgcggatgtctgcgtcggnnnnnnnnnnnnnnnnnnnnnnnnnnnnnnnnnnnnnnnnnnnnnnnnnnnnnnnnnnnnnnnnnnnnnnnnnnnnnnnnnnnnnnnnnnnnnnnnnnnntcggtgcggacatctgcgtcggtcggtgcggacatctgcgtcggtcggtgcggacatctgcgtcggtcggtgcggacggctgcgtcggtcggtgcggatggctgcgtcggtcggtgcggatggcagaaacctaatacaatggtcattatatcttgagactcccccgcattgacatgcaaatatacagaaaataaatggttttgctgcggtttgcgtgcataaaaaaccaatagcctactggtaatgccttaatatataaacaaaaaacagaaaggagaagccattgattgacttctcctttctgtattatagtatttgctggaacttgcgccgttagttgttgacactgccaccaacgatgtcgagcagctcgctcgtgatggcttgctggcgactcttgttgtactgcagattgagctcgcgcaaaatctcgtcggcattgtccgtagcggtctgcatggcaaccatacgtgcggcgtgttcgctggcgatgctgtcaagcagtgccgtgtacaccatcaggtgcaagtacttcgggatgagcttcgtgagcacggtgttcatgtctggctctacgaggaagttgtcgttcagcggaacggcctccttgtgttcgcccttcttctcctcctccttgcgcttgatgtactcctgcgccttctttgtaatgacgtttgaagtaaggtcgcgctcgtggtcgcgcttcagctcctcctcgatgtcaatcggcaggaacggcttgcgtgtgagaatctgcgaaccagcactcttgaagtggtggtaaatcatctctacgcggtcgtactcgccgctgataaacttctcgcccagctcgcgcgctatggtgatgcagtcgttggcgttaggcttctcggcaagcgcagtgaagtcgccagccacgttaagccccatcttaactgccttctcagccaccttgcgacctatcgggtagattacgatgttctccttgcccaattcggtgtactcgtctataacgtgctgcagaaggcgtataacgttggcgttgaagcctccacacaggctgctgttagacgcatataccaccaatgccacgcgcttcaccggtctcacctcgttgagcaccgtgcgtgcatcggtctccgatgcaaggaatgtcttgaggatatgttccaagagagtctcgtaaggaagcatattctcaatcattgtctgcgcatgatgcagcttcgaggaagccaccatcttcatcgcactcgtaatcttacgggtgctgttgacagatgatattcggtttttaatctctttgagcgacggcataagcaattagtttttatactgaccagcgatgtctgccattgtctgttcgatgacagcggtgagttgatcgtcaagcttaccacttccgagtgcttcgataacgtcctgatgaacagagcgcatcttctcaaggaaggcatcctgacactcacgcactttctctactggcacagcgtgcatcaatccgtgcgtaccgcaatagatgatagccacctgctcgcctacaggcatcggtgaatactgaggctgtatgaggagctggttgttcttgcgtccgcggtcgatagtcatggctgtaacggcatccatatcgcttgagaacttagagaatgcctcaagctcgcgatactgagccatatcgatcttcagcgtaccagccaccttcttcatactcttgatctgagccgagccacctacacgtgatacggagatacctacgttaacggcaggacggaagccctggttgaagaggtcactctcgaggtagatctgaccatcggtgatagagataacgttggtcgggatgtaagccgacacgtcaccagcctgagtctcgatgataggaagcgcggtgagcgaaccaccacccttcacgtgtcccttcatacattccggcaggtcgttcatctgctctgccacctcctgctggtcgttgatgcgtgcagcacgctccaacagacggctatgcaggtagaacacgtcgcccgggtaagcctcacgtccagaaggacggcgcaggatgagcgacacctcacggtaggcaacagcctgcttcgagaggtcgtcgtacactacgagagccgagtagccacggtcgcggaagtactcgccgatagccgcaccggcgaacggtgcgtagtactgcatggcagctgggtcggcagccgtagccgcaacaacgatggtataaggcatagcaccatgctgcttcaagttctcaacaagagccgcaacggtagatgccttctgtccgattgccacatatatacaatatacgggcttaccagcctcgtagaaactcttctggttgatgatggtgtcgacagcaatggcagtcttaccggtctgacggtcgccgatgataagctcacgctgaccgcgtccgatagggatcatcgagtcgaccgacttcaaacctgtctgcagcggttccttcaccggctggcgatagatcacaccaggagccttacggtcgagcggcatctcaaaagagtcagtaaggtcgatttcgcccttgccatcaatggcctgaccaagaggattgatgacacgaccgagcatattgtcgttcacgttgattgacgcaatacgctttgtacgcttcaccaccatgccctccttgatgccgtcggtagaaccgagaagtacacaaccaacgttgtcctcctccaagttcatcacgatagccattgtgccgttctcgaattcgagaagctcgttggcttcagcgttgcgcaaaccatagatacgcgctacgccatcgctcacttcgagcacagtgcccacctcgtcgaacttattgccgttgttaaggcctttaagctgctcgaggagcacctgtgacacttcgcttggtttaattttatctgacatagaaattaatctttatttaattaagctgcgacaatatggtgttgagctgcgacttcacgcttgcgtccatgcgataggtatcgtactcgagtacgaatccgcctatgagttcgggcttcacattggtcttaaactcaacagtgccatttgtcttactttctaccaaccgacgcaacttagcctctgtctgcgagtcgagagttgtggcggtagttaatttagcactaattagattgttatgctttctgtacaacgtaataaacgagttagctataaattgcatgatacgctcacgtccctccttcagtacgagtccgaagaacgtacgtgtgagttcacatgaagcgccacctgccgcagctatcagcaagtctcccttctgctgtctcgacagcatcggattgtctatggtagccttgaactgcggcaccttggcatagctttccaacaccgtgagcatatcgttgtacacacggtcggacacacctgcctcaatgccagccttaagcaaggctcgagcatatcttaccgatattaatcctaaatccatagcctacacttatttattatttaatgtaacctcgtcaagcatctgattaatataatccatctgtgctgcatcagtgccgagcttctttctgagaatcttctccgaaacctcaacactcaatatggctacttgctcgcggagctcgctgatagcagcttgcttctgcgcctcgatttcggctttcgcctcactaaggatgcgtgcactctcctctcgcgccttctcctgagctttctccacaatagcatcacgagtggtagcagcctctttcagtatagaggcttgcttctctcgtgcttcctgaagcatagcctcactctcttgcttgatgttctcgagttgtgaagcggcctgttctgccttcttcaaactctcgttgatgtactggctgcgcttgtctaccataacaatgatggcaggaaaaccccagcgcgacaatacgaagaacaccacaaggaatgccaacagcatccagaagaggagtccgagatcaggatttaatattgatggtaatttatcaaaattcatttgctataatttacacgatgacctgttcctacttgataaggaaggcgcaagctacgatggcaaacagagcacaaccctctacgaaagcagaggtaagaatcatgtttgtctggattttgccagtagcctctggctgacgagcgatagcatccattgcgctgctaccaatcttaccaatacccaaacctgcgccgattgttgcaatacctgctccgagaccgcagcccagctgtgccagaccttcagcagccaaaagtgatgaaataatcatagttctttagttttttaaattattattttttactgttaatatttattctcttaagcttttaagcctctgcctcctcgtctttctgagccagtccgatgaagaccgcactcagcagcgtgaagacataagcctgaatgaatgctacaagcacctcaagcatgttcatgaacagcatcatgatgacgctcacggtgttcagtccgataccataaccaacgcccatcgaccatccgaggaagatgacgcaagtgaagctaaggataattgcgtgtcctgccatcatgttggcaaagagacgcaccatgagagcgaacggctttgtaaacacgccgaagaactctatcactggcatcaacggcaccggagccttcagaaacaccggtacgtgcggccagaagatatccttccagtactccttgttgccgaacaggttgatggcaatcatcgtacacatagcgaggaagaacgtgatgttgatgttaccggtcacgttagctccacctgggaatatcgggagaagtcccaacaagttggttgtgaagatgaagaagaacactgtgagcaagtatggagcgaacggcttgaagcgtttctcgccgattgctgccttgataacatcatcgtagatagtcataacgaacatctccatcaaaccgacaaatcctctcggagcctcgctcttctcgtctctgttcttgtaccaatgtgcacaatagaggaacaccgctatgagcacgaacacaacaatccatatctgtgctacggtttttgttatgctcaggtcgagcggtcttacgcttgtgccgtcgggcatcttctcgtagatcttaccatgatgctcagcgtcaaagaagtagttggcgggcagattctccgcagtacacagcgtccagtcgcctgtagccgaactgcgtacgattataggcaatggtatgcttagactctttccttcatacgaagcgatatgccactcgtatgagtcggaaaggtgctcaagaaccatctctggtatgtcaatctgtccctctttctgatgcgaggcgttagccgcgagcggcatgagcatcaccaccaggagtacgattaatgaccttatctgtttcattattttatttgttttcattgtcacacgatgtgtgagaatttgatatgcgcgcgaagaacactgagtggtgtatcattatgacaaaatagtaacccatgaacaccaggcagtactccatcatcgcgtcacgacctaccacgaagtagcacacaactaaggttgccaatgccaacaacatacgaaagcccgacactgcggtgtagaatgtgggcaagccgtcgtcgcctgcctgtcgcaccttgccccatacgagagcatcgaccgactccactaccactgcgaacgacaatgcgacaatggtaggcactgtaaggttgcctacgtttgtcagcaatgagagcagtgctggtatcagcgtgaccactgccaggaggcaaagcgactgcagtatgtatcggcgactgatgcctttgatttcttctttcaacatgtcattgtacgtttcgtcagagttcaacacagatgttcacgttgttcttctgcacttcgacgaaaccgccgttaaccatctgttcgtgtctgccttcagagtcttgatagaccagccttcccttttcgagtgtggagatgatgggcgcgtggttgtcgaggatttcgaactcaccgcttgtgccgggaacaacaacgcgctccacagctccgtcaaataccaccttttcgggggaaacgattttcaaattcaaactcatagatacaaaacattaatgatgatgttaacccttggctgcctcaagcagtcgcttacccttagcaatagcgtcctcaatggttcctacgttgaggaatgcctgctctggcaggttgtctacctctccgtcaagaatcatgttgaagcccttgatggtgtcctcgatagaaaccatcacgcccggtatgccagtgaactgctcggctacggcgaacggctgtgagaggaagcgctgaacgcgacgtgcgcggttcacggtgagcttgtcctcgtcagagagttcgtccataccaaggatggcgatgatgtcctgcaactccttgtagcgctgcaaaatctgcttcacgcgctgtgcacactcgtagtgagctttacccacgatgagcgggtcgaggatacgcgatgtagagcctaatgggtcgacagctggatagataccaagctcggtaatcttacgcgagagctcggttgtagcgtcgaggtgtgtaaatgttgtggctggagcagggtcggtcaagtcgtcggctggcacatacaccgcctgtacagatgtgatagaacccttctttgtagaagtgatgcgctcctgcatcttacccatctcgctggcaagtgtaggctgataacccacagctgacggcatacggccgagcagagccgacacctcagaacctgcctgtgtaaagcggaagatgttgtcgatgaagaacatgatgtcggctgcttcgccgtccttgcctccatggtcgcggaactcctctgccacggtaagtcctgagagcgcaacagaagcacgtgctcctggcggctcgttcatctgtccgtagacaagtgtcgcctgactcttctttagttcctctgggtcgacgagcgagaggtcccatttgccctcctccatcgcctttttgaacttctcgccgtagcgtattacgcccgactcaagcatgtcgcggataaggtcgttgccctcacgtgtacgctcgcctacgccggcgaacaccgagtagccgttgtgtcccttggcgatgttgttgataagctccatgatgagcacggtcttgcctacgccggcaccgccgaacagaccaatcttaccacccttcatgtaaggctcgaggaggtcgatgaccttgatacccgtagcgagcatctccttgtgtgtagacaggtcttcgaacttcggagcctcgcggtggataggataagcgccctccatatcgagcttgctcataccatcaataggctgaccgattacgttcatcatacggcccttgatttgttcacctgccggcataaggatagcgttgcctgtaggcaccacttccaaaccgcgttgcaaaccgtcggtgttgtccattgctacgcaacgaaccgtgtcctcaccgatgtgctgctgaacctcaatgataagctcctgtccgttaggacgcttgagcttcagcgcttcgtgtattttaggcagtacctcttctgcgttcttaccagccgtatcgaagtaaacgtcgataaccggaccgataatctgtgagatgtgcccattgagttgtgacatactatatttatttaaatt

SEQ ID NO: 451 - DNA, 7652 bp, unidentified
  source 1..7652: mol_type = unassigned DNA
ttatgcctgtatctcaccatcaaatatcatattccagctcatacggatatcatacatcagccttgtaagtgcaatactatcttccggtgtataaatagcactggcactatttcctgatgctatgcatctgcctgcttcacgaatctcatattcaaatccatttatatcaaccgggtactcgattgtttcaggttctttaccatccacctcaagtatcaaggtctttgcgtgttggaaatccggcaaaaatatacttccctttgttccctcaattctggcattacgttttaactcctgccctattgtctggactgattctgcaatacatccatcattatatgtcagtttgagacaactgtaatcatctgttccattctcattaatatgtacttttgtggtttctacattctgcggatcacaccctgtaacaatacgcaaaaatcccagattgtaaattcctatatccaacagagcacctccaccaagtgcagagttaaatttacgctcttttctggcacccgttgcaacaaatccatactgacaggaaatatgtttaatttctcctattgttccctgaagcaggatattacgcagacgattatacaatggcagaaaccatatccataatccctccatgataaaaagatgcttatcctttgccagcctgtacagctcctgtgcctgtttctcatttattgtaaatggcttttcacaaagtacatgcttaccatgctcaagacaaagtctgcaattctcataatgcagactattcggtgttgctacataaacagcctcaacatccggatcatttactaatgcttcataagaatcataatatcgtggaatgtcatactccctggcaaaagcttttgcactatccatgtgccgtgagcctactgctgcaagctgttcattttccttactcatctgatttatagttgatgcaaattttcttgcaatattacctgtagccagaattccccacttcatatcattttcctcctaataatataattgcatttcacattcatatcttgttaataattatacactattttaccgcatacaccaacacaaaatagcaagtcaaatttcatattatttactgtcacaactatcgtacgcttcattattgttatataaaattcttatattaatcaaaatttttcaacacaatctaaaaaaagctgccacacatcattcttagtgcggcagcccctttgtggtaatagggtaattaataatttatatttcacatgctacatcatatgctgatttaatagcatgatcaatattacttggacgttctccagcacaatcaccaatatagtgaagtggaagaggacaatcagaaagctctggaaggttctttcttgcaccaacagccattacaacaaagtctgaagcaatttcttctgttgatgtattgtcgtctattgttttttcaacaactacagaatcatctttgatttctgataattttgcagatgttactatttgaacattataatgctctaattccctcattagagtaggtaaaatagtgttactttcttcttttgcaatctgatccatcatttcaataattgtaaccttacatcctcgtgaagccagatattcagcggtttcaacacctacaagaccaccaccgattacagaaacattaccgaatacgatttctttcttggcaagtacatcccatgcacttgctacagttggaagatctttgccaggaacagggattattgcattgtttgctcctgttgccacaattacttcatcgaatgaattataatcctgtgatgtgaattcctgaccaagcctgaaagtaacatccaattcaggaagtacatttgtataataattaatgcttctcatcatttcttcttttcttggaggtacactagcaataagtaactgaccaccaatctgaagtgatttctcaaatatagttacatgatgtcctcttaatgcggaaacacgtgcagcttcaagtccagcaataccagcaccaataattgctatattctttgttgatgctgcaggagtaatctgacgagatccttcgtaaccattttcagcattaagtacacaacttaagaaagcacgattctgaatattatctgtacatcctttattacacatcatacatgttctgacattacagcaatgtccatctgcgcatttgtttgcaaagtcagggtctgtgagaagagaacgacctaatccaataatatcagcagaaccatttgtaataactgcttcagcagcttctggtgtaacgatacggcctactacagatacaggaatagatacaagctctttgatttttttagaataagaaaccataaatccgtatggctgtgttcccatggcagggattgtatcacccatatttccagtatggttagcctgtgcaacatgtaatgtgtcaacaccgcaagcttctaattctttagcaaaaatgcaagcttcatcaagtggaagaccaccttttcctctaaaactattttctccaagaggagtaactataggaagcttgtagtcgataaccatgtcaggtacaattgtttttaatctttttacgagtgttaatgcaaaacgtgtacgattagccaggtcaccgccatattcatcagttctatgatttaaaataggagagcagagagaaccaacaagacggtctccatgtacttcaatacaatcaacaccagcttcgtgtgctaagatagcacagttttccatatgctttattatttcatcaagttcttctgcagttacttcatttacaaagtgctgcatatcatggtgaagtttagctcttgcttcctgcattttgccctgatgaaacatatcgtttaaagctttaacattgtagtcaggatggaataactgaattccaagctttgcaccattttcatgacatgcgtcagcaagttttttgaagctttgaacctgctcaggtgaataaagctttggtgtaggagagaatgttggaagtggtgcaacatctccaattactatatatccgacaccgccttttgcgagacgctcgtaaaaacgaaaactttgttctccaattgaaccatctttttcctcatatcctgttgtaagtggtgggaacataatacggtttttaaactcaatatttccaacttttataggctctaataatttcattgttcatacttcctttcaaattgaatatactatttaagtggtgttaaaaactctaacattaatttgtctaattctgctcttgcaaaagcactggcaaaattgtggttagcgccttcaattgttttataattgcattttccattgtaaagtgactcatatttatggcatgttgcatcatctaccaaatcatctgcagttcctcttataaggaggactggtccgttgtatccttctgctgacgagaatggctcataattaaataaatcataattaaaagatgttgggaaagtgagtccttcaatatcggccttggtgatccccttagcttccatggcttcagcacgatccttacatccaaaccacattccagcacctggacacataagcatgagagcataaggattaacaataggagcggcagtagcagctgcgtatcctcccatactctgaccagataagataatcttatctggattggcaaaatcttgtgttttagtccagtttataatatcctcgatatcgtgtaggatacctgtaaaggtcatgtcctcgaattcaccatcactttcaccatttccgtataaatcaaaacggacactggcaaatccatgttcagctaataatctggctgtgtgcgtataaatacttttgtaaccgcttttattccctgtaaagccatgtacatttacaatagcaggaaatcttgtgccatcttctggaatgttaactattccgcgtaagatgtgtccatcacggtttgtgatttctacttgttttgtcaattttaaatacctcaatttctaattttattctgcagttgtagcatttcgcttgtcagctaaatcctgtaacatttcagctgttttctcttttgtaagagggtagataaattttaataccagaacagctaataaatatcctacaacatataaacctgtatatgttttccaaagatgtcctgagaatgcttcattctggacagcttcattaacctggaatccagcaattgcaagtgcaaaactactcatacttcctgatacagcattagcaagtttacggaagaatgtatatgccgaatatacaattccttcattacgttttcctgtctgaagttcttgataatcaattgcatcatttacaagtgcccaaactaatacttggaaaccacttactccaagatagcagattccgttgatgataataaagagcataggattttcaagtgggaagaagaataaaatagcataaacaacaactgagaaagttgcactgtacataatccattctttctttccaaatttcttagcaacaaattttgtgcctacgaatgcaataagtgaccagagtacacttaacatacctgaaaatgccatgatggcaacatttccaaaataatcgcggaataaataagtatttaatccgttaaccatacctgctccaacaataccgataaagcttgataacataactccgagtaatgctttgtttttagtaatatctttaattacctggaagtagttaaacttttcttttttctcaacaactggctctctaataatacgctctttacaccaatgagatgtaaacataagacagattaatccaaaaactgcacagattgctgacataataaggaaatggctaggtactggctggttatctttatataagaataatggtccaacaataacgataactgtcataaaaattgtaccgccaagacttctgaaacgagaaaggtcagtacgttggttaacatcatcagtcattacacttgaaagactaccaaatggaacgttgacacatgtgtacataatttcgtaaacaatatatgtaatgaacatataagcaatacgtgcaccataagcgaaattgtttacgttaacaaatcctaatatacagagtactgcagttggaaaagcaaagaatttaatccaaggaataaattttccttttcctttgtttttgtggctatcaacaagtgcaccaattaaagggtcatttatagcatcccaaaactttgtaacaagcataaggattcctacgtgtactggattaacttttaataccagtgtataaaaaatagcaagatacatggcacggaactgctcagtacagcaacatcccaaatcgccaagagtgtaaccaattttgtccttcatggaaaaaggtcttgtttctttcatgataatttacctccaaacatttatattgttttagtagctacaatcttattatattggggttatgctgatatccatatacaaatattgcttgcaaactacgaaaaattgatatattgtatattttgacgaaatgaacaaaaaatataataggaaagtgtacaaaatagacatatgaaaaagcaaggctacaaaatggaatatttgaaaatattggatagtgcccagcgaagctttgggcaaaaggagagctatacaattgtatttatagctggtgggatagggtatatgcaccaggaggacgataatattgtatgtactatggaggatttgatatttattaagccaggtaataaagtaaagcttgaatatcgtaaaaataagtatcctcttaaagtttatgttctttatataggtggagaacttttaaggaaattgtcagatgaagaaacaagacttgatgaagcgtttgattttgttccgtatcaagttaagattgttcattctgagactgaatcggctatgcttataaagaatatatcaaaaaagctctattcgatgaataatgagccgcctaaatttgcccactcattatacgagaaaagcctattaactatgattcttgtacttgcacttcgctcatctgttcaggatgatgtacagatcaagacgaagaagaaaaaacacgttgtaatggatgatatttttatttatatcagagaacatttgacagaagatatctcgttggagcgcttggaaaatgaattttatataagccgttatcatatagtaagagagtttaaaaaattgacaggtgagacacctcattcatacattgtaaagagcaaacttgatttatgccgccattatatagagcaggggaaaagtattcatgaggtatatgagcttggtggatttggagggtataatcatttttttagagcatttaagaaagaatatggtgttactccaatgcaatattacaaagatttaaagattgacaggaatgaaaagtaatgattgtgtttgtagaataaagcaaataaggggctgtcgctttaacgatgcgacagccacagcatttttaaaattttcaatttgatgtgaatactgttcattcataagtgatgaatgaatcataaaatccgcagttgcaatattatttgcaatcggaatatcatacacctgtgcaattctaataagagctttaacatctacatacatccaatctgtcatttttatctatcatgcaaaaaattgatatacagttcttgacttgaatattttgtatgctggcaatatacaacttggaaattctggattattacatgaattaggatagaattgagtttcaaaacatacaccgcttcgcttattatatatagcaccatcttttcctatttgaccatttaaataatttcctgtataaacctgtaatccacataaatcagaataaacatccatcctgattccactgtctgccccatacagttttgcaacttttctcgtctttctgtcatttggaaatatataattatgatcataaccacctgcaatttttatctgtgaattatctgcatctatatcttttcctatctgcttacttttacgaaaatcaaatggtgtatcactaatatctataatttctcctgtcggaatcatatcattgccaagctcaagcatctgtcccgaatatatttccatatagtgtttaaggattgtaccagaattatgcccatctaaattaaaataactatgatttgtaggatttacaaccgtagccatatcactaagcatttcataatcaattataaattcatttttatctgtgagtgtatatctgattttctgctctaaatttcccggaaatccttgctccatattaggactatatcgttccatttccacaaactcacatgcatcagtctttccatttcttacactgtaaagtttatgatgtgatctattaaacccactgtgaagattattttgattatcatttttatccaacagatactttatatcttctattgttacttctgcccctgcaatacggttagcatttctgcctatatatgcaccaaaacctgtattctgttcataataatccatcagattatcataaccaagtacaacatctcgttttcttccatacttatcaagtacataaatggataataccaatgctccaaaatcagataattccacactcatacctttattgtttaccaagatatatctatgtgctttttttccttctttcgtcacaccaaaaactgtattccacat

SEQ ID NO: 452 - DNA, 39835 bp, unidentified
  source 1..39835: mol_type = unassigned DNA
  misc_difference 24208: note = a, c, g, or t
  misc_difference 24209: note = a, c, g, or t
  misc_difference 24210: note = a, c, g, or t
  misc_difference 24211: note = a, c, g, or t
  misc_difference 24212: note = a, c, g, or t
  misc_difference 24213: note = a, c, g, or t
  misc_difference 24214: note = a, c, g, or t
  misc_difference 24215: note = a, c, g, or t
  misc_difference 24216: note = a, c, g, or t
  misc_difference 24217: note = a, c, g, or t
  misc_difference 26299: note = a, c, g, or t
  misc_difference 26300: note = a, c, g, or t
  misc_difference 26301: note = a, c, g, or t
  misc_difference 26302: note = a, c, g, or t
  misc_difference 26303: note = a, c, g, or t
  misc_difference 26304: note = a, c, g, or t
  misc_difference 26305: note = a, c, g, or t
  misc_difference 26306: note = a, c, g, or t
  misc_difference 26307: note = a, c, g, or t
  misc_difference 26308: note = a, c, g, or t
aagttcacaacaggtattgacgaaaagggcgaacagcatgtatttattgagccgcttccttatgacggctatacttttgaccactgggaaatttcgggcggtcctttcagaaccgacagcaagtatacagatgccaatatgaatattattatttcaggtgaccttgtttgtactccttattaccgtaaggcaagcagcggcggcacaacaggtcctgttgctacagctacggcaaagaaagatgattcaacaacttcaccaaagacaggcgcaagcgatgttgttccgtatgttgttcttgttctttcacttgcggcttgcagtgcagctgtattcaagcttgtaaagagcaagtaattccaattgtattaaaaaatcaggaggcttctcaaaaggaagcctctttttttaattaaacagccgagcgtaaacagtcgattgcttgttccgcagcaataatatatgtttaaaatagtaataaaattatacggaacagtgatgattgattgactttttagcattataatgctaaaatattaccgattaggagtttttaatatgagcagaaaaaggaacaaatttcttatagctttgattatattgcttgtcgctgttattatcggcacgctggcttatatagtcataaaaaatctcaatgaaagcaatgagcgaaaaagtcttgaaaatgttgccggttcatatgcgtcaaacataggaaacgaaactacttccgccgcagaatctgcaacagaagtgacttcaccgtcaatcaatgtgaaaaaggtcgaaaatccgattgattttggttcgcttcaacagcagaacagcgacatttattcttgggtctatattcccaacacaaatatcaattatcctgttttgcaaagccatcttgacgataacctgtaccttgaccatgatatttacaagaactacagtttttcgggcagtatttattcgcagatatgcaataagcgtgattattccgacagggtaacggttttgtacggacacaatatggcgaacggctcaatgtttgcaacgcttcaccgcttttatgatactgacttttttaataagaacaagtatatttatgtctatacacctgacagaaaactaacctatgagattgtgtctgcatttgaatatgatgaccgccacattatgaattcatttgatttttcagacgataaagttttttcggattatcttgatatgatagaaaatccgcattctgtttctgtaaacaaaagaaatatggagcttactaccgatgataaaattcttgtattaagcacatgtttgaacagcggcgacggaaggtatcttgtgcagggagtgcttaaaaaagatgagccaacaaaatgaaagttcaaccgaaactgtaactgaaaatattaacggcgcaaagcttgatccgaatactccggagattcttgaatcgaaaagagaaaagaacagcaaggagcatgtaagcgatccttcaaggttggatatagaaggttatattttcaaggacagcaagttaataaagaaaaagaaaaaagtatatacagatgtgtacggagttgattccgacagcattgtcgtgaagagtaacaccacaaatcactataaaaagcatagatcaaagtcgcatcatcaccattcaaagcatcgaaagatgaaaacctggaaaaaggtgcttttgtcaatcggctgtacattacttggattagttatacttgccgtaggcacggttgcgtatttgatttatcagggcggaaacgagctgtttaatacggatattcatgttaccgccccacagggcattgaaaccgaggagaacggtaagtatgttatctacaacggcgaaacctacaagtttaacgataaggtgacaaatgttctttgtatgggcatagataagcgtaaccttgacgaggacaacaacagcaaggttaaagcaagcggcggtcaagccgatgtacttatgcttgtatcaattgatacctcaaacggtaaaatcaccctttttaacatttccagagatgcgatggttgatgtcacaatgtattccgcaggcggtgcgtatgcaggaacggaaaaacagcagatttgtctttcatatgcatacggtgacggtaaggaatcaagctgtgaaaatacggtaaattcggttcagaggcttttctataacattcctgtcaatacatacttctcgcttgaccttgacggtatagcggcgcttaatgacagcataggcggggttgatgttgtatcccccgaaactatcggcgattttgttgagggagaaagctatcaccttgtcggacagcaggctgaaagctttgtgcgaacccgtgacacaagcaaggttgattcaaacaatatgcgtatgcagaggcagaaggtttatattcagtcttttatgaatacggttcttcagcagacaaagaaggatttgaccacaccgcttgatttgttcaacgcgtccgctccgtattcgtgtacaaatcttaatccgtcaaaggtaacatatcttgctcagcaggctgtgcttggcggtatgaacggaattgatatgctgtctgttcccggtcaggttaaaatggggtcaaagtacgcagaattcaatgtcagcgaggcagaattttatcagatgtttttgagtatttattataccaaaatagaataataatcaaacaaataaaatgcatcagattccaagtaaggttctgatgcatttttgttttgaacgaaaatttatgtttcgtcaaaaaaaggtgatagatttaattttgtgaaagttgcaaagttattgataatcagtatttttatcatatcaaaacatatttattgaacaaaaaattcattagagcaggcggataatatccgcccttacggctcggtttgtacagaaaaccgcaatgctacgctcgggcataatatgttttgtatttaaacaaactgtcttcacgaatagagtacggcggctcgccctaatttagagcgaataaccgcaatgttacgctcgggtgtaatatgttttgtaattaaacaaactatcttcacgaatagggtacggcggctcgccgtaaaaaacagacagccgattattggctgtctgcattttgttcaatatttaatttgatgcggaagttgttccttttgaagaagtgccgcctgtgaacaattcttcaaaaacgaagcttgcaaacttctttctctgttcgtcaaggtctgaaatcttaattgttgatgtgattctaccgtcccatgtttttgttttatcatcgtagtaccaaagaccctcttcgggaacataatactgtttaacatcataagaaagataggtgagagcgtgagaaacaagtgctgtgatttcgtccttcttgaggtttgttgttacaagaggaccgacagagcttacaattgaaacaatctgaccgaggtctgcacttttcatacttgtgaacagagtttcaagaagctttctctgtcttgaggttctgtcccagtcgtcaccgtcaagaccgatttcgttgccgtcctcgccctttgtaagacctctgtttcgagcataccaaagagcctcctgaccgttgagatgaacagtaccaggtgcgtctgtgatagtcgttcttgtttcagactggttgtttttgtacatctgatagttgatgtagtcaatttcgtcctgagtaacttccatatcaacaccgccgagggtgtcgataatcttcttaaagctgtcaaagtcaacaaccgcataacggtcaaccttgatgccgaagtttgcttcaattgtctgaattgaaagctttgctccgccgtagttataagatgagttgagcttgtcatatccgtaacccggaatataaacataggtgtcacgctggaatgatgtcagtttaagctttttgtggttgttatcaatggtcatcatgatcattgtatcacttctgccgtgtttatcgccgtttgaattgtcttcgccaaagagcataacattaagctccttggagttctgcagaagctctccctctgaaagcgaaaggtttgttgtgtcgccctcaagcggtgcaaccgatgagttggtagctgctgtgttgttggtgtttgtgtcgtcaagatccttgaagttgagagtatcaaggaacgaatagtagtaaagcattccgccgccgcaaatcagaaaaatcattgaaaacacaaggcaaagaatccttttgagtctgccttttttattatataattttttgatctgcttgtttgagcttatgtcaacaaaattgcttttctgactgtttttttcgtaatttggcatattactcctccaatcgggtaaaaagcacacaatacataagtatagcttattataccatatgagaatttcttttaatgctaaattagaattaaagtctgtcttttagtgaagttttagtgaaatttctgtcggaataacgctaaaaattttgtcagtttatatcaatcctgttcatcaagcgacaaataaaaggacggcagaaactctttttcaaacacttctgcttcgggcatattcatattatgaattgatttttcggttgcctcttttgcctttgaaaactcgctgttgcccatttttatttcttcaatacattttatgagtgcggaaaatttgtccgccgcttttacaaattttttaagttcgctgtcgcctgtaccgttcattttgatgatttcgtccatatcatccttaaaatcatcggggagcattgatacaagcctgtcgcctgcattcgcttcaatttctttgtagacatttttgatttcgggattaaagtattttacgggagtcggcatatctcctgttattatttcggttgagtcatgaaaaagtgcgagcaatgcggctctttcggcgttaagactgccgccgaagcgcttgttatgaatcaaaacaaggcaatgtgcaatcattgcaacatcaaggctgtgctcactgagattctcgtttcttgtgttgttcataagcccccagcggttgatgtaccgcattcttgaaagcattgcgtaaaaatgtgaaatattcatctgtagtttctcctgttttttgctaaaaattagtgcaatttgtattgtactatgttataatgtagtgtgagtgtgagtatcctctgctccttgtaagcaaagcagagtgttgctccgatttaaatctattatgcaggtgtcttttgaataaatgacggtgaaagacatttacatcattgattatactattcataatttaaaagtaaagaaattatcgaaaaaataagattttttctgctttttgctccgtggaggattttatgccgagcagaattttgcaaaaatatcccacacaaaaacttttcggtctgcgtgtgtttcttatatcaattataacggcaactgcactttttcttccgtttatcataatggggggcggtgttttctattattacggcgatttcaatgttcaggaaattccgttctatcagcttgtacacgataccgttcgcggcggcaatctcggttggatgcacaatgttgacctcggaacggatatgctctcaagcttcagcttttatcttctcggcagtccgttcttttggctgacgattccgtttccaagcgaggcagtgccgtatcttatcggaccgttgctgattttgaaattcggctgtgcgtcactttctgcatacctttatcttaaaagatatgtggctgacaggaatttcgctcttgtcggcggactgctttacgcattttcgggattttcaatctacaatgtgttctttttccattttcacgagccgatgataatgtttccactcttgcttgcggcacttgacgcattcatctatgacggaaaaagaacggtgttcgctcttgcggtattctccgcctgcgttgtaaactactacttctttgtgggacaggtactgtttgtaatcatctattttcttatgattacgcttaccaaagcctacaaatttaaaattaaaaatttccttttgcttgcacttgaggttataataggttttgttgcaacggcatttatattgttgccgtcagttctagggcttatgggcaacccaaggctttcggagcttccgaacggttgggattcgcttgtgtacagtcagccgcaaaagtactggcttataattttaagcttgttttttcctgcagatatgcccgctttccctgtgttcacgcccggttcaaactgcaaatgggcttctgttgccgcgtggcttccgcttgtcggaatgacaggggtcatcgcatattttcaggtttgccgaaaaagctggctcaaaaagcttctggcggtgcttgcggtctttgcgtgtgtgcctgttctgaacagtatgttccaaatgatgaacagctccatttactacgcaagatggttctatatgggcgtgcttatgcttgtgcttgcaacgatcaaggcttttgaaagcagaaaaaccgattggaacagggcaattcgttggtcggcaggaatcacggtgggtgcaactctgctgattggacttatgcctgtgagctatacggatgaggagagcggcgatattcaaaatacggttgtcggcactcaggcaacatttgaacgctattggctttatgttcttatggcactgttaagtttgcttgcgtttgttctcatcataaaaaaattcagaagaaacaaaaagagattcactgttatgctgactgtaggtatcctgagcgtttcgctttttacctcatattttataattgccacgggctatttctcaagtagcagtacaaagactatcaaggaagatatcataaacaggcgtgacggtataacaattgcagatattgacaatgtccgcagtgatttttatgaatgcgttgacaatacggcaatgttctggcagattcagagcataaactgctttcagagttctgtttcaacatctataatgcagttttacgatgcactcggaatcacaagagatgttgcgtcaagacctgaccttgatgtgtacggacttcgcccgtttttgagctgcaaatatctttttgactatcgcggcgacggcaagtcgggaagcacaaattcattcattgatgaggacggcaacacaagaatgccgggttggaagtatctgagaacgcagaaccgttttgatatttaccgcaatgagcgttacatcccaatgggatacacctttgataaatttattgccaaagaggagtttgactttgttccgtcggctcacaaatcagaggctttgctttatgcaatggttcttcctcgcgatttaatgaaaaaatattcctcgattacaggatacagcgacaaaaagtacaagctgttgtacggcaagcatcccgaatactacgacagcattacggaaaccttcagctatgataattccgactacaaaaaagtctgcgctcagagggcatataacagctgttcgtattttgaatataccgacaacggttttagggcagagtatgacaatacaaagggcgacgacaatttgctgtttttcagcgttccttacagcgatggttttaccgcaaccgtaaacggtaaggctgttgatgttgaaaaagttgactatggatttattgcggtgaaaattccaaagggcgataagtgcgacattgtgtttacatacgaaacccccgggttttcaacaggtgtaaaaatcagcctttgcgcactcggtgcatttttggtgtacggcgcagttatcctgacggttaaaaaaataaaaagaaaaaataaaaactgatacagatataatcagcgtataagtacggaggtatttattatgttcggaaacaaaatacttgactataaagacgagcttttaaaggatcttgacacactcctttcctttgaatcggttgacggcgaaaagaatgacgagtgtgacaaagccttggattttatacttaaaagggcagaagatttcggactgacaggggagaaaacaaccgacaagagcggtcatataacccttggtgacagcggaaagctttgcggtgtgcttactcaccttgatgttgttcctgcgggaaacagctggagcgttccgccgtatgcgcttaccgaaaaggacggcagactttacggcagaggaattgcagacgacaagggtgcggctcttgttacgctctattgtttgaaagcaatcaaggacagcggtgtaaagggcgtgaacaccctgcgtgctatttacggcacgggtgaagaaacgggtatggaggatatggaaaactatttcaagaaaaatccacttcccgacatggcgttcactcccgacagcgactacggcatctgttttgccgaaaagggaatccttcagcttgaagtcagcacacttttaaataatgcaacaacactcagccagttccatgcaggcagagcagttaatgcagttcccgacagagcgtatgtaatgcttgattcatcagactatgacgagcagactctcatgcgccttgcagacgcaagtgacggtgattttgaatttaattacactattgacggtcttatgataatcagccgtggcaaagcggctcatgcgtgtgaaccggacaagggctacaatgccgcagcggcacttgttgaccttatctcaaatgtttacacaacaagagaaacaggttcaatctgttcatttattgactacgcaatcaacaaggaaacgaacggcagatcactcggtcttaaaatgagcgacgctgtttcgggctcgctcaccgtaaacctcagcagcgtgaacattgagggacagaccgcaagggctgtgttcgatatccgttatcctgttaccgttagcgtaaacagagttctcaaacagtttaaaaaggttgcaaaaatcagcgacctcaaggttactgttctcaatcacgaagaaccgctttatgccgataaggacagtgagcttgtaaagctgctctcggacgcttacgaaagcgtaacaggcgaaaaggctgagctttattcaacaggcggcggaacttacgcaagaatgctcggcggtcacggtgttgcattcggtcctgctttcaaaaatgacgatgttcgtatgcacaatgcagacgaaagtatggataaggagaacttctttaaacacgctcagatttgccttgaggcaatgtacagaatgtttaccgacggagaataatgcgttttgttatgaacaaattcagatgaaaagggaatgctaatgaatactgaaaaaactgttagaaaacaggcaaaagcggttcttgagggaaaccggtcggtagttatttcacaaattatggtgaccctgcttgcatttttgacagggctgtttgctttcagccttgcaatgtcagcttcgggaatgtatggcgtaaaaaatccgagtcagtcacagagaatccttatgacggttttcggacttattttgtttgcctttgtagttgtaattttaccgcttgtcaacggagtctacagaactgtgtgcaatgtagtcaggggcagagagtgcagtccgcttgatgtgttttactactataaaaagccgaaaagattttttaaatcaattattcttgatgttatttcgctcggattgttttttatcataagcggttttgctaatgtttttaattaccttaactcagtttcaacgcagatagttgaaaactcaccgtcactcacggttgttatggcggttctgctcgttgcggcatggattgtcagtgctttattcacggtggtttgctatattatatttgtccattacacctttttggcttacggctttaacgaaaatttgcctcttggggtttatcttccgagaatgatggcattctcaataaagaattttatgtcaaccgtaaaactgtttgtcggtttcatcgggtgggcggctctgtgcttttttgttgttcctgcactttatgccgtgccttattttctgacagcctctgcaatgtctgcaaaatggctgttagagcttgaagggagcaaggatattatatgttagtttcactttgtatgatagcttataacgagtcaaacgcgctcagcggacttttcagagatattgcacttcaggattatccgcacgataaaattgaagtggtttttgttgacagtatgtcaaccgatgatactaaggaaaaaatggaaaaattcagagatgccgactacggcttttggaatgtatctgttgttcaatgcgtaaagcgtaatcaggcaacctcatggaatgccgctctgatgaccgctaagggcgatataatcatcagagttgatgcccatgcaaggattccgagaaactttgtttcacgaaatgtttataatattaagcagggagaaaatgtagtaggcggcggcagacctaacattacatcaaatgtttcaagctggaagctcaccttgcttgcggctgaggattctctcttcggcagttcggttgcgtcatacagacggccgcttgcgcaaaaggaatatcttgacagcctttttcatgcggcttaccgcagagaggttattgcaaaggtcggcggttttaacgaaaacctcggcagaaccgaggataatgaatttcactaccgcattagaatggcgggctacaagatgtgctgttgccccgatattatttcgtatcagcattcacgaaatgaccttcacggaatgataaggcagaagtattcaaacggacggtggataggacttacactctcggaatgtcccggttgtctttcatactttcactttgcaccgtttctttttgtaatggcacttctcggctgttccgtgcttgcacttctcggacttccgctttttttgtacattcttttgataatctacggaatgtttgatattgtaaacgctgtcggatgttgcacaatgaaaaatgttcagcctcagtttgtgtttttgccgttcattttcccgttgctccatgttgcctacggaataggcacaatcgttggtttgattcagattccgtcatggcggaagaaaatcaaaaacagcggtgcgaaagaacacattgaaaaggtaaaaagaaaaatcagggaaaacacacttcccggtcattcatataaataatttttgggcggataatctccgcccgtatttgatatttacggagatacttatgactgaaaaagtagaacttaccccagaacttttgcgtgagttacagcttaaacagcttgatatgctcgtgtatttcagggacttttgcgaaaagaacaatctcacattctatctcatcggcggtgcgttaatcggtgcgctcagaaacggcggattcgttccgtgggatgatgatgttgatgttatgctgccacgagaggactacgaaaagctgtacaagctttggcatgaacagggcgcagacggaagatttcgacttctcaaaaccgacagcgatatgttcacgggcaatatttttatgaccgtaaccgacacaaattacactatggtcaagacaaatcagaccgaggttgatattccgcacggacttgtgcttgatgtctttcctcttgatgtttgtcccgacagtcgttttgcacgcaaaatgcagtatgtgtggacaatgctttattcgctgtttttggctcaggttgttcccgaaaagcacggcggaattgtgggggcaggcagtaaggctttgctttcaattttcagagggaaaaagctccgagaaaagatttggagaactgccgaaaagcatatgattaagtacaggcttgataaaaacaagtgtgtaacggagctttgttcgggccctcattggatgaaaattgagtatccgaaacacatttattcgggcgttgattatgtcacatttgagggcataaaaatgccgtgtatgtctggctatgacgagtatctcagaatggttttcggtgattatatgcagcttccgccggttgaggacagagtgccacaccacgatattgcatatcttgacctgaactcaccgtgtgaaatttatgacagcaaaagaaagaataagcaaaaataacggtgcattatggagcttgtaagagataattgggctaaaaatgactatgatgattttgtagaggaacttcgttcatatgccgatgaaaagtacagaagctttcattcctcattaattcccgacaatgacaagggcttttttatcggagtaagaatgcctgttatgcgaaagctcggcaaggaaatttctaagggcaacggacgcagttttttagagcagacaactgataattcttatgaagaaaaaacaatgcgaggtattgtaatcggtttgctcaaaaccgaaagctatgaagaatttttgatgtacagcgatgattttgtacagcgtatagacagctgggcggtttgcgacggcttttgtgcaaatttaaagcagacgaaaaagtataaatcagaatttttccctcatgtttgtgaatacaccaaaagcgacaatccgtggataattcgtgcaggtcttgtgctgatgcttgactattatcttgaagatgagtacatagacacggtgcttaaatgttgcgacaatgcgaaaaatccgcattattatgtgagtatggcaagggcatggcttgttgcaacagcacttgcaaagtgcagagaacagactatgcggtacataaagtcaaattcgcttgataacgcaacctttaataaaatgattcggaaatgcgttgaaagtttcagaattgacgatgaaacgaaaaaatatctcaaaaccctgaagagatattgacaaatccgaaaatcggcatataatataatcaacagttgtcttcggggcggagtgaaattctccaccggtggttaaagtccacgaacaggtgcaagcctgccgagtctgtgaaattcagacaccgacggttatagtccggatacgagaagatgcggcagaacaggcggttcgtctgttttattttggtacgcaatcccgttacatttgtagcgggatttttcttttcccgacaactcgaaataatttttcaggagtggtcgtaatgacaaaatcaaaagcaaaaacaattaattcagacaacacggcaaagacaacaaagcttgccgtaaccgcaatgcttgcggcactttcggcagttcttatgttctttgaatttcctctcggattcatcgcaccttcattctatgagttcgatttttccgaagttcccgttcttgtcggaacattcagcatggggccgattgccggtgtagtaattgaatttgtaaaaattcttgttaagttccttatcaaaggcacaagcacaggcggagtaggggagcttgcaaacttcctcatcggctgttcgtttattctgccggcaggtttcatctacaagtacaaaaaaacaagagtaggtgcgattgtcggaatgcttacgggtacggttgcaatggcggcaatcggtgtggttcttaacacattcgtgcttgttccgctctactcgtcatttatgccgcttacagaaattatcaaaatgggacaggcaattttccctgcaattgacggcacatttacattctgcctgtactgcgtaggtccattcaatatcattaagggactcatcatttcggtagttgttttcataatctacaagccgctttcaagacttatcaacagcctcgatgcccttcttacaaagaagaaaaaagcaacggttcagtaaacccgaaattaattttttggttgacaaacaacaaattcaggcgtataataacatacggtgtcgaaaggcatctatcacagagtagaaatttgtgcgtgaagtgttttgcggacggggagttgccgcaagaacgaaaggtttatcctacggtacagatttcgcatcccgctgttactttgggacatataattcagcgggcagagcaatctgtccgcttttttcttcctgaagcaacaacagagattcaggaggtaaaaaatatgtcacaactcaaaaaaattcaaagctctttgcttgaaatgaagagtatctacgctcttgcggcaattgcaatgctgcttgcactccgtattgttcttggtttttttgcaaacagcacacttccgtttttcggaaacaatgtaaagctcagtgcagcgttccttcccatagccgtaacaggcgtaatgttcggaccgattcctgccgcaattgtcggagctttgggagatattctttcatttatcattgctccgacaggcgcatatttcccaggctttacaatcaacggctttattacaggttttatctacggtatgtttctttataagaacaatgtaactccgctcagagttgttcttgcatggtttacaaatatgctctgcgttgaaacatttcttacggctttttggctttacacactctacggcggcggttcaacaccgtacacagtttatcttacagcaagattcatcagtgttgccgttaagtgcattcccgagattattcttgtgtttgctcttggtaagcttgcaggtaaaattcgtgttccgcacgcaataaagagaacctgatgaaaaactaatgtataactttaaggttggaaatcgactgctccccgcagtagtttccaaccttttttgtttttgtgaaaaataattttttgtaaacataaattcacctaattcgggcattgaaattgtttttctatcaaactatctgctcgaattgggaacggcggctcgccttgccactacgagattgctatttcaaataaatcaaaagtcggaaagcaaatttgaaatctgctttccgactgaattttttgttataaaatttgactgcacgattaagcccacttgagggtatcgttgtagagattgatgtagtcctgagccgaacgatcccaactgttgtcgctcatcatagcacgccacataagctgatgccaaccctggtcgtcctgaatgccccacaatgctcgtcttacggcaagctgcatatctgcacattcatagtttttgaatgtaaatccattaccgtagttgtcggcactgtcgaaaacagagtctttaagaccgccaacctcacgaacaacaggaattgtgccgtaacggagtgcaatcatctgtgcaagaccgcaaggctcctgagcagaaggcataaggaaaatatctgcgcctgagtaaatctttcttgcaagttcgggaacaaagccgtgacagaagcaaagtctgcccggatacttcgcctgcatatagttgaagtagtcctcatactccttgtcacctgaaccgagaattacaaactgcatattttcggtgtccataagctcctcaagacccattctcacaaggtcaagtcccttgtgtgcaacaagtcttgttaccataccgaccagcggaacatcccagcgctgttcaagacacaaacgctcctgcaaagcacgcttacattcgcccttgccgctcatatcgtcctttgaatagttgcgataaagctgatagtctgtttcgggattgtagctttctgtgtcaataccgttcttgataccgcaaagcttgtagtgacgaagattgagttcgtcatgaagtccccaactgaaccacgggtctctaatttcagccgcatagcttggagaaaccgttgaaacacgggtagctgtttcgatagcacccttcatcatattgagtttgccgttcatttcaagaatctttgtttctgatgtaggaatgccgacgcactctgtgtttacttcccagccgtattcaccctgatactggatgttgtgaatagtgaacagactcttaatgttatagtaccatggtctgtgtgaatagaacagatagtagtaaacaggaacaagagccgtctgccagtcattacaatgaatgatgtcgggatggaaatcaatgtaaggaagcatttcaagaattgcacgggagaagaaagcgaatctttcagcgtcgtcataatgaccgtagagagtgcctctcttgaaataatattcgttatcaataaaatagtatgtacagtcattccatcttgcccagaacaaaccgcaatactgatgacgccatgcaaccggcacggtaaagtttgtgatgaagttcatggagtttttaagttcctgcggaattgtgccgtaaagcggaacaacaattctgcaatcctgaccttttctgcaaagtgtatggggaagacttcccgctacatcggcaagtccgccgcttccgcaaaacggattagcttctgaagcacagtataaaattctcattgtaagattacctccttgtttaaacaaactttatacaacggattttttagcaatataaatggggtacgaatcatatcccataagtgaacgaccgtccttgatggtaacatccttatctatgataacatagttaaggttggtattgcaacctatttttgtgtcctgcattacaatacagttagaaagctttgcgccttcgccgacataaacaccctttgaaataacgcagttctcaacctcaccgttgataacacaaccctgtgcaatgattgaatttttcacattgcttgtaagtccgtagcgtgacggagcgtcatctcttacctttgtatagataggtctttgcggattaaaaagctcatcccttacttcttttttcataagatccatattgaactcgaagtaatcgttgattgagctgattgttgcacagtaacccttattttcgtaagcataaatactgtatttgcccagactgctctgaagaagtcgctttacatcaagctgattaacgctgatggcgtttctgatttcactcataagaaggtctttcttgatgagaatagagccgtatgcgtggttgaatgcctctttgtcaacaacaccgggctttacaaaaatctgatttaccttgccgtcatcatctacatcaagggtaatcggtctgtcatagccctgcggaattgcatgattcttatatataagtgtaatgtctgccttcttctttgagtggaagtcaaaaacatctgtgtaatcaatgttagtaattacattgccctgcgagataagaacatattcctcacggcaatgctcaatatatccgtgcatattgtagattgtttcaacaaagcttgaaaaagccttgccgtcatacggaggaagaattgaaaggttgcttcttctctttgaaaggtcatatgcactgcctgaacccacatgatccataagtgactgaaagttgctttttgcaacaatgcccacattgcttatacctgagtttgacatatttgaaaggtcaaagtcgataattctgtatttaccgccgatcggaatgcttgcagttgttcttgaagatgcaagctccggaattttgtcgtcaagtgttgccgcaaagatgaaaccgagtacattgttacttctcattgccgtccacctccgtgtcgctgtctatcatggtttttgctttgataacggtgttttctttgataacggtatttgcaccgacaacagtaattccccaatcgtcaagattttccgtttcttcaggtttctgtccgacctttgcatttttgccgacaacagtattttctgcaataattgcaaactgaacatctgcgccgtcttcaattacagcacccggcataatgattgaagagttgattgttgcgtttttaccgattgtaacacctgcaaaaagaattgagaactcaaggctgccgtaaacattgcatccgtcggcaacgagtgaattttggattgacgcctcgtttgaaacatagtgcggaggcatcatcgggtttcttgagtagatatccttgaggtcgagagtaacctttggatcgagaagatccatattagcctcccaaaggctgtcgattgttcccacatccttccaatagccctcaaaaggataggcaaacatacgctcgcctgcgtcaagcatggcagggaggacatccttgccgaaatcatggcttgaaccctctttgagttcatcctcagtaagatactttctaagctccttccagctgaaaatatagatgcccattgatgcatttgtgcttttcgggtgagcaggcttttcctcaaattcgtagattgaaccgtcctcgtttgtgttgagaatgccgaatcttgaggcttcctcaagcggaacatcaattaccgcaattgtacaagcggcattcttttccttgtgataatcaagcattttgttgtagtccattttgtaaatatggtcgcccgaaagaataaccacatattcaggattataacgctcaatgtagttgatattttgataaatagcgttggctgtgcctgagtaccagtctgcaccgtcaacagcctgataagggctgagacagtttacacccgagtgcatactgtcaagatcccaaggctgaccgttgcctatgtattcgttaaggacaagaggctggtactgtgtgagaatacccacagcgtcaatgcctgaatttacacagttggataacgggaaatcaataatacgatatttgccgccaaatggtacggcaggcttagcaagctttcgggtaagcacgccaagacgagagccttgaccgccggcaagcagcatagccactacttccttttttggaaacatcttaaaatacctccgatatttattttagtatcttttttagcttaaatataattacagtcttgtgactgaaaatatcaattttatttctgaacttcatcgggttcaagttcttttgtacacctcagatagattacgctgagtggggggagagtgagtgaaagtccctgatcaaagccgtgaattttcattgactcggttttaatgttctttccgtttacaacaccgctgccgccgaaacgctcctcatcagagttaaaaacctcgtcataaagaccgaatttcggaacgccaatgcaatattcgtcacgcctgatgggctggaagttgcataccgaaacaatctcatcaccgtttttgtcggtgcgcttgaatgcaataacgctgtttgtgtagtcgtcatggtgaatccagtcaaagcctttccagacagcgtcaagctcatagagaggcttgcagtcaagataaaatttgttgagctccttaaaaaatgttctgagctttttatgcttttcaaattcaagcaaatcccattgaattgcctcattgaaattccactcgtcaaactgaccgatttcagttcccataaacacgagttttttgccgggatgagcgtacatatatgttataaacgctcttacgcctgcaaattgttcatcgtactttccgggcatctgctttatcagcgcacctttgccgtgagaaacctcgtcgtgtgaaatcggcaaaaggaatttttctgaaaaagcataataaaagctgaaagtaaggctgtcgtggttgaacggccgccacattgaattgagcgacatatagtgaagcatatcgttcatccaacccatgttccacttgaaatcaaatccaagtccgccgtcctctattttatgagtaagctttggccacgatgtgttttcctcggcaaacatcataacatcggggtggtacatatggacagccgtgttgagtctttttacaaaatcaacagcgtcaagattttcttttccgccgaatttgttcggctcccattctccctcggatttaccgtagtcaaggtagagcatagaggagagtgcgccgattctcaagccgtcaatgtggtatttgtcaagccaaaacattgcgcatgaaacaagaaaacttgtaacctcaaatcttgcgtagttgaaaaggcaggttccccacgagtcacgcttgctcgtttttgggtcattgctttcatagagaggagagccgtcaaattttgcaagtccgaaatcgtccacggggaaatttgacggaacccagtcgagaattactccgataccctcacagtgaagcctgtcaacaaatgtcataaagtcggacggcgtgccgaatcttgaggttggggcatagtagcctgttgcctgatagccccagctaccgtcatacggatattccataataggcataagctgaatatgagtgtagtgcatctccttgagataggggataagctcatcggcaagcttttgataattaaagaagttgccgtcgggatattttctccatgagcctgcgtgtatttcataaatattcatcggtgaagatgaaatgttgttttctttgcgtttgtttaaccattcgccgtcattccacgaataattttcaatgtcatacacaagggatgcctgaccgggacgggtttgagcatgaaaagcatacggatcagctttcataagcctgtcgccgtattcgctttcaatgcagtacttgtatgcgcaaaattcctcgaccccttcgacaaacacctcccaaacaccgtagccgatgtcgtacatataggttgcgttattgtcccaattattaaattcgcctgcaaccgaaacgctccttgcggttggtgcccatactcggaacacacaaccgtttctgccgttccagttcacgaggtgtgcacccaaaagattgtatgcgtacacggaatctccggtatgaaaaacttcaagtgccggtcttgcctcgttaaagctgtaattcataagaactgctccttgttaaataccttctgattttgattatttgatcatacttatataataccaaaaatatatgtcaatttcaagcaaattcaaaaaatttaaaactaatttttcgtgtatattttataaactgcgactaaatgtaacattttagagcataattttacgaataaagaataaaaacccgaaattctttacaaaagcaaaacaaaaagggctgtccaaaacggacagccccaaaaataatctgtaaattcagattagccaagctcagcgaagtacttaattgttctaaccatctggcttgtgtatgagttctcgttgtcgtaccaagaaacaacctgaacctcataaagatcatcagcaatctttgataccattgtctgtgtagcatcgaagagtgaaccgaatctcataccgattacatctgaagaaacgatcggatcctcgttgtaaccgaatgactcggaagcagcagccttcatagcagcgttgatgccttcaactgttacatctgaacccttaacaacagctgtaagaattgttgttgaacctgtaggaacaggaacacgctgtgcagaaccgatgagcttgccgttaagctcaggaattacaagaccgatagcctttgcagcacctgttgagttaggaacgatgttagaagcacctgctcttgctcttctcttgtcgccctttctgtgaggaccgtcaagaatcatctggtcgcctgtgtaagcgtggattgttgacataataccgctctggatttctgcatacttgttaagtgtgtcagccataggagcgaggcagtttgttgtacatgaagcagctgaaatgattgtatcgtcagctgtaagagtcttttcgtttacgctgtaaacgattgtcttaaggtcgttgcctgcaggagcagaaataacaaccttcttagcgccggcatcaatgtgagcctggctcttagcctttgatgtatagaaacctgtgcactcgagaactacatcaacaccgagctcgccccaaggaagctcagcagcgtttggcttagcgtagattgtaatctctttgccgtcaacgatgattgagccttcgcctgcttctacagtgtgaaggttttcaccgatcttaccgcagtagccgccctgtgctgtatcatacttaagaaggtttgcgagcatagcaggatctgtaagatcgttgatagctactacttcgtaaccctcagcaccgaacatctgtctgaaagcaagacgaccgatacggccgaaaccgttaattgcaacttttactgacataaaaaaattcctcctaaaattctaaggtgcttctattatattacatttttttcatttcttcaatagcttgacaaaaatttaacgaaaaatttttgagttttttacaaatacggtaaaaaacacggtctgattttgcgtttttaaggcaaatttgagccgctccgttccgctccgttcaaagaaatgtaattttttcacctgccacaactaattatctgcaaaaatacctcgcttattcttgacaatttggtgattctattataaaattgtactatccgctgttgcggattttggcaaaagtacagtttttggcttttgcaacttttttaatcagactctttaagagagccgttatatatagatattttttataatttttataatgtttcagttgcctgaaatgttgaaaacggtcattacggtgttttttttgactgtgcatataaatatgtaaaaaaatatttagaaaataaaaatgaaaattgaatatctttttaacggcacctttaaagtctaattgattgggaactgtgaaatacttgaaaaaatcaaactaaggaggtgtccgaattgccgttatggataagtattatctgcattatcgccgcaattgttgtcggtgcgggtgcaggtgttttccttggaattgccatccgtaaaaacactgccgaaaaggaaatcgggagtgctgaggaagaggcaaagaagattgtggctgatgcaattaaaacagccgaagcaaggaaaaaggaagtagtccttgagggtaaagacgaggttcatcgtttcagaaatgagagcgaaaaagaaatttccgaccgacgcaaggaagttcagcgtcaggagagaagaatccagcagaaggaagaaactcttgacagaaagctcgacaatatggaacgcaaggaagaaaaagtcaacaaaaagcttcgtgatgctgatgcaaaactcgaagaagttgaaaccttgaaaaagagccagtttgaaatgcttgaaaaaatttcgggctacacggcagaacaggctaaaagctatttgctttcacagcttgaaaatgagcttgctcacgagaagtcggttaagattatggaatacaccgaacagctcaaggaggaagcagacgacaaggcaagaaatattatttcgcttgcaattcagcgacttgccgcagaacaggtttcggaggcaacaatttcggttgttcctcttccaaacgatgagatgaagggcagaatcatcggtcgtgagggccgcaacatcagaaccattgaaactcttacgggtgttgatcttattattgacgatacacccgaggccatcacgctttcatgctttgagcctgtcagaagagagattgcaagaattgcacttgaaaagctcattgcagacggaagaatccatcccgcaagaattgaggagatggttgaaaaggcaagacgagaggttgaatccgaaatcaagcgtacaggtgagagagctgtgcttgatgcgggtgtgcacaatgttcatcccgaaattgttaagcttctcggcagacttcgttaccgtaccagttacggtcagaatgttcttgatcactctcttgaggtttcatatctcgcaggtatgatggcaagcgagcttggtcttgatcctacaatcgccaagcgtgcaggtcttttgcacgatatcggcaaatccattgaccatgaggttgagggaacacatattcaaattggtgttgacattgccaaaaagtataaggaaagcgacgctgttattcacgctatccatgctcaccacggtgatgttgaggcgagaacaattgttgcctgccttgtacaggcggcagacgctatttcagccgcaagaccgggcgcaagaagagaaaatgttgaaaactacattaagcgactccagaagcttgaagaggttgcttcttcttttgacggtgttgagcgtacctttgcaattcaggcaggccgtgaggttagagttatggttaagcctgagattgtcaatgatgagcgtatgattccgcttgcaagagagatctgcaagaaaatcgaagaagaacttgaatatcccggacagattaaggttaatatcatccgtgaaagcagagcttccgattttgcaaaataaaatatcttgattttaactacggttggcagggctatgttgaccgtagtttttattttgtagggacgatattatccaccagtacggcgagccgccgtacctgattcgtgtagataggttcattaaatgaaaaattgaaaattgaaaatggaaaattgcggtcgggaagatggtttgcaatataaaaaaacatattatgcccgagcgtagtatagtagctgtttgcacaatttaatgtagcggcgaacgaggnnnnnnnnnntcgccgctacaaacgctacaaagaatatgctgtaatcaaaaaaataatttgcaagaaaattaaataaacttgcaaaaattaaatttgtgccgtagcttggatttttgacctgttattgtaaactgtaatttaaaaaaacagcaaaaaactttaaaaaatattcaaaaaagtattgacaatcggttaatgaggctttataattcaagatagtaaggcaaaggtcttacgaagttttcggaaaactgaatataaaaaggacaaggaagttcactttggtttcttctgattttgcaacaaagtttttaaaacctgcaaaatcggacaaaaacattgtgagctttatttttttgtttcggcaaaaacggtttatgtggaggttaaaaatggattcaggaaatataggctttgtgctgctttgtgcggctttcgtatttgtaatgactccgggtcttgcaatgttctacggcggtcttgtacgaaagaaaaatgttgtaaacacaatgatgacctcaatttttatcattggcataggaattgttatgtgggtgcttttcggttattcgctttcgttcgctccctcgggaaatgcttttatcggtgatttccgctggctcggtcttgagggcgtttcgctcacggagggctacacggatgatgcgtcaattccgaatatggtattctctgcgttccagatgatgtttgccgtaatcactcctgctcttatcacgggtgcggttgcaggcagaatgaagtttaagtcaatttttgttttcacaattttctggtcgcttatagtttattatccgctcgctcacatggtgtggggacagggaggacttttaggtgcagacggtatcggtgctctcgactttgcaggcggcgatgttgtacatatcagttcgggtgtttcggcacttgtactctgcatactcctcggcaagcgtcacgattatgaacattcaatttacagaattcacaatatcccgaaagttgtactcggcgcgtcgctccttatgttcggttggttcggctttaatgcgggttctgcacttgccgccgacggtcttgcggctcacgcatttatgacaacaggtgtttcagccgcagccgcaatgctctcttggatgctctgcgatgttataaagaacaaaaagcctacgcttatcggtgcaagcacgggtatggttgcaggtcttgtaggcatcacgcccggtgccggttttgttccgatgtgggcggcagttattatcggtttgacaacaagccccgtttgctatattatgatttcatacggcaagaaaaaattcggttttgacgatgcgcttgacgcattcagctgtcacggcacaggcggtatctggggcggacttctcacaggtgtgttctcatgcacggcaatcaacagcagtgcaggtaacggtcttgtgtacggtgagtttgcacagttcggtgctcaggcggcaggtatcggcatcacaattgtaattgcggttgtcggaacactcatctgctacggcatcacaagacttcttacaggcaaaatcagggttgacctcagagatgagcttatgggacttgatgtttcacagcacggtgaatctgcttatccgtcatttaacggtcttgacaactaacggaggttttaaagtatggaaaacaataacgatattcagcttataaaaatagaggccgttgttcgtgaagaaatgtttgtagatgtcaaaaaggctctcacggatatcggcgtaaacggaatcacggcttatcaggttgtcggctgtgggattcagcgaggtatgtccgagtatgtaagaggacagaaggttgatgttcaggttctgccgaaaatcaagtttgaaattgttgtttcttccgaagaatgggagagaaaaacaattgaggcaatcagaaaaacagcctttacgggcaacccgggtgacggtaaaatatttacttactatcttaaacaggcggttaaaatccgtacgggagaaacaggctacgatgcaattcagactcccaactttgacgactgatattttcctattttcctatattaaaaaaagtgcgtaccgaatttcnnnnnnnnnncggtctcggcattcctgctgaaccgctcttccgatctccgaatttcggtacgcactttttgcttgtaaaattgtttatcttcttattgtaatatcttccgggctgacagtgttgtcacgaagccgattgtaataatcgggatttgaatgctttatgcttatcggctttagctcgggagttgcaaaacagtgtgttgttctgcctgttgcagaaagttctccgtttttattgttgaagattttatagtcaaaaatcattcttgaacccgtaaaaaatacaagatttacttcaacggaaaactcatcgccgaatttaagcggttttttgtaacgggcatatgcgtcaacatttggaatatacaatccttttgactgcatttcggcaacatcgcaaccgatgtcgtgcatatactggatccttgcatcttcaaaatatctgatataatttgagtgatgaacaatgttcatacagtctgtttcgtagtatgaaacctttgatttgtataatttctcggtcatattttctccattacatatatacggaaaatccgtaattattttttaagcaacaaaccgtttttaaggtcctctgcggcttgcttcttaattacaaagtgctgttttttgcctgttgcagtctgcggaagatcgttgacaaaacggtagtatctcggagcctgatattttgaaatattcggtgagctgtcgcagaagtcaataagctctgcaaccgtaaggctttcgtcagcttttattacatatgccgcaacgcactcgcctcttgttgaatcgggaacacctgtaacgatacattcctgaactttcgggtgtgagttgagaatttcctcaattcttgcagggtaaatattttcgcccttgctgataatcatatcatcttttctgcctgcaactgtaacaaactgctcgctgttccaagtgccgatgtcgcctgtgtacatccaacccttgtagaacttgtcttttgtagccttttcgttatttacatagcagtaggtagttttgttcggacatttgatgatgatttctccctctgttttgttatcgcaggggactgtgtcatcgggctctgcttttctgtcgtcataaacatttacaagtcttacctcatcatctgtgcatgatctgcctgccgaacctgccatttcaggaaggtcatacggacgaagaaatgtattccagaaagattccgttgtgccgtagccgttaaaaatgttgggggagagaagttcctgatagcgaatgcaagcggctttttcaagcggactgcccatggtaataatgcccttgagcgaagaaaggtctttcggatgcttttcctgtcgggctgcaagcatctcaagagttgacggaacacctgtgatgaatgtaatgccgtatttttcgataaagtccatgcagcttctcgggttgaatgttctcataatcacaagacacgcacctgcgtaaagggtaggtgtcggaccgccggaatgaataccgccacggtgaaaccacggcgtcatattcatcgtaatgtcaacgggtgagagcggaaagtgcataattacatcgtgagccgaaagaacttcgttgattgcgttaagcggaacgccctttggagtgcctgttgtacctgaggtctgaagtcttaaaacctcgtcataaatatgcggtgcatagtcaacaggcggattttcgtcactgctgtccttgatgtaatcgtcaaagaaaatatgcccttcgggaagggttacttcttttttggaattattaacgcagagaatcaattttggcttatgctcgcagatttcaagagcctgtacggctgtctgcataatgtctgcatcataaacataaacaacaggcttgttgtgtcccataatttctgcggtttcgcccggtgataggttaaagttagcgggatttgagattgcaccgagcttctgcggtgcaatgtaaccaaacaaaaactgcggtgagttgtaaagctgcataaacacgatgtcgtttttcttgacgccgtcttttttcatagcgtttgcaaatctgtttgcatcggcattaagctctttgtagctccatattctgccgctttgagagtcaattgccgcgggtttatccgaaaagcgtcttacatttctcataaagccgttaagccatgtaaattcactttcaaatgtttctctgaacatctgtgaatcatatgttaaattcataatatccccctgttctattatgtatgggtgtacattattttatacacacatatgtgtgttgcttgtatgttgttttgtcggcagattatttgccgtatttgcctacgataatacttgagttctgaccgccgaatccgaatgcgtttgacatggcaaagttgatttcggctttctttgcggtatttgcaacaaagtcaatgccggcacattcgggatcaacctcgttgagattgattgtaggcggaactgtgcctgtttcaatagccttgacacaggtaattgtttctgtaataccgcctgcacccatcatatgacctgttgcaccctttgttgagcttacataggggagagtgttgccgaaaaccttcttgattgaagatgtctcaactgtgtcacccttgtttgttgcagtaccgtgagcattgatgtagccgatgtcagaaggattgattcctgcctctgcaattgcctgtttcatacaagcgattgcacctcgtccttcgggatgcggagcagttacatggtaagcgtcatctgtgttgccgcaacctctgatttctgcataaatctttgcacctcttgcaagagcgtgttcctctgtttcaagaacgagcgcaccgccgccttcacctattacaaaaccgtcacgtgtaacatcaaacggacggcttgcagtgcttggcgaatcgtttcttcttgaaagagcttttgcgttggcaagcgaataaattacaagaggacagagaacggactctgctcctactgcgagcataatatcagccttgccgctctgcatacacatacaagctgtgttgattgcgtcaccgcctgacgaacaagctgtgcttaccgtaaagctcgggccctgaatattgtagtcgattgcgatatttgcggcggcaatgtttccgagaattttgggtatgaaacgaggacctacctttttgtgtgatgcgcctgtgagtgcctcctgagtatatgcgattgttgcaatacctgccattgcagtacccataacaatacctgttctttcaggttcaatcttgattccgctctgtttcatggcttcctcagccgcaatataagcgtattgcataaacggatctgtttttctgattaaatcctttggaagatagtcggacggattaaagtcttttacttcgccggcaatctgaacagcgagttcagacggatcaaaagtcttaattgtgtcaatgcccgatgcacctgccgtgatattattccagtagttttcaacaccgatgccgacaggtgttaccgcacccataccggttacaactattttcttcattcgttaagctccttgttttaaaataagttatttacattttgcatattattatgctatacttgaattgtaccaaatatggaaaaattattcaataccgttgattatgcaaaaatgacgatttggcagtcttaaatttacagttttgcataatattgaaaaaaaccgacaaaatactgcgggaaattgtcaaaacggaggttattatggatataaatcagctcaattgctttataactgtggctcaaacgctcaatttttcagaggcggcaaggcggaactatgtttctcagtccaccgtcagcagatatgtaagcgaccttgaaaaggagtttggggttcagctttttacacgctctcaccgtgatgttatcataacaagcgagggcaaggcacttttgccctatgcgattgaaattgttgaaactttaaagaaagcaaaaaccgttatcaagcagatgcatgacggaggtcagggtaaaattacgctcggctgtgatgttacctcgctttcgttcccgacaaaatgtattgccgactttgcggaaaaatatccgggaattacaattgatgtgcgacagcttgacgaggctgaccgcacgcttgcaatcacaggcggtgaatacgacttctgctttatgccgagagatatggttcccgaaagctcaggtattgaatcaatcattacacataatgaaactttgtccgttgtaacagcgaaaaattcaaaattcagcggaagaaaaagtgttaagctttccgaattggctgacgaaagtattctggtactttcggaatctgttgctccgattgtgtatatggaaattatggatttgttccgcacatttcacataaccccgaaaattgaaaattcatttgacgatcttgtttccatatatgtgtcatcgtcatcgggaatcggcgtgtctgtcataccaacctcggtcgccgcatatacttctgacgaatacaccgattcataccttattgatgatgcggacacaagcatagcctatgttatggcatggggaaagaatatttcaaatcctgctgcaaagctttttatggaggctgttaagaaatatgccaagggcgatgacaacatttacgggctgtaactgagcatatttctcaacataaattccaataaagaactatagtgaaattttcacaaaataaacacacattattttcaaaaaaggtatttactttataaatcttcggtgttataattacggtagtcaaggagaagttgacaaaatatcctttaaggaggtaattataatgtacagatttactttaccgagagatctctatcatggtgaggatgctctctcaagtcttaaaaatttatccggcaaaaaggctgttgtagttgtcggcggtggttcaatgaagcgtttcggttttcttgacaaggctgttgactatcttaaagaagcaggtatggaggttaagcttatcgagggcgtagagcctgacccatctgttgaaacagttatgaagggtgccgctgttatgcgtgaatttgaacccgactggattgttgcaatgggcggcggttctccgattgatgccgcaaaggctatgtgggtattctatgagtatcccgacacaacttttgaggaaattatcactccgttcagtttcccgacacttcgtacaaaggctaaattctgtgctatcccgtcaacatcgggtactgcaacagaagttacggctttctcagttatcacagactatgcaaagggtatcaaatatccgcttgctgactttaatatcacacctgatgttgctatcgttgatcctgcacttgccgaaacaatgccggctaaacttactgctcacacaggtatggacgctatgactcacgcaattgaggcttatgtttcaactctcaactgtgagtacacagatccgcttgcactccatgcaattgagatgattcacgacaacctcaagaagtcttatgagggcgacatggcttgccgtgacaagatgcacgatgcacagtgccttgcaggtatggcattctcaaatgctctgctcggtattgttcactcaatggctcacaagacaggtgcggctttcacaggcggtcacattattcacggctgtgcaaacgctatgtatcttcctaaggttatcaagtataactcaaaagatcctgttgcagctgagcgttatgctaagattgctaagttcatcaacctcaagggcgaaacaacagaagaacttgttgacgcactcatcgctgaactccgttcaatgaacgatcagctcaatattccgcagggcattaagaactacggtccgggcggcgttaaggctgacgagagcattatcgacgaaaaagaattcctcgaaaagctccccgaagttgccaagaacgcaattgccgatgcttgcacaggttctaacccacgccagccaaatcaggaagaaatggaaaaacttctcaaggcttgctactacgatacagaaatcgacttctgatttgtttgaaaactcatttgtacttactgcagctccctgttttcagggagctgttttctacttcaaaatgactgataaatgaaagaattttaattaaatttgctttaaactattgcaaaattaattcttttatcatataatataagtagtgaaaggagttgattgatatgacaacagtaagtcttcgttttgatgacaatactaaaaaagaacttgacgaaatgtgtgctgaaatgggtatgaatctgaccaccttttttatgatttacgcaaaaaaagcacttcgtgaaagaagtattccgtttgcaatcgatgcaccgattgatccgttctattcgcaatcaaatatgactcagatcgaaaaggcaaaatctcaggttgaaagtggtcatattgtaacgaaatcacttgaagaattggagaaaatgagcggtgagtaatatttcatttgcagatgatgcgtggtcagagtatttatattggcaaacgcaagataagaaaactcttaaaaaaattaatgcgttgcttaaagaaattcagcgtaatccatttgacggagcaggtaaacccgaaccgctaaaaaacgataaaagtggattgtggagtcgccgcataaatgataaagaccgacttgtttatagtgtaaataatgactttattattgtttaccagtgcaaatgtcattatgatgattgacaataaaggcatctgtcagagggcgggtgctttttgtcttttataagagtaaaaaatccgcataaaaatgctcttaaaaggcataaaaatcatatggacaatattgctttgttgtgctaaaattgacttgaaattgatgaatttggtgacataaaatgaaaattgcagtaataaacggtcagaaccataaaggctcaacctatcatattggcaagcaggttgccgataaattaggcggcgaggttacggagttttttcttccgagagatttcggcgatttttgcgtaggttgtacgcagtgttttctaaaatccgaaacactttgtccgcattatgagcgactgaaaaagattaccgaggctatggacgaggctgatgtactcatcttcacaacgcccgtgtatgtttatcattgcacaggttcaatgaaagcatttcttgatcattacggttatcgttggatggttcaccgtcccgaacagaaaatgttcacaaagcaggcggttgtaatttcgacagccgcaggttctggtacaaaatctgccaacaaggatatcgccgacagtatgttcttttggggcgttccaaaaacttatcgttacggtgtcaatgttcgtgcaacaaattattcaggcgtcaccgatgaactcaaaaagaaaattgacaaaaagactacctcaattgctaataaggtaaagaaaaataacggcaaagttaaggcaggtttaaaaacaaaaggctttttctttattatgagaatgattcagaaaagcggctggaatgaagccgataaaaattactgggcagaacggggttggaacggtaaaagcagaccgtggaaaaatacataaggagatgttttaaatggcaaaaaatactgaaatcagcttgagaaacaaggttatttattcggtttatgtccgtaatcacacaaatgacggcacatttaatgccgttgcagacgaccttgaccgaataaagttactcggcacggacattatttggtttatgccgattcatccgattggcgtcaagaataaaaaaggctctctcggctgtccttatgcaaacaaggactatcgcacaacaaatcccgaatacggcacaatggacgatttcaagagccttgttgaaaaaattcacgcaaagggcatgaagtgcatcattgatgttgtctataaccatacttcgcccgattcaaatctttcagttgaacatcccgaatttttctacagaaagccggacggcaattttggcaacaaagtcggcgattggagcgacataatcgaccttgattattctaacaaagaattatggcagtatcagattgattcactcgttatgtgggcgagaattgttgacggcttccgttgtgatgttgcatcattcgttcccgttgaattttggaaacaggcgagagaggctgttgcaaatgtgaaccccgactgcatttggcttgctgaaagcgtacacagctctttcaatgtgttctctcgcaagagcggaatttataccgcaagcgactatgagctttttgatgcttttgatatggaatatgactacgatatccgtgaggttttcgacaaatatttgaagggcgaaacatctctttcacattatcttgatatgttcaattatcaggaggcaatttatccgcagaattacgataaaatgcgttgccttgaaaatcacgatcagccacgaatctgccactatgttaaggaaaagagcgaccttgaaaattacaccgcttttctgtatttcttgaagggttcaactctcatctatgccggtcaggagttcggttgtgatgaaactccaagcctttttgacaaggatgttttcccacgcaacacaggcattgatttgagcaacctttttgcaaagctcgatacaatcaagaaaaccgttcttgatgatgacgattatttcaaggccgatgcagacgatgaaaacgatattgcaattcttgagcgtgacaacaacaagagcaaaaaagtcggcattttcagccttaaatcaaagtcggcagatgtaaaagttgaccttcccgacggcgattataagaacgaaatcagcggtgagacagttacagtttcaaacggaaaggttcattgcaacggcaaagcaataattatccgcaagtaaaataaaattccatatatgaataatacaacctccctgcaaagcatttcagcttacgtggaggttgttctttatataaaaatccgtgttgcatggttacaacacggatttcttggttttatttaattgaaccgtcgccacccataagagcggtcatttcttcaatgcgttccaaaggaaacggtggttcgcaaagcagttttttatatgctcacttagctttcttttcattattgccgaaaattttagtcggaataatgcttccgaggaatgcggcgagcaaaatccacggaataactcttgcgtcaaagcagagcaaaaggagcattgttacggcaagcggttttttcattgtgacaccgagaagtcctgccgttacgactgccgcacaaaatgccgtgtcaagtccgccgagcattgcaacaccgtagccgatgctcactccgcagaagatgacggggaagaagtgaccgcctttccaacccgactttatgcagatgtttgtgagaataagtttcagcacaccgctgataatgagaatccacggtgcaaattcggcaaagctttccttgacaacggtaatgctttcttcgcccgaaaacattgtgagggggaggtatgtacccataacaccgaggataattccgccgagagttgtgctgataataatgccgagtttaccctgaatgagtgcgaaaaattttccgaaaatctttgaagatatgataaacagaaaaccgcatacagcacccaaaagtgcgagaggaattccccacaaacgctcaaaatttgtaatgttataacccccgagtcgtggaagtcccatgcttccgccgaaaacggagttaagcaaaaacagagttcccgccgcaaaaagtacggcaatgatgtttgaaataagctttgttgaacggatatcggtaggcttttcttcgctgtcaagcctttcttcattgaccgatgcaagaccgaaaagcggtgcgtagaataccgcactcaaggttgcgcttatgccgatttgcattagttcgggaattttacttttagcgtctttcatatgacttcctgcccagtagcaaagtcccacgataacacctgtcaagcctgcctcgggaccgagacttccgccgaaaacaaggggtaaaagtgccgaaatgcagagcaaaagcaccttgttgtacggataaaatttatctttttttacctttttcataacctcgtcaagttcatcgggaacagcatttgtcagcttttgccatattccgagaataattccgcctgccgtacagacgataatcggataaaatttgaaatcaaaatttgacggaattgtatcccacacaagaccgattcccaaacccataagttttagaaacagccatactatcagcgaagtaaccgcaccgctgaatccacaaaaaatgtagtataaaaaattgttggcaacagtccgtttagtcattgtcgcacctccgtgtgtttataattggattataacataaaacacagcaaaaaaacaattattccgcacaaaaagtacgaaataattgctttttattatttttttaattttagagcctcttctaaacaaaaacagctgacaccaatgccgatgtcagccataaaaatctatttgattttaaatttcaaaagcggtgcttacctttttgaattctctttttctgatgatgaagtaggcaatcaaaacggatgtgcctgtgataagccatgaaacggggtaaaccataaggagcatatcataggtgtggaatgccttgaatactgtgaagagccagatgattctgaacacaacagaaccgaagattgttaggattgcagggaggagtgaatgtccgattcctctgagcgcaccgccgctgatttcgtatgaacctgtcataagctcaaggagcataacaatcgccattctgatgattgcgtacttgataacggtggggtcggttgtgaagaaggtgatgaaaaatccgcttccgagcatgaatataacgctcacacagcctgtgaaaatacagctgaaaagcatacaaagtctaaacacctttttgcatctgtcaaattgaagtgcgccgtagttctgacttgtgaatgtaacggctgcctggctgaacgcacttactatatagtatgtaatgtattcaaagttgagttcagccgatgagcctgcaaccgcctgtgaaccgaagccgtttatggctgtctgaatgaatacatttgaaattgagaaaaccataccctgaatacccgcaggagcaccgattttcaaaatcataatgagatgttctttcttgaatgaaagtttttttggattgactctgattgactcgtcttcgtttctgatgaggaacatcataacaagtccggcgcttatgccgtcggcaattactgttgcaatgccgactcctgcaacgctcatatcgcagacgattacaaagaagaggttcaaaagaacatttacaatacctgaaattacaagacagtagagcggacggcttgtgtcgcctacacttctcaaaattgctgaaccaaagttgtagagcattacaaacggcatgcccataaagtaaattctcaggtatgttgccgcaaggtcaattacatcatccggtgtgttcatcagccttaacagcggtgctgcaataacctgaccgagtatcagaagaagaaatccgcatataagtgaaagtgttattaccgtgtgaacagcttccgaaacctttttacggtcattttgacctatatatcgtgcaatcaaaacatttgcgccgaccgaaagtcccgtgaataacagcacaagcatattgatgagcggagcgttgcttccgactgcggcaagtgcctgactgcttgaaaatctgccgaccaccgcaacatcagttgagttgaaaagctgttgaagaatactggatcctgcaagcggaagtgtgaaaagaagaattttttttacgagcggaccttccagcatatttatctggtgtgagcgccgtcgctttccttttacagtattctgacctttgtttcttttaaacagacttgcaaacgcaagtgagggcatttttttgacttttcccattaatttctaacctcttcaatcacataatctttgtaaacaataccattcttttccattttccacaattattgtaatcctgttgcctgaaataaacaagcaaaataccttataaacataaagtttactttgctcacaattttagttacaataactacctcgtcaaaattcttctttttatgcctttataatatggtaaaaactgcttttctgcatattttcagaccgatttttctcaataagcaaggctttgaatttgtatgcaatttgtgcctcttcaacaaaagtaaaattgctctcttgtaagcattgacgaaaaattttttaacctacaaataaatgattttaaaattgttgtatatgccgataaaattataatgatacaattatgatacaagcttaatataatatatttttaaagggataagcgaaaaggagtgaatgttatgaagaaaaagattgctgtaattgtggttgcaattgttttatgcgttgccgccgcagtatttgccgtgccgaaaatcagtttctatgcgtgtgagcctaccgtgtattttgatgttgagtactgcgacaaggttgacgctaagatgtctgccgaagatgccgaaaccgtgaagaaaatgtttgagggcaaatccgcatattttgattcaccctcgtgcggttttgacgaaaaggcatcaataagaataggctgtaatacatatatgcctgcgtgtgacggtgatgaaacagttaagcacggatttatgtattttagtctttcaaaaagcgaaaataacgaacttcgcaagattatgaaaaagtacggagcagatacgagaaaagccatctaataccgttgacagacgcatttccgtgtgttaaacttttctcgaaaaatatacggaggtgtttttatgaaaaactacaactgggcaacactcggttgcggagttatcgcaaatgagcttgcaactgcactcaaaagcagaggacagaaactttattccgttgcaaaccgtacccatgaaaaggcggttgcatttgccgaaaagtacggcattgaaaaggtttacaacgatattgacgagctgtttaaagacgaaaatgttgacataatttacatttccacaccgcacaacacgcatataaaatatcttcgcaaggctcttgcggcaggaaagcatgttttgtgcgaaaagtcgataacgctcaattcagatgaacttgacgaggcaatctctcttgcagagaaaaaccatgttgtgcttgcagaggcaatgacaattttccatatgccgatttacaaggcacttcttgaaaaggtaaattcaggtgaccttggcgagcttaggcttattcagatgaatttcggcagttacaaagagtacaatatgaacaaccgatttttcaaccgcaatcttgcaggcggtgcaatgcttgacatcggcgtgtatgcgctttcgtttgtttgtatgtttatgagctcatgcccaaacgaagtgttgtcgcaggttaaatatgccgaaacaggcgttgacgaacaggcgagtattcttttaaagaataaagaggaggaaatggcaactgtca

SEQ ID NO: 453 - DNA, 40489 bp, unidentified
  source 1..40489: mol_type = unassigned DNA
atatagatacacttgagagagcggagataatacgtgacctgcgtcttgacgtatttgacgtgctcgtcggcatcaatctgctcagggagggccttgatatcccggagattacacttgttgccatactcgatgcggataaggaaggcttccttcgctcagaaacctcacttatccagacgataggacgtgccgcacgtaacagtgagggccatgttatcatgtacgctgacaagattacagactccatgcgtgtcgcaattgacgagacaaagcgtcgtagaaaggtacaggaagagtacaatgaggctcacggcatcacgccacagactatacagaaatccgtgcgtgatctcatagctatctcaaagaaggtagcggccgatgagaatgctcttgacaaagatccggagtcaatgagcaaaaaagagcttgagaagcatatcgcagatatagagaaaaagatgaaaaaagcagcggcagagctcaatttcgaggcggctgctgagtacagggataagcttattatgcttaaaaacacattgagagacgtaaaataaaagcttataacatccggaagcaatttggaggaacacaaattatggcaaaaaaagaaagaaaatacatcaaaatacgaggtgccagcgaacacaatctaaagtgcgtcagtcttgacatcccgagagatgagtttgttgtttttacagggctttcaggctccggcaagtcatcactggcatttgataccatatatgctgaggggcagcgtaggtacatggagtcactttcatcgtatgcgcgtcagtttttaggacagatggaaaagccgaatgtggagtctatagagggacttccgcctgccatttccattgaccagaaatccaccaacaagaacccacgttcaactgtcggaacggtcacagagatatatgattacttcagactgctttatgccagaattggaataccacactgtccgaagtgcgggcgtgccattacaaagcagacgatagaccagatggtggatactgttatggcgctgcctgagcgcacacgtatccagcttcttgcaccggtggtcagaggccgcaagggtgagcaccagaagctgttcgagagagccaaaaagagcggatatgtgcgtgtgattgtagatggcagcatgtatgagctctccgaggatattccaatggagaaaaatataaagcacaatattgatatagtagtggatcgtctggttgtaaagcctggtatagagaagcgccttactgattcacttgaaaatgtatttgaactgacagagggcaatgccatagttgatattgtggatggcgaacagatgaccttttcccagaactttgcgtgccctgactgtggcataagcatagatgaggttgagccgagaagcttctccttcaataatccgttcggagcatgtccgacctgctacggactcggctacaagatggagtttgacccgcagcttatggtgccagactcatcgctttccatatctgagggcgccatacaggtgatgggctggcagtcatgtacagacccaaagagctatacctatgcgacacttcgtgcgctgcatgagggctatgggcttcctctcgacacaccgattgatgatttatctgcagatatgaaaaagctgctgttttacggtggagacggcagagtgctcaaggtcagatacaaggggcagagaggcgaaggagtctatgaccttgtatggaacggccttgtggacaatgttgagcgccgatacaaggagaccttttctgatacggcaaaggcagagtatgagcagtttatgcgcattactccgtgtacgagctgtaaggggcagaggcttaagccatcgtcacttgccgttacggttgcggacaagaacatatatgagatgacctccatgtctgtgaaggagcttgtgaagttccttgctgatatagagcttacagagcagcagcactatataggagaccagatactaaaggaaatccgtgcgagagttggctttttgcagcaggtcggccttgattacctcacccttacccgtggcacggcgagcctttcaggcggggaagcccagcgaatcaggcttgccacgcagattggctcaggacttgtaggtgtggcatatatacttgatgagccaagtatcggactgcatcagagggataacgacaagctgcttggtgcacttatgaatcttaagaatctgggaaatacgctcatagttgtggaacatgatgaggataccatgcgtgcagcggattatatcgtggatgtaggaccgggagccggctcgcacggtggggagatagtggcagcaggatcgttaaaggacattataaagtgcaaaaaatcactcacaggagcatatctgagcggcaaaataaagataccggtgccacaggagaggcgcaagccaagcggatatatcacgataagaggagccagggagaataacctgaaaaatattgatgtgcagatacctcttggtataatgacctgtgttacaggcgtgtcgggctcgggaaagagctcattgaccaatgagatactctacaagcatctggccaaatccttaaacagagccaggtgtatcgcaggtgaccacgatggtatagatggtcttgaacagcttgataaggtcatagacatcgaccagtcaccgataggccgtacaccccgctctaatcctgccacatatacaggtgtgtttgacatgataagagacctgtttgcatcaacacccgatgccaaggcaaagggctataaaaagggccgtttcagtttcaatgtaaagggcggtcggtgtgaggcctgcggcggcgatggaatccttaagatagagatgcatttcctgcctgatgtatatgtgccgtgtgaggtctgtggaggcaaacgatataacagggagacgctcgatgtaaagtacaagggcaagagtatatacgatgttcttgatatgacagtggaggaggcacttgagtttttcaaaaatgtgccaaagatccagaacaaaatccaatcgctctatgatgtcggactatcatacgtgaagctgggacagccgtccacagagctttcgggcggtgaggcgcagcgtatcaagcttgccacagagcttagcagaaagagtaccggaaagaccatatatatacttgatgagcctaccacggggctgcactttgcagatgtacacaagcttgtggagatactgcgcaggctctcggacggaggcaatacggtggttgttatcgagcacaacctcgacgtgataaagacagctgactatatcatagatatgggacctgagggcggagacggcggcggaaccgtcatagcgcagggcacacctgaggagatatgcgaggtaaaacagtcatatacaggccgttttttgaaacaatatctggaaaaagacaaggataaactttaaaattttattaaatatgacctttttcaaaaaaaaagtttgaaaaatgggatttattgtatataataagagagtgtatgtgtaaatttaaagatatggcaggaaaggggctattaaaatggtcggatcagatatcggaatcgatttaggaacagcaagtatacttgtttatataaaaggaaagggtgttgtgttaaaggagccttcagtagtagcctttgacagggacaccaacaagattaaggcaatcggagaggaagcacgcctcatgctcggaaggacaccgggtaatatcgttgcagtcagaccgctgcgtcagggtgttatctcagattatacagttacagagaagatgatcaagcacttcatccagaaggcgcttggtaagaagagcttcagaaagccgctcgtgagcgtatgtgtgccaagtggtgttacagaggttgagaagaaagccgttgaggatgctacatttgcagcaggagccagagatgttaagattatcgaggagccaatcgcagctgcaatcggtgcaggtattgatatttcaaagccgtgcggaaatatgatagtagatatcggaggcggtacatcagatatagcagttatctcactaggtggttcggtagtcagcacatctatcaagatagccggagatgattttgatgaggcaattgtcagatacatgagaaagaagcataaccttctcatcggagagagaacagctgaggatatcaaaatcaagattggtacatgctaccctctcccacagccggagacaattgaggtaagaggaagaaaccttgtaacaggacttccaaggactattacagtcagctcagaggagacagaggaagcacttcgtgaggcaactcttcagatagttgaggcagtgcactcagtgcttgaaaagactccaccggagcttgcagccgatgtcgcagacagaggaatcgtgcttacaggaggcggttcgctgctcagaggtcttgaggagcttatcgaggaaaagaccggcatcaatacaatgactgcagagcagcctatgacatgtgttgctatcggtacaggaaagtatgtagagttccttgcaggcaagagagatgaagaattctagaatatacgttttataacaggcagccgtgagggcgatgatatgtccctgcattgcaggaatgtattgtcgcttttttgttaatattgttacaaatggggatattacagtcagggggattagtgaacaaaataaaggatattgggagaggcgtaatcaatctggtatttccaccgcgctgtccggtatgtgatggtataattggtccggttgagagatatatacacagcagatgctgtgaaaagctctttccggttgagcagccgcagtgtatgcgctgcgggaagccggttttgtctgagcgaagagagtattgtgacgactgcgcacgggcactcgagcatcacaggcagatgcgggaggatgacagctacaggcagggcaaggcgctttttgcatacaagggcagcataaagcagaccatgtacaggttcaagtattcaaacagacgtgagtatgcggcttattttgcacaaacagcagtggaaagatattcggactggatactaagatgtgggatagatgttattattccggtgccgatgcaccgtaaaaaaatgcgccagagaggctacaatcaggcagagtgttttgcaaaggcattgtctgaaaaaacaggcataaggatggcaaaagggcttgtgcgcagagtgaaaaataccagtccactcaagacaatggggtatgttgaacgcagaaattgtctagagggggcttttcaagtggcggatagtattgtacaatatgaccaaatactaatagtagatgatatatatactacaggcagtacggcggagtcgattgggcacgagatagcaaagaaatgtcccggccgtgtatatgtgctgtgtatttgcataggacagggaagttaggagggttttatcagatgagaatatctaattgcaagggctgtggcagaatatttaatgtactgtcagatgagcagtactgcccaaactgccagaaaaaaatggatgagaaatttgatatagtaaagagatttgttgaggataatccaaatgtgccggttgagacagtggccaaggagacggatacatccatgaagcagataaataggtggatacgtgaggaaaggctttcgttttcaccggattcatcatatggtataccatgcgagaactgtggcaggatgatacgtacaggcagattttgtgatgagtgcaagactaagctcacaaacacactacgcagtgcccttgacacaccaaagagccaggataggcagctgtggcagcaggatgacaaaaaccgtatgagatatatcaagtaacaggtaagaggatgatttatgataaacgaagaaaaagtaagggaactgtttaatattgctctatgtgacagcaaaagcgatgacagccgtgtgcagaagcagtccgcaagctactacggatgggactatatatggaaagagggcttaaaaagcttctttacaggtacattcgcatttgcagggcttgttgtgatgtgggttgctgtcaatgcagcagagcttttggacagaatcaataagcttgattttaaggcaatgggtgtcacaataggcatactgtatattgcatttatggcggtttacatttttgtcacaattgtggtgtatactgcaagatataaggccggcagaagagaagtgcgcaaatacgcaaatcacctgaaggcagtgggcagaatatattcccgtgaggaaaagattaagcgttagggaggctttatgaacaagttactggaaattaaggataaggcagtcaaattttgcggtgagtatgagcactttatacttccggttgtgagatttgccgttgcatttatcgcatttataacaatagatttgaatatcggctatatggcgaaaatcagctcgatgcttgtggcactgcttttagcgcttgtgtgtgcactgcttccggtgaatgcaatactctggattgcttcgattatgatacttttagatatgtatgcgctgtccatagaggtttttgctatcacatttgtacttcttttagtactgtattttgtctattttcgttttgcaccgaaggatggcatgcttgtgatactcacacctatatgctttcagcttcacataccatctgttgtgccggttgcagcaggtcttttaagaagagcttattcggttgttgcaataatatgtggcacactgctgtactatttccttgacggaatcagacagaatgcatcagcgcttgcagaggtggtagataaaaaggggcagagcactacaaagctcaatgtgacaatgggacagcttcttgacaacaaagagatgtttatagttatggcaatctttgttatcaccacactggtggtgtatcaggtcagacgattgaaaatcaacaattcatggactgttgctaccatagcaggagggctcatacagttggttgcacttgttgttgcttatctggtgctcggactgccggagaagataatctggcttgtgctcagcactgtagttgctatttttgcaggtgttgtcatacagtttatatttatgaatcttgactatgcacgtacagaaaacgtacagtttgaggatgatgaatattactattacgtcaaggcagttccaaagaagatgattgccaaggaggaaaaggttgtaaagcactttggcaatacaggaagccttggaaagaagattccgagacataatcaggaaaatatcagcaaagaggctattgcaaaagatctcgaaatagacgaaaatatatttgaggatgacaaatagttacatagtataagagaaaggagggcgctatggataatgtgagtggtgtattgatacgcttcaaggatcagttccttacattcacaaatgtgccgggcatcaaaatcggtgtgatagacattatagagatacttattatttcagtgctcttctatcatatacttttgtggataaagactacgagggcatggaatctgttcaagggccttattatcatactgttgtttgtgcttgttgcagcattgttccagatggatacaatactgtggcttgctgagaaactctttaatataggtctcgtggcacttgtcgttatttttcagcctgagcttcgaaatgccttggagaatattggtggaaagacctttttgggtgatttcttcaataccggcagaggcgagattgagaaattctccgacaagacaatcgatgagctggtgcgtgcatgctttgcgatgggcagagtaaagacaggagcgctaatagtcatggaggatgagataaatctgggagagtatatcagaacaggaatagatgtggatgccatacttacaagtcagctcctcatcaatatttttgagaaaaacacaccgcttcatgacggagcggttatcgtgcgtggcaaccgtgtagtgtcagctacatgttaccttccgctatcagacagcctgtcactctcgaaggatttgggaaccagacaccgtgcagcggtcggagtcagcgagataagtgattcgcttactatcatagtttcagaggagacaggagcagtttctacagcatacaaggggcatattgagcacgatatagatgccgatcatctacgcacacagcttaagctcctgcagaacagacatagggagccgggtaaatttgaattaattaaaaggaggtttaagaatgggaaagaagcttctaaaaaccttcacaaataatataggctttaaaatacttgcgatagcatttgcatttatactctggcttgtggtctacaatctcaatgacccggtcaagacaaagacatttaccacaacagtcaccgtcacaggccgtgattcggttgttgacaaggggctatggcctaccatcaaggattcggaaaagactatcagcttttcggtatcaggcaagagaagctatctgaacgagcttgatgattctgatttttacgcaaatgtcgaccttgcaaatatcatagtagataaggatgatacgaataaggcaagcgtaaaggtagatattggatgcaccaagtacagacattcgattaccttcaacggtggagatcatatgctcccgctttcggttgaaaaatatatgcagaagcagtttgaggtaaaggtatcattggatggaagtctctcaggtgcgaaagcactgggaaacaagccacaggcaaatccaaaggtagtaaagatcggaggtcctgagtccattgtttcaactatagcatcggccaatgtaaatataaaggtcgatgacaataccataatatcagataatcagataactgatcgcggtgatctcactctgattgatgataatggcgatgagatagatatatcaaagcttgatgtggacagccagtatcagtctatagcagtgacagttgatgtcctaagtaccaaggaggtgcctatcaagtgtactacgacaggctcaccggcaggaggaaagagcgtgcttggagtggagctgtcagaggagtctgtaatgctcaaaggtaatgcagaagcagtgaacaatatcacatctatagatgtgggaccaattgatatatcgggcgcaacagacgatataagtacatctgttgacctgacaggatatctgccggatggagtttttatagtgaactcatccaaggcaaagctcagtatagatataaagattgaaacaaatgcgacttcaaccatgacgctgaacagttccaatatcacatatgacggactggaagagggatatacgattacatttgtaacagataagagcagtgtcatagtaagcggcaccaagtctgatatagatacactttcgggaactacactgaagggtaaaattgatgtgacaggccttggtacaggtacacatacagtgacggtaaagccaaatctggatgagaccaagtacacatggggcgagataaaggttcagatagttatcggaagggaaggtgacggaggcggcacaacgggaactgatggtacaggaacagcctcgggctcaacaacaggcggtacaacatcaggcgacaccggcacaggcggttcatcgtcatcgggcagcacatcgtcaggaaacaccggaaataacggctctgacagttcatcacattgatagatatataaccgaaaagaggtaataaaagtggtagcacaaaaaataataatcaagaatcctaccggattacatttacgtccggccggcaatctctgcaaagaggcaatgaaatttaaatcaaaggtaacatttatatatgacgagaaaaatgtagctaatgcaaagagtgtactttcagtgcttggagcatgcataaagtcaggcgatgagatagagcttatctgcaatggcgaggatgagagtgaggcacttgaacaccttatacagtacatcaaggatggactcggagagtagtacacaaggaaacaggtatacatggagaaacatatatatggagaagcttttaaccatagtcgttccggcttacaatgttgaaaagtatataaagaactgtcttgactcgtttatagatttgtctgtgctcagaagtctggagatactcatagtggatgatggttccacagattccacagccagcctggcacatacctacgagcagaaatatccatacagcttcaaggtgctctccaaggagaacggaggccatggatctaccatcaactatgcgataccgcgcgcaacaggaaagtatttcaaggtggtggatggtgatgactggctggacaagagccttctgccacagtttatacagcttttgaagcacacgcactcggatgtcatatccaatgacttcaacctggtggatgataggacaaagaaggtcacaaagcgcagaaaggcagtgtccaactcttatcactacaacagggagtggggctttgctgaggcagtcatggacccgctgatcactatacattccatgaccatccgtactgatgtattgcagaagaatgatattcgtgtggatgagcactgcttctacgaggaccaggagtatatactctaccctataccatactgcacaagcatcacgttttcacctctgccgctgtatcagtacagacttggaaggagtggtcagagcgtggacataaagatgatgatcaagcgtcatgaccagcatcttaaggtgcttgatgcactgtttgagtacaacaacgtgcacggcaatctgcagacctacaagaagcagtaccttgagcgcggcatagccgaggcagtcgatgatgagtaccagatatttctggcaaagggcaatgatacaaggaacgttgagcagatgaagaagtttgacgagatgctgcgtgaggagcacccgggagtgtaccaggcgtgcaacaggaagcagatatggctcattagaaaaactgattttaaagcttttccgatcgtagcatggttttatagcaagtttaagaaacaattgatttaaaggtctggagaaattcagatctttatctgtattatgatgaataaaatggtaaattgcgataaaaatatgtgacaaatctcacttgaggcatatataagaaagtgataaaatatggtgctgtgagaataatataaaaattaagataaagaggacaaagatgacaaagatgaagaagaaaagtataaaactcctagtagttttggcctgtgtgcttatggcgttgggaatggcaggctgtggaaagaaagcatacaagacattccctgaaaagtacaagcttgcatcagttgatgtaggtggaatgactgctggcgaggcaaagaaagccataaagactgcagtaggcaagtataagatatcagtgaagcttgacgatgcatcatttgatatgacagctgaggatttagggcttaagtataatgacaaagcagatcttcaggaactgataaatgcggccaataaggataaggagcccgaaaagcaggtgaagctttttaaaacgaaagaaagcgatgaactagaaagcgttttagttgattcctacattactgcaaaaactgaggaacagtcagattttgattctcaaagtaatgataaatcggatacagatgagaatacaaaaaaagacaacattgaagagcagaaagatgctcagtcatttgatataagaaccatacagccgtatagagctactatagcatacaatgcggagacaggtaaatatgaaggtgtagatggcgttgcaggtgaggcaccggtgtataatcaggcagctaagaaccttataaaagcagtaaatgatatgaaaaaaaaggttgaacttgcatcagagaaaggcaatgtgcagggagatatagccgccgaaagtgattatgtaaagaaagcacttgatgaagctaattcatatcttgatgttactgttacatgtaactttaatccttcaacaggtacaccggctacagagattgtaggaaaggaacagatagcccagtggcttatagtgggcaatgacggattatcagtttctcttgatggcgagaatatgactacatactgtacagagcttgcaaaaaagcatgatgtatcaaagaaaaaaacaggacagtttaagacaacaggtggaagtgtaataaatgtgcctgttgcatcatcaggacagactgtagacggaaacaagctgtatgaggcgattgccgaggcaataaataataagaagtctgcaacagtggaagcagtttacagcgaggcaaaggaagaagaaacaggtgagtatgtcacatatggtggcaattactgtgaagtggatcttaccaaccagatggtatatgtatacaagaatggtgtacaggtagtatcaagtcaatgtgttacaggctgtatttcaaaggggcacggaaccccaacaggcgtatattctatcttttcgagggataaggacagatacttaaggggtgacggatacaagtcatgggttaatttctttattccgtttaatggcggaatcggattccatgatgcttcgtggagaagtaccttcggtggaaatatttatctgtacagtggcagccatggctgcataaatatgccttattcagctgcaaagaagctatatgagaatgttacattaggcgaaaaagttattgtatatggtggtgttgacaaggtagccggcaaggctcagagtctcggaggagctgactcttataatgtgacggagggagatgctgcattcaacctcggtgtgacagcagaggataatgcaaagctcacatactcaagtgataatgagggtgtagtgagagtggatgagaacggaaatgtgacaatagcaggtgtcggagctgctacaatcactgtgaagtccgaggctactacaagctataaggccggcagcaagacaattacaatcactgtaaatgcaaagccacagccaaaccagacaccatctgtgacaataggttgcggtaataaaactgtaacagagggagatgcaccattttctctcggagcaagtgcttcaaacggagcagcgctttcttaccagtcaagtgatccttcgattgcgtcagtagatggcgccggaaatgtgaccatttacagggctggtagcgtgcagattacagctatagcaggtgaaatggcaggctggaatagcgcaagcagttcaataaccgttacagtaaattcaaaaccacaaccacagccggtggcaccgactgaaccatcagaacagccacagcagaactagaacagcaacaatagaacaggaacaaataaaatatagcaaatgaaaatacaacaaagaaaagtgccggaaacggcacttttctattatattgcataattatttacaaaatatgacatattcttaatattttttttgtgacttctaaaaatagacaaaagaaatgaagtgtagtaatataacataggattaaaccgaaaaataatgttacaatatgtaaagggtaggaaaatggaaaacaacgaaccaataagagatcaggaaattgaaatcgatttagtagcgctgtttcacgaattagtgaagcattggaaggcacttgtggcatcaatggtgcttcttgcagcagtatttggattatactccaagattacttttgtacctgagtatgaggcatctgcagagatgtatgtactgaccaagtcaacatctatcaccagtcttgcagatattcaggtaggctcgagtctgacaaacgactatgagtacgttatcacaggcaggacagttttatcacaggtaattgacaatctggatatggacgagacatatgagcagctcagtaagagggtttcgatagagaatccgacagatacacgtgtgctcaagattgtggttacagacactgatttagaagcttcaaaaacagtggcagatgagattgcaaaggtttcatcacagtatatcgctgacaatatggatcagtcacagccaaagattatccagacagcatatgcttcaaagacaccggtgaataataatatccttaagaatacagttataggagctgtactcggactgtttcttgcagccggtatagttgtacttggatacatgcttgacgatacaatttccaatgcagatgatatggagaccagaacaggcctcaaggtgcttgcatcacttcctgttgatgagacagagtatgatggagccaagacaaagagaagaaaaaagaagaaaactcaatcatctaaatcagacgatagcaagagtaagaagagggcagtttaatggaaacagtagttattaatcagataaaagaccagagctatacaatgaaggagtctcttcgagctcttaaaacaagcatcagctttagtggaaagggtgtgaagtccatcctctttaccagcagcgtgccaaatgagggaaagacaaccgtagttatggatctggctcgttcgatggcggactctaagaagtcagtccttgtagtagataccgatatgcgtaagtcagtccttgtaggacgactcagagcgaaggtggagagtggtggaaagatatacggactctcacattatctctcaggtcaggtatctttggacaaagtgatatatgcgacaaacatcaagggtgtgttcattctttttgcaggacatgaggtaccaaatcctacagagcttcttgagacagaagagtttagagagcttatcgagtttggagagaaaaattttgattacgtgcttgtcgatacacctcctacaggagctgcgattgatgcggccgtagttggaaagaatgtagacggagctgtaatagttgcagcacagaatgtcacaagcagccgtgcaatcatcaatacaaagcgcacgcttgaggactcgggagtcaagatattaggagcagtgctcaataagtgtaaatttgaagagtctaagtatggtcattattatggaaactactatggtaattactatggcaattattatggcagggatgaggacgaaaagtaacaggcacagacatagatgaatgacggagaatagtgcagatgaaaaaaaagaaaaatataattattacggcagtaattattgtacttgttgctattatagcaatagtacttgtaaagattaacagcagtaatgtcagtaataaagaaaataaaaacttcaaagcagatacagagaatggtatagtaagcgaaaacagtcagaatgccacagaagatagttcatcatctactactggaacagaggattttgctatatttggtgttgacagccgttctgatcagcttgataaaggaacaagatcagattcaattatgattgtaagagtgaatcatgatgcaaagacggttaggattgtgtcaatattcagagattgtatgatgaatattgatggacatggatatcagaaggtgacacatgcacatgcttttggaggaccaaagctggctgtaaggacattgaatgagaatcttgatcttgatataaagcattatgtgacagtgaattttagttcagtaggggatattgtcgatgaagttggcggtatagtgcaagaacttgatgatgaagaggtaaaggctattaatggatgtataacagaagttaatggtattagaggtactaattcatcacagattacaaaagcaggcacatatacgctcgatggcacgcaagcggtagcatattcacgcatcagacatgcatcaggtggtgattataagagagctgagcgacagagaactgtgctttttaaggtgtttgagtcggcaaaaaaaatgaatatggcttctaaaatcaaggttgtttctgatttgataggcaaagtaaatacggattaccagactgatgaaattttatcaatttttaagaatctatcagaatatactatagaagattctacagcttatccacaggtgttctatggtggaacggttgaaggtgcatgggtagaagtacctacatcattgtgtgatatggcgacaggtattcataaatttctgtatggggatgacagctatacaccatcagcaacggtgacggaatatagtaatacaatgtcaggaaaagtaagtgggccaaataatgatttgacaaatacaaattttggagattgatatgaacttcaggaaaaatggtgacaaatatcttatcacagtcgaggctttagcacttatagtagtacttgtacttggtgtactgcattttataatgccgggggatgtgagagaaaagaaaattggtaacaataattcgatagctaaggatgcgacagaggatgcaacacaatccgttaatgatgatacatcagtagatgcagatgtaacagttgcaccttttactccaacggattcggtaaagtcaaaaattgattctatgactactgaacagaaagtagcgcagttgttcattaccagaccagaggaaattacaggtgtgagcacatttacgcaggctggaaagaagacaaaatctgcattggaagagtatccaataggaggattgattttccgacaggagaattttttgggtgaagaatcaacaaaaataatgatgtccaatcttcaagcttatgcgcaggaaaaaaatggagtaaatatgtttttggctgttgatgaggaaggtggggatagagctccgttggcgaatggtcatgcatatgaagtacagccggttccttcaacacttggatcagccgatgctgcggggaagagtgcatctacaatagcatcctatatgactaaaaatggtctgaatatgaatctatctccaacagctgatgtggcatatggagacaattctgaaaatgatacatatgcattcggtagtgattctgcgacagttggagattgtgttgcaacagaagtaagtagttttaacagtgcaggaatatactctgtagctaaatgctttccgggaaaaggtaaagctacaagtgacagcacaacaggaatgttgtggatgacagataagcttgaggatcttgagggctctgattttacatcttataagaaagctatagatgcaggggctccggtactcatgattggtaatatactttgccagagtgtaacgggagaagagactacgccatgttcgctttcttcaaaagcagtcgcttatgtgagaaattctatgggatttcagggtttacttatgactgatgatttgtcagatacttcactgaataaggtttattcccaggatcaggcagcaatagaagcagtgaaagctggtatgaatatgatttttgtttcaacaggatttgaaggcagctataatgcagtactcacagcagtaaataatggtgatattagttctgagcaacttgatgacgctgttgccagaattttgacaactaaaggaatttaataataatacccggaaatttggctttatttaaaataatgctaaattttccgggtatttatgttgtttgaaatatatatgttacattaattagaaccagttcattattataaaatagattatattttatctatgtagaattggtgataccattcagcaaatcttctaagaccgattcggagtggtgtatttggtttaaaaccataatccctctctagaggcgtagtgtcagcatatgttacaggtacatctccgggctgcattggtacgagctttttgtgggagtcaaagtcataatcctttggcagaacattagctgtcgtcagttcttcctgaagtatagtaacaaaatccagcagattttcaggattgctgtttcctatattatatatagcatatggaggaattgggagcccgtcttcaccgtttttcttttctggtgcaccctgcataatacgtttaactccctcgacaatgtcatcgatatatgtgaaatctcgcttacaatttccataattgaatatctgtatagtttcacctttgagaagcttgtctgtgaatccgaaataagccatatcgggtcttccggctggtccatatacggtaaagaatcgaagacctgttgatgggatattatatagtttactataggcgtgtgccattagctcattggacttttttgttgctgcataaagtgaaacgggattatcaaccttgtcgtcggtactgtaaggaacatttttatttgaaccatagacagatgacgatgaagcataaactaaatgttctacacctgttttgttattgttatagctatgtcgacaggcttcaaggatattataaaagccaatcatattactttgaatataagcatcagggttagtaatgctgtaacgtactccggcctgagctgcaagattgacaacgatagcaggattgtattctgcgaatatgtggtcaataaggcttttatctgagatatcacctttaataaaagtatatgcgctgtctacatgattttttgcacatttctcaatttctgataatcgccattgctttatactgacatcatagtagttgttcatattgtcgattccaactatattgacagatgactgggtttttaatagctccagtatcaagttactgccaatgaatccggcagctcctgttactagaatggttttgttttgtaataaaattttttgcattgttctcctccgttagacttttgattagtcgcgtctgaatatatcccttgtgtaaactttagcagatacgtcgtccagacaggaatcatatcggtttgcaataatagaattggacatttttttgaattcattcagattatttacaacctctgagccgaagaatgtttctccatccttgagagttggctcatatatgataacagtagcacctttggctttaattcgtttcataacaccttgtattgaagattggcggaagttatcagaatttgatttcatggtcagtcggtacacaccaacgactacctttttttcttttgttaaatcccactcgctgttagcttcatatgcaccggcaagctctaatacacggtcggcaataaagtcttttcttgttctgttactttcaacaatagcactcatcatattctgaggtacatcgttataatttgctaggagctgtttagtgtccttaggcaggcagtatccgccgtatccaaaggatggattattatagtgtgtgccgatacgaggatcaagacatactccgtttatgattgcctgagtgcttagacctttaagctccgcgtatgtgtcaagctcattgaaatatgacacacggagagcaagatatgtgtttgcaaatagtttaacggcttcggcttctgtaaatcccatgaaaagagtgtcaatattttctttgatagctccctgctgtaaaagtgcagcaaaatcctgagaggctttctttagtttatcgtcttttaagtctgtagaaacgatgatgcgacttggatagagattatcatataaagcctttgattctctaagaaattcagggctgaatatgatatttcgggtattatattttttcctgactgattcggtatagccgacaggaatagttgattttatgaccatgatggcattagggtttacatcgagaacaagttcaataacggcttcaacagcagaagtgtcaaaatagttttttttgctgtcgtaattggtaggtgcagcaatgaccacgtagtcagcatttttataagctgcttttccgtcaagggtggcagtgagatcgagtttcttttctgataaatatctttctatatattcatcctgaataggtgattttcgattgttaatcatatcaactttttcgggaatgatatctactgcagtgacatggttgtgttgtgcaagaagtgtggcaatggaaagacctacgtatccggtgccggcaactgcaatgttgagaggtgcaggactttgaagcttattgcttttggcatcggtaaacacgtcatctaaatcaaagccaagtgcatcaccaagagcttcaagctgtggaataagcgggagataatcctgctgttcaagtctgctgagctgagcccgattgatgccggtcatatcggataactgtttttgtgtcatattaagctctttgcgtttagatgatactatttgcgctaagagggaaggtgatagttttttcattttaatcctccgtttataatggttttaatatgtgctatatatttgataatataattgatgtttaaaacataatacatgataatgttaattaaaataacattaatgcatatatgtgtacaacaagaaaaattgttttaataataccactgaacagataataaagcaataataaaagctgaattaaaatataattgtcaaaaatcaaaagaataacagtaaaaaatgttaatataaataacatataatgacgttaatattatggaatttattcatttttattgttatactatattatatggatatatatcagatttgggtcacgcacaatcctgcttggacccggcgggaaatcatattttttgtggttgtatttactattgttacaattattgaagcaggacaggtacacagacacagggtaaaggtgtatcaagcaattgcatcgttacttttgttggcatttatagcaattgtatatgcctcaaccgtgtttacacgtaatccgatgccatatgccaggtacaagcttgaattgttctggtcatacaaatatattttaaatggaaatatgtattacgctaaggaatgcttcctgaattttttattgttgatgccggttggattattgcttccatatgtgtttgatagaaaaataagctggtggaagggcttattatgtggcattatactatccgggggagtagaggttttacaattgatactgagaagaggactgtttgaatgggatgacatatttcataatagtatgggatgtatgtttacaacaatgattagtagctgcgtttatggtactatatcaaagttttttagtaaaaataaataaaattgtgcagggtgtatacaaaacagtgaaaaaactaacaaaattttgtgggggggggtagacaaggaatagtctgttattgtaatattactaaggtgtgtatttagatacattttacattatatgataaagaggattatgaaagatgaaacaaatgaaaagcaaggggtttatggggcttgaacattggaaattgattgcgctatatttattgatttatgatattgtcacaattaatctttcttattttatcggattatggcttcgttttgatttgcagtattcaaaaataccttcagagtatcttatggcatttattaaatttgcaccattttatacggcatttagtataatagtattctatatgatgcatatgtataatagtttatggcgttttgcaagttttaatgagctgacatcaataatgatggcaactgttgttacaggaaccgctcatgttgtgggaataacattgtttgtacgacggatgccgattgcttattatgtttttggaatttgtgcgcagtttatttttacaaccggtattcgatttggatatcgttttgtaaatctcgaaagagcaaaacgtgaaaaaaccgagaagtcagcgcatgtgaagcatcatgtgatggttataggtgcaggtgctgccggtatgacagttcttagggaattgcataattcaagagagcttacttcacgagcttgttgtgtaattgatgataatcctaataagtggaatcgttttatagaaggcacacctatagttggtggcagagatacaattcttgagaatgctgaaaaatatgatatagatacaattatgcttactatgccttcggcatcagcgaaagataagcgtgatatccttaatatatgcaaagaaactcattgcgagctcaagagcctgccggggatttaccagttggcaaatggtgaggtccttctttcaaagatgaaaagcgttgctattgaggatttgctgggaagagaccagattaaggttgatatggctgagatttttaatcagctcaagggtaagactatccttgtcacaggaggaggcggttccattggaagtgagctttgtcgtcagattgcagcccatgagccaaagcagcttattatctttgatgtatatgagaacaatgcatacgagattgagcaggaactcagacgaaagtataaggatagattgaatttagtcgttttgataggatctgtccgtgatacaagacgaattgacatggtatttgaaaagttcagacctgatattgtatatcatgcggcagcgcacaagcatgtaccattaatggaaaccagtcctaatgaagctatcaagaataatgttgtgggtacctataagacagcgtatgctgcattaaaatatggtgctcagaagtttgtgttaattagtactgataaggcagttaatccaactaatataatgggtgccagcaagaggctttgtgagatggttattcagagcatggatgttatcagcagaacaggcaaaaacaatcttcttccgctgttacatgctcatagggatgtagatgatcctatggacagagcagatgttggggttggaaatgatgtacaggaggatacagttagtaaagctaagaatcgtacacagtttgttgcagttcgttttggtaatgtgcttggaagcaatggctcggtaatcccactttttaagaaacagattgaagcaggcggacctgtaacagttacacatcctgatatagtacgttatttcatgacaattccggaggctgtcagccttgtgcttcaggccggtacatatgcagccggtggagaaatatttgtattagatatgggtgaaccggtaaagatagactcacttgcacgaaaccttataaagttatcaggatttgaacctgatgtagatataaaaatcagttattcgggacttcgccctggtgagaagctttacgaggagaagcttatggcagaggaaggtcttaagaaaacagataatgacctgattcatatcggacagccgataccatttgatactgaaaaattccttagacagcttgaaacattggcagcagagagctatgaaaacagtgatcatatagttgaacttgtagaaagcattgtgactactttccatccggttggggcacatcctacggggcatgaagtgtagtctatagtatattttgcagtaataatatattaagatatatttaaaacgtggtacatatcattgtactgcgttttttttaatgttataataaataagtttaatggaaatataaaatatggttgcgaaaggaaataacaaatgactaaaaaaagtaaaataacaaagtggattgtttttgcaggaataatgcttataatacaacttatagcagaaattgttttaatttgtatgacagtaaagacaaaaatgctacctcaaaaatatattatattagttattataggactgatttttgttgaatttatagttttttcattgatatatgttggacagaataggaaaaaaataaaaggaactgctttttttagacgaataataggaactgttctttcgacagtaatgatattttgttgtgtattaggaacgtatgcgcttaatagaggcatgggaacacttaatagggtaacagacagcaaaaaagttgaggaagacaaagtggctgtttatgttatggataatgattcagcacaaactatagatgatgcaaagaaatataaatttgcatatacgaaatcatatggttatgaagatacaaaaaaggcgatagaagatattaatgaaaagatacatgatgaaattgacaaaaaatcatatgcatcagcagttgaaatggtagaggctctgtatagtggagaaacaaaagctatgatacttaaccgttcatatgaatcggttatcaccgacgtagaaggatatgaagattttagtagtagaacacgcataatatatgagtacacaagaacttatgaggtagataataattctgaaagtgaacagaaagataatgatattgatgttacagaggatgcgtttattgtatatatcagtggatctgatactagatcaaaaaaactaacaaaaagtcgcagtgatgtaaatattttggctatagttaatcctaaaaatcatcagattttactattgaatacaccacgtgattattatgtggagccttcaattgcaccaggggaaaaggataaacttactcactgtggattatatggtatagattgttcaatggataccttaaaaaatttatatggtttaaatgaaataaattattatggtcagattaactttacgggacttgaaacattggttgatgagattggaggtattacaattaattcagattcagcttttcaatctacattatatccacaatataaatttgttaaaggggagaatgatgtaaaaggtgagaaggcattggcatttgcaagagaaagatatgcgcttggagatggcgataatgccagaggccgtcatcagatggaaataattaaagctgtaattgaaaagatgacgagttcaaccgctcttcttacaaattattccggcattatggatagcttagagggaatgatttcaacagattttgccagtgatgatatttcatcacttataaataagcaactttcagatggtggcacttgggatattaagacatttgctacagagggcgagggtgctagtaaaaagacatattcaatgccaactcagagagcgtatgtatgcgtacctgatgagagcagtgtgcaacaggctaaccaacttataaagaaagtaatgaatggtgagacgatttctgatgatgatttaaagcttacacaaaaaggagattagaggaatatgtcaaattgtttcaatccggcaaatattcttttgccaaacgatggtatagatatggaaaaatggtcagttatcgcctgtgaccagttcacaagtcaggctgattattgggatgctgtggaaaagcatgtggctgatgcaccgtcaacgcttaatgtggtgtttcctgaaatatatctgggaacaattgagaatcaggataatgattgcaagtcgtcaggggatggtgtcaaaaatgacaaagaaaccggcagaaaaacaaaatatgcttcaatgacagatgatgagagaatcaaatatattaataccactatggatacatatctcacagatggaactttaaagcaagcggtggcagatggctatgtgctagttgagcgtactacggagtcaggggcgcgtcttggaatagtaggacttattgatctggatgactatgatttcgacccaaaaaagaagactctcatcagagcaacagagggaacagtaatctcacgtatacctccgagagtgaaaataagagagaatgcagctattgagctgccacatgttatgctacttgttgatgatcctatagacagacaaaagattgatggatgccagggtgctacacaggaagatgcagtaaatatagcagctgtaaagcatggaataatcgagtatgtgtatgctatcagggatactcttcgtaagctttacgatacagagcttatgcagggaggcggacatattcgaggctatgctgtcgagggtgagacagcaaagcaggtgacagaggcatttgcagcaaaacagaatagctgtggaggctttttgtttgcagtaggtgatggaaaccattcgcttgcaacagcgaagacctgctgggaaaatatcaaaaaatccggaaaattcacagaggagcagttgaaaactcatcctgcaaggtatgctcttgtggaaatctgcaatctgcacagtgaggcacttgggtttaagcctattcacagactgcttacaaatgttgatgtaaaggacatgctgtcgtttttcgaagctgaaatcacaaaacaaggacttgagagcgctgatggcgatgagatagtatttgagtatgttgaatcaggcgctaccgcaataaagaactccggaattaatatcacaaatagaggtgaccgcctcccggttgagatactccagggtattttagataagtatcttgagacacatgacaatgtggaaatagactatatccatggtgatgaggcacttcacggactggtaaaggagactaaggaatgtggaatctttcttcagtcgatagacaagagcacattgttccctgcaatcaatgcgggcggggtgctgcctagaaagacattctcaatcggagaagcgaatgagaagagatattatatggagtgccataagatatctatgtagctttggtttatatacatatgttaattttattatatttagggaaaatcttcttttagtattataattatttaacaaataatgttattttactacacaaagatatttattaagtgtataataaaacaaaaataaatttcacaaggggaaaacaatgggaaaatactttggaacagacggcttccgtggagaggctaatgtcaatttaacagcagaacatgcatatcagattggtagatttttaggctggtattatggagagcttaagaagcagaagcagctcgacgagccggcaaagatagttataggaaaggatacaagacgttcaagctacatgtttgagtactcccttgtatcaggacttacagcatcgggagcagatgcatatctattacacgttaccacaactccatcagtggcatatgtagccagaaccgatgattttgactgtggtatcatgatttcagcaagccacaatccatactatgacaatggaattaagcttattaacagcaatggagagaagatggatgaggagacaattctccttgtcgaggactatatagatggtaaactccgtctgtttggtcaggagtggaaggagttgccttatgcacataaggatgcaatcggatgtacagtggattatgtggcaggccgtaaccgttacatgggatacctcatctcactcggagtgtattcattcaagggcatgaaggttggtcttgactgtgccaacggaagttcatggaacatggcaaagtctatttttgaggcactcggagcaaaatgctatgtcatcaacaatgagccaaacggtctaaatatcaacaataatgcaggctctacacatatcgagggcttacagaagtacgtggtggacaatggtcttgatgtaggcttcgcatatgatggggatgcagacagatgtctctgtgtagacgagcttggaaatgtaatcacaggagaccacatcctctacatatatggaaagtacatgaaagagagaggaaagcttgataacaatactgttgtcacaactgttatgtcaaactttggactctataaggcccttgatgagcttggaatcggctatgcaaagactgcagtaggtgacaaatatgtatacgagtacatgcagcagaacggctgccgcatcggcggagaacagtcaggacatatcatcttctctaagtatgcatcaacaggcgacggtatccttaccagccttaagatgatggaggtcatgatggcgaaaaaacagaagatgagccagctctgtgaggggcttaatatctatccacaggtgcttcaaaatgtgcgcgtagctgacaaggcggaggcacttgcaaaccctgatgttcaggcagccatcgaacaggttactgcagagctaggtgatacaggacgtatacttgtgcgtgaatcaggtacagagcctgttatccgtgtcatggttgaggctgagagcgaggaaatctgtcagaaatatgtggatatggttgttgcaaaattaaaataattcaaagataatgtctttatatgttcaatttactaaagctgtgtgggatacaacatacagctttataattttgttttttgtgttgggagtgattttaaatgcttaatatggaaaaaaataagataagcattgtggtaccatgctttaacgagaaagaggctctgcctcttttttataataaaataactcaggtgtttaatcagatgagtcaagagagtgaggcagcaggattgtcctatgaactgattatagtggatgacggctccatggatggtacgcttgatgttgcaaaggagcttgccgcaaatgattccggtgtgaaatacatatccttttcacgtaattttggcaaggaggcagctatgtatgcaggcctgcagcatgcggtgggtgaatatgtggcaataatggatgcagaccttcaggatcccccggaaatgcttccaaagatgtatcaggtccttacgaaagagggttatgatgcagtaggcacgaggagggtgacaaggaagggggagccaccgatcaggtctttttttgcgagaaagttttacaggctcatgagcagaatatcaaaggccaatatggttgatggtgcacgcgactataggcttatgaacaggaaatacgtggatgcactgctttcgcttaaggaatacaacaggttttcaaagggattgtttggctgggtaggctttaaggtgaagtggcttgagtttgagaatgtaaacagagtggcaggtgagacaaagtggtcattctggcagctctttttgtatagccttgacggaatagtggcattttccaacgcgccgctatacatggcttcaatagccggagtgttcagctttattgtcgcaataattgcaatgctctttatcattatcaggagacttgtattcggagatccggtagccggctgggcttcgaccgttgttatcatactttttataggtgggatacaactgcttagcataggcattttgggactttatctgtcgaagctatatctcgaggcaaaggacagaccgatatatttaataggagaatcaaatatagaaaaacatacagaaaaatattaagtctttcttaagaattcttaattcgatagcacatgacattttttcggatgttatgtgctataatttttttcggcaacgtttattaatgcatgaaagaggactaagatgaaaaacgtactggagtggcttgaggccacagtagaaaaataccctgacaagcctgcattttcggatactgaatgcagcattacgtttgcgcaggtgtatgatatagcaagaaatacaggagcatatctgatagaacagcttggagtggacagaacccctgttgcagtatttgccggaaggaaaatggtaacaccggcatacttcctgggagtggtatatgcaggcagaccgtatgcgccgattgatgcatcgcttcctgacaagagaattgaaaaaatacttgaaaatctgtgtccaagggctattgtggctgacagggaaagccttgagcatgtggagagcatagtggatgagctggcaaaggcagaaggtttcgatagaccgcagatatttattgctgaggatatatcgcgcttcgagcaggtggcgtgcgctgatagtaattgtaaaatcagtgaatcagcaggagacgctgtgacggatagtgagaacgatacagatggtggtgttgtggcaggctgtgcaggaaaaatagatgacagctcacgggatatgctcgctgtagtccgcaggcagatgtccatgacagacccactgtatatcatctacacgtcaggctccaccggcaatccaaagggagtcatgacatcgcatctgtcacttatgacatacatcaatgcatattgtgatgtgatgcatatagaggaaagtgatgtgctaggcaatcagtcgccgcttgactatattgcggcaatcagggacatttatctgccgttaaagaccggctgcagcacagcgattattccaaaagagtactttatggagccaaatgccctgtttgattacatgaatgataagaaggtcagcagtgtcggctggagtgtttcggcatttaccatcctcacatcgcttggggcatttgaggaagtagggcttaagagtcttagaaaaatctgcttctcaggctcagtgatgccgtgcagggtactcagaaaatggcaggaaaatctgccggaagcgcattttgtgaaccaatatggaccgacagaggcaactgcttcgtgcacgtattatagtgtggatcatctggtggaagaggacgaggtgcttcctataggaaaagcctatgacaattacagggttttcctgatagatgagcatggaaatgagccggctgtcggagaacagggcgagatatgcgtatgtggaccaatcctggcgctgggctattataatgatccggagaggacagctgcggcatttacactcaatccactcaacaaggcttatcctgagcggatgtaccgcacaggggattacggaaggctcgatgaggacggcatacttcatttctgtggacgtatggaccgccagataaagcacatgggacaccgtgtggagcttgacgaggtggagcatgccgccaatgtggtcgatggagtcgcagaaagctgcgttatatataataaagcaaaagaggtgctgatacttttctacacaggtgactgtgacaggagaagccttgcgctggcactgagggacgagcttccgggctttatggtgccaaggaaaatcaagaaactggagcagcttcctaagcttccaaacggaaaatatgatatgaaaaaactggaggaaatgtaaaatgagagacacaattttagagattttagaggaattaagaccggatgtggattttgagaaggagacaaagctgatcgatgacaaaattcttgagtcatttgatatagtttcactcgtatcggagctgactgatgagtttgacatcacaatcagaccaaaggatctggttcctgagaatttcaactcagttgatgcaatcgagaagcttgtgaaagagcttgtggaggaataaagcatatgagacagacaccgtactatgtatttgatacggacgagtttgcgaagagagcagccatgataagggctgctcttgattgtaaaggaggacgtaggataccactttgtttttcgataaaggcaaatccgtttctgcttcacaggctgccggagggattagaccatgtggaggtgtgcagcctaggagagcttgagatatgtatagcgctaggtgtgaagccggagtgcatcatctattcaggcgtgatgaaggaaaaatgcgatatagagcgagcagtttcatatggagccggtatactgacctgtgagagcataagacatgcgacactgatatcggaagtgatgcttgaatgtatgcctgaaggtgcgcatgaagccgaatttgctgaaatgaaagcacaggtcatactgcgcctgacaagtggcaaccagtttggcatgtcacttgatgatattgaatacatcatttcacatccggatgagtttaagggcatcacggtaataggcattcactactattccggcacacagaagagtcttcgcaaaataaataaggacttggaaaaaataaagtctgcactgaccggattaaaagaaaaatacggctttgagccacagcttgtagagtatggcccgggactttgtgtggagtattttgagaaagactggcaggaaagggaaaaacaagcacttaatgaggcagcagaggtgcttagagaatttgctgtggaatatccgcttggcattgagatgggacgcttcctcgcggcctcatgcggtaaatattacacacaggtaaaggaccttaaatcgacaggcgatgccaattatgcgattctggatggaggaatccaccatctgaattactttggacagaggatggctatgcaggtgccgccgattagtatatatagagctgccggtgtggaattaacacaattgccggacatagactatacactttgtggaagcctctgtacagtggcagatgtgctggtacgcgaggtgaagcttaagaagcttgagcttggtgatgttcttgagtttggacactgtggcgcgtactctgtgacagaagcaccggcgctatttctttcaagacagcttccggctatatatgcatattcgaaggagtatggatatgagtgtctgagggagcatattccggcggcggagataaatctggccggaaaaaaattgtaaataaaagcgccatggtaaattgccatggcgcttttgaatatgacataaacaaagccttttgtgggaagctaaattattagccaagctccttctcacacatatcaagtacagaagcaatggtagtatccatatcatagtacttgtactcgccgagacgaccaccgaatataacaccggtctccttgtcggcaagctccttgtacttggcatagagctgtccgtttttctcatcgtttacagggtagtaaggctcatcgccggccttccactcagaagagtactcacggctgataatagtctttggcaggtcattgccatcctcatccttgccgaactcgaaccacttgtgctcgatgatacgtgtccatggagtctcgcggtctgtatagttgacagcggcattgccctggaagttaggaatatcgagggtctcattctcaaagcgcactgagcggtactctaaagtacctagcttaaagccaaagtatgcgtcaatcggacctgtatatacaaccttgtcagcaagagcatcaagctcagccttgtgctcaagatagtcggtattcaatctgacctcaatgccgtcgagcagattttcaaccatcttggtgtagccaccgattggaataccctgataaagagcgttgaagtaattgttgtcaaaggtaagtctaacaggaagacgctttatgatgaaagccggaagctccttacaatcacggccccactgcttctcagtatagcccttcacgagcttctcatagatatcacggccaacgagtgagatagcctgctcctcgagatttttaggctcaccggtgatttcctttttctgctcctcaatctttgcagcagcctcctccggtgtcaccacaccccacatcttgttgaaggtgtacatattgaaaggcattgagtaaagctcacccttgtagttggctacagggctgtttgtgaagcggttgaactcagcaaactgtgtgatgtagttccagaccctcttatcattggtgtggaatatgtgggctccgtacatgtgtacgttgatgccctcctgcttttcggtgtaaacatttcctgctatgttaggacgcttgtccacaacaagcactgatttgcccttggcctttgcctcatgggcgaagatggctccgtagagaccggaacctactactatataatcgtatttcattgttttctccttgctgcatagtgatagtataattataagtacattttccgtaaaaacaagcagaaacaatgaaaataagtaaatattaataaatcctgtattagaaaattatgatatacttagatataggaagttaaaaagtaagaaaataagaggaaaggcaacacaacgatgaaactacccggctactactcatcaggagaatttgcaaaaaaagcgcatattacaaaaaagaccgtcaggtactatgacgagcacaatattttaaaaccatcctacgtaaacgaaaacggagccagattctataatgatgacgactttgcgcgtctacagcagatactgttcctcaaatatctgggcttttccctggatgatatcaaggagatgacactcagaaacacggacagcaatgtcatgtctgagtcgcttcacatgcagcttggtctcgtggaggagaggatagagcagatgaagcttatgaaatcagcactgcaggaggcttcagaggtaatagacgaggggcgaagcgtggactggagtcatatgctggagctggttaatataaatgagatggagcaaaagctaaagcagcagtacagggatgcttcaaatatatcagccagaatcaatctgcacagggatttctcgattaatccggtgagctggtttagctgggtatttgatgagtgcagcttttttgagggggaaaaggtgcttgaggtgggctgtggtgatgcctctctctggacacagaacatagacaggataccggcagatatgcagataaccctgactgatatatcgtatggcatggtaagggatgcgacgagaaatgtaggcgcagatgacaagcgcttcacatatgaggtgatggatgcccacaggctgtataagccggatgcatcgtatgactgcgtgatagcagaccatgtactgttctattgtgacaatctggatgccgtgtgcagtgaaatcctaagggtgctaaagcccggtggcgtgtttgtgtgcagtacatacagctcacggcatatgaaggaaataaacgacctggtacagcagtttgatgaccgtatagagctgtcagcggaaaagctgtatgagcaatttggtaaagaaaatggtgaggcaatacttggaaaatactttggtgaggtaagctggcatggatacgaggatgagcttgtggtagaaaaagcagagcctgtgatagagtatgtgctttcgtgccacggcaaccagaacaggtatattgtggaccgctataaggaatttgcggcatttgtcagaaagaagacagagggagggttccatattacaaaggatgcaggtgtatttattgcacgaaaatgattcaaaaacaggatattataagcatatattttgtgaaaaatgctaaaaatataaaaaagtacttgaaggtgcccttggggcaccttttataatgcaggtaaatgatgaatcaggtcagtgtattctacagaccgaaagcatcaagtgcagcacgtagtttcagtttgaaggagaacaacatgaaaggtattatattagcgggaggttcaggcacacgtctttacccactcacaatggtaacatcaaagcagttacttccaatttatgacaagccaatgatctactatcctatgtcagtgcttatgaatgcaggtatcagagatatcctgatcatttcaacaccacaggatacaccaagattcaaggagctcttaggagacggacatcagtttggcgtcaacctcacctacgaggtacagcctagcccggacggacttgcacaggcattcgttatcggtgagaaatttatcggtgatgatacagtagccatggttctcggagacaacatcttcgcaggacacggactcaataagagactcaaggccgcagttgaaaacgcagagagcggtaagggcgccacagtattcggctactatgtagatgaccctgagagattcggtatcgtagagttcgataaagagggaaaggctatttcaattgaggaaaagccggagcatccaaagagcaattactgtgtcacaggtctttatttctacgacaacaacgtagtagagtacgcaaagaaccttaagccatcagcaagaggagagcttgagataacagaccttaacagaatctatcttgagaaaaaagccctcaatgtagagcttttaggacagggctttacatggcttgacacaggaacacatgagagccttgtagatgccacaaactttgtcaagacagtagagacacatcagcaccgtaagatagcatgtcttgaggaaattgcttacttaaacggctggattacaaaggatgaagtattaaagacatatgagctcgtaaagaagaaccagtacggacagtacttaaaggatgtacttgatggaaaatatcgcgagcaactgtactaattatagtaaaatcgacattgcgttagttagctggtagattaagttaatagaaataatttaaatctcgcttgcaaaaagcggaaatcaggaggaaatcaaaatgacaattatcgtaacaggtggagcaggatttatcggaagcaatttcgtatttcacatgcttaacaaatatccggattatcgtatcgtatgcttagactgtctcacatatgcaggaaatctctcaacacttgagcctgtaatggacaatccaaacttccgtttcgtaaaggagagcatcacagaccgtgacgctgtatacaaattatttgaggaagagcatcctgatatggttgtaaacttcgcagcagagtcacacgttgaccgttcaatcgagaatccacaggtattccttgatacaaatatcatcggaacatcagtgcttatggacgcatgccgcaagtatggtattaaaagatatcaccaggtatcaacagatgaggtatacggagatctgccacttgaccgccctgaccttttcttccatgaggatacaccaatccatacatcaagcccatattcatcatcaaaggcagcagcagacttactcgtgcttgcttaccaccgcacatatggacttcctgtaacaatcagccgttgctcaaacaactacggaccataccatttcccggagaagcttatcccacttatgattgcaaatgcacttaatgataagccactcccggtatacggaacaggcgagaacgtgcgtgactggctctatgtagaggatcactgcaaggcaatcgaccttatcatccacaacggacgtgtaggagaggtttacaacgtaggtggacacaatgagaagacaaaccttgaaatcgtaaagattatctgcaaggagctcaataagccggagagccttatcacattcgtaggagaccgtaagggtcatgatatgcgttacgcaatcgacccaacaaagatccacaatgagctcggatggctcccggagaccaagtttgaggacggaatcaagaagacaatcaaatggtaccttgataaccgtgagtggtgggagacaatcattagcggagagtaccagaactattacgagaagatgtacgcgaatagatagttattatcgtttgtctggtggttttgcgcatatatggtgatgttagtcacgataataattaagtataaaggagaccccccaaaaaaatgaaaatatttgttacaggagttgcaggtcagcttggacacgacgtaatgaacgacctggcagcacgcggttatgaaggaatcggaacagatatagcaccacagtacagcggagcagatgatggcacagcagttataaagatgccatatgtctcactcgacatcacagaccgtgatgcagtggaaaaaacaattacagagcttaagcctgacgtggtagtacactgtgcagcatggacagcagtagatctggctgaggatgatgataaaaaagcaaaggtgcatgcaatcaacgcagacggcactcagaatatcgctgatgcctgcaagaagatagatgccaagatggtatatatcagcacagactatgtatttgacggacagggcactacaccatggcagcctgactgtaaggactatgcaccgctcaacgtatatggacagacaaagctcgacggagagcttgcagtggcaaatacccttgagaagtactttattgtacgtatagcgtgggtatttggcgtaaatggcaagaacttcatcaagacaatgctaaatgtcggcaagacacatgacaggctcacagtagtaagtgaccagattggtacaccgacatacacactcgacctttcaagactgctcgtagatatgatagagaccgataaatacggttactatcacgctacaaacgagggcggatatatcagctggtatgatttcacaaaggaaatctttaagcaggcagtggcgcttggtcatacagagtattctgaggacagactcacagtcgcacctgttaccacagcagagtatggtgtgtcaaaggcagcacgtccgtttaacagcagactggacaagagcaagctcgtggcgaatggatttaagccgctccctacatggcaggatgcgctgcacagatatctgcaggagattaacttttagaaaggacatagaaatcatgggacagattaaagtacagaaaaacgtaggtggaatcgaaggactttgcatcatcgagcctacagtacacggagacaaccgtggatactttatggagacatacaattcaaaggacatgcaggaggcaggcattgacagagtattcgtacaggataatcagtcttgctccacaaagggagtgctccgcggactccatttccagaaggaatacccacaggcaaagcttgtgcgtgcagtaaaaggctcagtatttgatgtggctgtagacttaagaagcgattcaaagacgtacggcaagtggtttggagtagagctcacagaggagaacaagaagcagttccttataccggagggctttgcacacggatttttagtactctcagatgtagcagagttctgctacaaggtaacagatttctggcatcttggagacgagggcggtcttgcatggaatgatcctgcaatcggcatcgagtggccacagcttgtcggagagtatccgggaagcgccgacggaagcggatacacacttgaggatggcacaccaatcaatttaagtgataaggatcagaagtgggagacactggagaatacatttaagttctagaaataatgataataaataccccgtaagctttaaggaaagcttacggggtatttattttttatcgattaggccatgcttttaccccttttccatctgctcgtaaactgtaattccatgaggaaagagtgaggtttggattatagtaaggatctccacttttgagaatatggctccaatgagttttcatatagtcaatttcagagttaaatcttttgactttttcaggattgtcttcagtaccacgagattttgattcgtaatgatacatttcaacgtgtggattaaatacaatgagatatcctttttctcgaattcttaaacagaaatcaatatcgttgaaagcaacagataatgattcttcaaaaccattaacttcttcgtataaatcttgtttaatcattaggcaggcagctgtaactgcacttaaatccatttgaatagaggctttatgaaaatatccgcttttgaatcgcggaaggccgagaaatgcatgtccagcaacaccacctattccgattatgacacctgcatgttgtatagtgttgtcaggataatatagttttgcaccaacaattccgacttccttgcgttgacaattgccaagcattttttcaatgaaatctggtgtaatcacttcgatatcattatttagtaaaagcaagtatttaccatgagcaaatttaacaccataattatttattgcagaataattgaaggttttatgtgggtatgttacaattgtaactcctttttgctcaagctttttgtatgtattgaaggttttttcttcacaactgttattttctacaacgattatttcgtaagaaggataagtactcttattgattattgaatcaatacattttattaatgaatcagattgatctcggttaggaattataattgaaactaagggagtatcatttaaaggatattctatgtcgtagaaaccatagtcagaacgcatggttactttaccaattgtattcattcttttaaggtgagcttctaaagcatgtaatccagcttcgtatgcatatagtttacttgaaggattgtcagcagttgaagagttgtggatgcgccagtgatatagtattcgtggaatatgtgcgatttttcttgaagcttctgtacaacgtagaataaaatcgtaatcttgagcaccatcgtattcttcacacaatacgcctacttgttcaataattgtttttcgtaccgcaaaaaaatggcaaatataattgttcgaacgcaataggtctaaattgaaatctggtttaaaatgtggttgaaaatatttgtttgaatcagtagtgactttatcttcatctgtatatataaaatcaatttttgaatcactctcaagttttaaaacaaattcaaataatgcgtcaggtgcaagaatatcgtcatgatccatgaaaccaataaattcaccggttgctgcggcaagagcaatatttgtattttgagctattccatggtttgatttaatgtttataacttttattctattatccaagcggatataatgatctaatactacactcatgttagagttttcagggctggcattaccaattatgagctcccaattggaataactttgttgtctgacagaatcaatcatttgctgtaaaaaaatattaggtgtattgtaagcgggaactacaatgctgattaaaatattgtctttgaatatgtgttttcgctgtttttttaagtcattttcactagcacaatagtttttataccataattcgtaagggtagtcctcgggttcaaaacgttcagaaagacggataaaaaagtcttttggaccataatgttttaaatatctaacccccttaataatgttatgaactgttagtttatttgtcaattttaaaaattgtttctgttgcacgatataatctccttgaattacttataaattataaaaattatacattattttcacagactatgcaaataatgaaatatgataaaatcttagttttttatgaatgagtggctattattaataaaatatgttaaaatctattcataatataatggtctcataaattaagacactttttcggacagtttttaatgaatctga

SEQ ID NO: 454 - DNA, 34067 bp, unidentified
  source 1..34067: mol_type = unassigned DNA
catcaagatactttttatgacgtttatgaatatagtgttcgggaagaaattctaaactattttccgggataagcagaatcctgttaggaagtctcgatatttgtgtttttttgtaacttagtttttggacgcggtagtgtttactattttataatatttgcttgtattcattcttttctgcatgtatagtatatatttatttatagttgcgtaactattgcttttcatacttgtgtgttattcttaagatgtttttttgttatcaaatgactttaaggttaaaaagaaacggacaatctaatttatctcagactgttaagcgtaatattataatgtcaataggaattaagactgttggtgtttttgtatctttatttattgtacctattacgttaggatatttgtcggaagaagaatatggaatatggctgaccttgtcatctatgctggcatggattgttttttttgatatagggctaacgaacggattgcgtaataaacttacagaagctttggctgtcaaggataatgaacgtgcaaaaatatatctaagtaccacgcttttcctattggtgagtttgatgtttgtattgctcgtaatatttggactatgttgtggctttatagattggcaaacagttttcaattcaaaaactatttcattagaaacattaggaaaagttgcattttatactattacttttttctgtatccaatttgccttaaaagttgttactgcacttttctatgcaacacagtgtgcggctattgccgactttctgaatatgcttggctctttgggggctttgattgtgatttggttattaacgttagtaactcctaaaggtaatttactagctattgctttaacattttcgattgttccggttgtggttttaatgatagcctatattatcgtttttgggggtaaatatagaagtataagtccatctgttaagtatataaaatttaaatatactaaggatcttgtaggccttggtattaagttttttatcgttcaagctgcagctttaattctttttacaacttcaaactttattataactcaactttttggtccttcggaagtaactatgtataacatagcatttaagtatttttcaatagcaacgatggcttttactgttttgatggctcccatgtggaatgcttatacagaagcctatgttagaggagactatatttggatgaggaatgcttttcataaaactttgttgatttggggaagtattgtactttgttcagtgttaatgttagtcttttctagatgggcatatgaattatgggttggtgtgaaagtggctagtcagattccaatttctttgtctattggatgtactctttttgttaccatagcaaattggggtaatgtaacagcaatgttgctaaatggtattggtaagattcaaattcagttgattgttggtagtttaatggctgtattatatatccctttatctgtgttaatgggtaattatataggagtagcgggagttttgtatgctttatgcgttgtatcacttcctggggcaatacttggaatggtgcaagtaaacaaaatactaaataggactgctggaggagtttgggctaaataataagattgaatgaaacaagatatatacatattcggagccggaggacttggtaaagagacagtatgtctgttacaagatttaccgcaatataatgttgtggcttttgtagataaagacgatatcactcgtactagcgtggtagctaatggtattcgttttcctattataagtgaaatggcatttgagaaacgttgtatggaagataggcgggtttgtgctgttattgcgatagggaagccaggtcctagatttagtgtagctcaacggtttggagatctttgtctgtttccaaatatcattcatcctagtgtagattttgtagggcaagtaagccttggacgaggaaatttgattgctcaccattgtttctttaccgataatatacaaattggagactttaattatttcaatgttttcaattatgtcgggcatgatgttgttatcggtagttataattcaatactcccttcttgtaatatatcgggatgcgtgacggttggaaatcgaaaccttataggtgcacaagcattcataattgaagggaaacatgtgggaaatggcaattctattggagctggtagtgtagttttgaagccaatagaagattgttccacatgggttggcgtgcctgccaaggaaaagttgtgaattttataatttaattaataataaaaagtttaagtcatcttgtatattcttaaatggattactggacagtttaaacgcttgtagcttatgaaatatcctgtataccagccatactttaatggcaaggagaaagagtttgttaacgactgtattgattcgtcatggatatcatccaaaggaaagtacgttgaacgttttgagagagaatatgctgattatatcggcgtgaagtacgcggcttcagtgtgtaatggtacgatggcgttacatttagctcttatggcgcttggcattggagagggagatgaggttattgttccaacatttacttatattgcttcggttaacactattatttattgtggtgctactcctgtttttgcagattctgaaaaggattattggcaattggatcctgcgggtttagaagaacttataactcctcgcaccaaagcaatcatgcctgtacatctctatggacatgcttgtgatatgaaatcaatttgtgatattgctcgaaaatataagttatttgttcttgaggattgtgcggaagccattggtacaactatcaatgggcaaagagtcggttcttttggtgatatatcagcttttagcttttttggaaataaaagtatcactactggcgaaggcgggatggtattgacaaatgatgaaacactttatggacgttgtatgcatcttaaggggcaagggcttgctaaatatcgtcaatattggcatgatataattgggtataattatcgaatgactaatatttgtgcggctataggagtagcccaaatgacaacaatagacaatattcttgtgagaaaacgtcgaatagcacaatggtataaaaaatatttgactacaaaggttgaatttcatggagaacgtcagggaacacttaatacttattggatgtgttcaattttagtacccgattctaaggatagagatccattgagagaacatttggctgatgtcggcattgaaactcgccctttattttatcctgttcatacgatgcctatgtttagcacaaaatacaaacgttttcccatagcagaaaatattgctcatcgtggaataaatctgccgtcttatcccggattgaatgagggggatgtgcgattcattgcggaacaggttaataattatttttgcaatgattaaggttgttgtccatacagaggggcttcttggatggggaggaggaattgactttctgaaatattatctttcaattcttaatcaacttgaaaatattaggacgatagtagctataccttatgatcaatatgatcaaaagataattcgtttgattaaaaattgtgtcaagaaaattgtaggctattcaacttgtaaatgttatgattatggcacattttggtctgattatcaaaatattaaaattcaaatgtatcgtagaggttcgataccgacttgtatgcaagaggcagatgtcgtttttttgaacatgagtcctattaagaatgtgaaacgcaataaaatcattggttatattccggatttgcagcatattcatcttccatatttgtttacagaagaggagagagcttctcgtaatagacattttatcaagatgatgagggaatgtggaactatttttgtgaattcacaacatacctgcaaagatttgaaagaacaatatttggaggaaagtaaaaaatgtaattttttttcaatggatttcttgccgtttggaagtaatctttatgatgtattaaatgttaatatcgaaaaatacaaattgcccaaacgatactttatgttttccaatcagttatgggtacataaagacttgccaacagctttacgagctatgaggctgctgttgcaagatgaacggtataaggacgtagaattgatatgtagtggtgttacctatgattatcgtaatctagattattggggacaggttgaacaattgatacaagatttagagattcaaaaccatgttcgctttttgggttatatacctaaaaatgagcaattagcaattttgagaagtagtatttcggtgattcaaacaacattgtttgaaggaggacctggtggaggagcaacgtatgatgcagtggcatatggggcttctgctataatatcagatattgagataaatcaggaaattgaaaacgatagagttagcttttttaaagttggagattccgaggatttatgcttaaaaatgaaaggacatttggatcatccattgaaaccgttgccggtcgcaattgttgagaagcagtgtgagcttaatttccaacaggcttgttttgatattgataaactcataactgaggttgcacagtgtaatgataaatgttcatccgtctaagaactagagaccactcgtttataaacagtaaatagatttttttatgaaacatatcgcactcatcaccggcatcaccggtcaggacggctctttccttgccgaatttcttcttgaaaaaggatacgaagtacatggaaccattcgtcgttcttcagtagattatcgtgaacgcattgcccatcttgaaggcactccaaacttccatttgcattatgccgatttgggagattccatgagtatcatgcagattatcggaaagatacgtcctacggaagtttataacttggctgcacaaagtcatgttcaggtcagctttgatgcgccggagtttacggcagacgtggatgccacaggcgtattacgtgtgctggaagccgttcgtcagagtggattgacggaaacctgtaaggtgtatcaggcttccacttcggaactctatggcaaggtggaagaggttccgcagaacgagaacacgccttttcatccttatagtccgtatgcggtggcaaagctctatggctattggattgtgaaggaatatcgtgaggcttataatatgttttgttgttcgggtattctctttaaccatgagagtgagcgccggggcgaaacattcgttacacgaaagataactttggctgctgcccgtattgcacaaggtaaacaggacaaactgtatttgggtaatttgtcttcattgcgcgattggggctatgctaaagactatgtggaatgtatgtggcttattctgcaaaacaagactccggaagatttcgtgatagccacaggtgagcaacattcggttcgggagttttgtcagttggctttccactacgcaggtatcgaactggagttccggggcgaagggcttgaagaaaaaggcatagacaaagctacgggacgtgtgctgatagaggtgtcggaggatttctatcgccctacggatgtggtgaacctttggggagatcccactaaagcccgtaaggagttgggatggaatccgatgaaaacttcgtttgaagagttggtaagtatcatgatgaaacatgatatggaaaaggtggcagtggagcgcgttgcaggacatatccgtaccaatcttgcggagtatttggaaaaggggattgtgaaataagttgcgggatacaaatttgattattgcaagtaccacttggtatgtttttctctctcttatcaaagagaatgtgtattttgtgaaatatatcacaaataatcatgctgccggtcaatatattatataagcctaaaccacctttgttcgaagctcggggccacgccctgagacgtggccgagcagtgaatgatgataggcgtggcggttctcatcggcctatgcaggagctgagaccgaatactcctgccagtgctgtggctaccgctacaatagatttgaggatgataccccatactgattttgattttgcgctcatgtgattttagtgtttaatgattaatacttgatttggtatttcttctcactgtcgacattagcccagcgggttttcctcctcaccgttgtcgggaggggttcctcctgacgaactgctgtcatcaacgttatattgggaagtctctttcagttgaccttccaaattgatctgagcattgctcaactctcctgtggagcgtgcccggagtttcagccccttgacgttgtcggcgagggagaattcggcggctgaggttgcacctttcttgctgacgatgcctacggagaatatggcgagatcgtccagtttgacgttcttgccatccagaatgagttctttgatgcatgaaatcatatcggcaagcactcctttgataactccggcggagtagggagtgttgtggtttgccatgtgtttggcaagagtttcgatattgaaggtttcttcaattacggggcgggcgtaccaaagtcctttcaaagggcttttctcacctgtcatctgatactttttgtaacgaatcattgttttgtttttttgagttattaacaatcggtttactatctctttgtgatcacgatgcgaagatatgacaccgcacaggagggtttgtcactttctgtatgttagggtctgttagcgttcgttataggtggaaatagttgcttagatgtgaagatatttccgtatctttgttctgtaagaactaatgaactcaaaagatatggagatttttaaaatacgtacctatgggcggacggaactcgctcaactttattgtccggccctttgtcctcaagccgcttttcgtaaactgaaccagtggatagatttccatcccaccttgcggcatgaactccatgcattggttccttcggacagggtgcggacatatacaccggcacaggtgcggctgattgttgaggcactgggagagccggatgtttagttgagaactgaaagcagagcgtgagcagccgggatgtgtaatgtccggtttaggattcctaaaggtcaactctgtgattgtaaagtttaactctgcgattgtaaagttcaactctggaaacctaaagcagacctttacagttgtaagatttctaactttcaggtttttccgtatatcttcccatggcatagaggttagcctgtatctcatcgccagtgagttccaccatccggtagccccgcttgccgcctgagcgcatggattcgaaaccttcctgtttcagcaccatgcctattttgacgggactcagcttttggcggatgccggagttgatgcggcagagtatctgggagttggtgatgaacatacatttctcgcccggcattggacggcggtaatgggtcaatatcagttcctgctccagacagggaatttcgaaatgcctgttgtgcaggttcagggcttcaatctctttgtcttccagccagtaatggtagccgttttgcagtagggtgtatgcttgggagtaaaccccggcatagtccaccggaaagtcataagggctgtcgatattctccacttcaaaggggagccaacggcggtttccggtggggtcggcgaggaagtgagtgttgttgctggttccgcaaaagctggctatgtggtcgcggtgttccttgtaatgtgcgtatgcggcgcgctcgttgactaccttcatggtggtaagcgcctttatctggttcacctcttgcgtttccatttcgtccagttcctccaggcacacaatggcaaattcggcaagggtgaggaggtcgtctttggtgatgcggcgggcgttggacttcagatagaagtaacggcgcagttcgggtgaaagcagattgttgagccaagtggttttatagatgccttgccggccggtcagcaccaatatttcatggttcaccacttccttgtcgaagagggcggcaaccattcccaccagccatttcttgaagtagtaggcaaagggaatggtgttgttccggacgtgtacgtgggtggcaagttgcgcgatgtaatcggtggttccgtcccagggtggcaggtttttaaaatattgctcgaaggggttgaaggtatcaacaaattccgaatcgagcactgcccgtatgtgggcggcctgtcccggtttcgcttctttgcacatacggcaccacagggtattgacgtagcgatctgtgagttcttcgtacttcccgccgcttccggctgtcagcacctcgcacttgccggttacggtgttcttgcgaaaagatgcctgaccgttgagaaactgttcgatgtctgccaccgatgccataaactcctgccgttcatcattgttttgcgacttgcggagtggaggaagagagaggctgccatgctcttcgatgttgaggtagcaggaggcgaaaatgcctgtcacgtcgccattgtagtcggcaaaacgttctgttgcccattgggtggctacgttctgtgccactccgtaggcgttgagcagatagcccatgcgcatgatatattcgttgtggtgatgttctgcatattccacaccttcatccgcaaggcgacggcaggcagcgtcaatcactctttgcagacggcggtggtttttggcagatgccgggctatgcttgggcgcggcagtttccgcattccggctgaaaggtacggcatcgggattgaaaaacagatgctcgtcgtgtgcaagtccgcttaggcgggtggcatttttgcatttcaggtcacattcaagtccggtgagacgggtgtagtactcgttaatggcggtaaaagtgcgggtgtggagtcggtggtttttctcgcagttgtcggtgagtccggtgtatcggcagagtaaccggataccatgtccgctgatggtgacatattgcagcaaggtgtgcttgtcggctttgagcagttccaaacactgttccatgcgttcgggcggcacgtggtctatgtctaccggacagattcctgtccactcgctgatgtttgctttctgttttccgccttcgaagcgcacgctgacggcaaagcaggggcaggatgctttttcgcgtgcagcggcggtgacttgtttttgctccagataatagcgatgcttttcggtgtgttcgatcaccgcctgattgtcgcggagaaggctgatgattgttttcaggggaacctctatcgggcaggtgtccgcataacctttaaaaagactgactaaaatattttccattgtcatttgtatgaattttaaataatggctgtaaaggtggggataataaccggaactttatggctgcgtgttttcctcatgtggaaaacatgagaccgatatttaactgaaattaacttcgctggcttgagttgttacgcacgactatttaataattacgttttaaaaacgataaacaatgaagcaaaatttcgctcccaatgccgaattgggagaactcctggccttgttgcaggaaacggtgcaggtgtgtggcaagcatcttacggatcgtgtcatttgccagtgcaccggcatgagtagtaaaacttatactgctttaaaaggggctccgtttcaaacctcttgccgtactatacagtgatatgtttctacttggacgaacttatcgtccgaaaagactctgataccctgcgtattgtactgaaagaactgtacgaacgtctcaaactggattattgcaacaggtagtgccttgacaccctggcatcgctcttgcagaacttttctttatgtgcacgcatgaagaatacatgtttgagacttggataaaaaaaactctctcctgcgcgcgtgagggaaagttatacaagggtggtgacagggtgtcacaaactactatttttttgagtgttaaattattgaatatcagataaaaatgaaaatatcagtagtaactgtttgctacaatgctgcggacacgattgaaaagaccatgctgtccgtacttaatcagacgtatcatgacatagagtatattattattgatggcggcagcactgatggcactgttgaaattatccggaaatatgctgacagaattgcgtactgggtgagcgaaccggacaaggggatttatgatgcgatgaataaggggataaaggtggcgacgggggaatatatatatttcttaggggctgatgatctcttatgtgagaacgtatttttttatattgctccattgttaacacgtacgcatactatttattatggaaatgtatatatggttaatcagaagataaattatgatggaccattttctcgttataagttagctattcataacatatgccatcaagctatattgtatcatcgtagtgtttatgatgaacgattatatgatgtggactatcgattatttgcggattatgtttttaatattcaatcgtggggagataagcgtgttaaatttgtgtatttaccttttgttatagctgattttaatgattgtggaagatcttctattaggaagaacgatttgagattcttaaagaataattctatgattattttacaaaatttaggaattacatgttttgtatattatcaggttgtacatttttatttgaaagtaaagtcaatattcttaagcaatgtctaatcttgattttatagaattagcatatgagcattgggaagcgttgcttttttgcatatctttttcttttatttgttatattctaatatttaaaagttggtatatatctattttagatccttttgtcttatcggcggtactgtctgcatgtggatttggggtcgtgattttcctttttctatgtaatgctattcaattaaaatactttgtaagctatttattgacccaatttgcttttattagtggcatgttgctatttaatagaataggatttagaaaattgaagaataaattctatattcttgatgaaaataaactgttacgaataatatacattatagttatcttctctgttgttataattcaatttataatatataaaaatattggtattcctctatttatggattcgcgtttggaagcttcctctggtggaagtggagcagggctattattccgatttactactgtttggggaactttggctttacttttttcattttataatatagaaaagaaaaataaacagcgatatatagcatattgtttcatactattttctataataacttctattctgaatggatctaaagctggtttttggggacttgtaactactttctttctatatagtgtgatatgttcagatcatattctttgtcaaattaggaaacatgaaaaaaaaattctgctaataggtattgtggcaggaagttttgttgtatttatcagtagtaacgatgaaataaattttattcagtcattgatagcattcggtgaacgatttattttttctggtgatgtatattggcagacttatcctaatggctatatagaacgaatagatggaagtcgaccatttgaaactatttttgttgatattttaggatcttatagaattattccttggaatgaactcccagaacctatggggatatccattttccgtatgcatgtagatactgatttattgacgggacctaaccctagacataatgtcatgggatatgtactttttggtatgtatgggagcatactcttttcgttcctattgggagcaataattggaactatacatgctttgttttataaggcatgtgatttgaatctacttattaaatttcttatagtgttgtcttatggatatatatttggtttggaaggagatgtaagttatactattagtttatacaattctttatttattgttatgcttgtcctgttctttttaatactttgttattatttgattttatctattcttagggtgaaaaggtgtatgtgtaaatgattttttattctattcagtatgaaaaaaaaagtaatttgtgtcttagttctctataattcgaatgtcgaattactttctaaagttatctctgccatattgcctcaggttgatttgttatggatttcggataattctatcgaaccgttacatctaccatttattgatgaaaaaacttcttgtattatataccgaaaaatgccaggtaatattggtattgcagcagctcagaattatggtgtaaggtatgctattgagaacaattttgattatttattttttttagatcaagatagtatatctcctgcgaatattatcaatgaactattgttgcagtatgattacttgtgttcaaatttcatgactgttggtgctattggtccaagagcatttaatcgttgtgaaaataaggaatatagggggaatgttaaaaagggaaagaaaataaacaatgagattacagaagtttctgaattaattagctccgcctcattgatagctatttcgaattttgaaaaggttggattaatggatgaaacgttatttattgatggtgttgatcatgaatggtgttggcgtgctaatttgagaatgggtgggcgtttttttatagtagaaactataaaattgagtcatcatttaggagaaggggatcgccatttcttatggaagaaagttcctatacctacttgtttcagaacctattatcagtatcgtaattattttattttattacggcgtaattatgttccgatttattggaaagtctctaatggaataaagtatatggtaaaacttttttattatcctctgtgtgtgccgcctcgacttctctatataaaaaacatatggaaagggattcgtgatggcattatattagcatatagatttaacatattacctatgtggaagaaataatggctatggttattaaaaacgagatactgttgcaatgatttgaatatctatttatttataacaagattactcctttaattcatgtttttattattttattcatcaaaggcgcttgactaagtaaaatatggagacttttttcatcaataattgtgactgtttctcaatgatgagggcattatattattttagtacatgttttataaaaacagtttcttctatgcgacatcttaagattgaacactaaattaggaaataggataaattcccaaaaacttgatataataatgaacttatatattttataatgaaattttccgtacttctgtctgtttataacaaagagaatcctgagtatttgaaagagagtttagaaagtgtattttctcaaacattgttgccatcggaagttgttttgataaaagatggaccattgactgacgaacttaacaaggtgatagacttgtatacaaagtactattcttatctaaaagttttttcattagcagataatcaagggttaggaaaggcattgaatgagggactgaaacattgctcttttgatatcgttgttcgtatggatactgatgatattgctaaaccaaaacgttttgaaaaacaattggctgttttaaaaatgtatcaggatgtggatgttgtaagtgcttgggttgaggaatttgaaaaggacgtttctgatataaagtctgtaagaaaattgccagaatttcataatgctatccaaaagtttgctaaatatcgaaatccgataaatcatccggtagcggcatttcgtaaaagtgcagtactatctgtggggagttatcgccatttccctttatttgaagattactatttatgggtgcgtatgctgatgaatggtgctaaattttataatattcaagaaagtttgttgtatttccgcttttcttcgaaagtgttcaaaagacgtggtggatggaaatatgctataaatgaatttcgttttcagaaaatgttaaggcagttacattttatatcattcccccaatatataaggaatatttttgttcgttttttgacccgaattatccctaattctttgaggaaatttgtgtataaaacaatactccgataaaatatggactacaaagcagttgatatgcagaaaattatcgattatatagcttctttttatggtgctgtttcggtagatgatattattcaaaattccggtgctgacaagttccgcgtataccccgccttgtttgaactggagcaggccggatatatcgaagtagtggagcgtgaagagctcggagcaccattggtggtacgtaggcggagagatgcttcacaagtgtagtatgacattatgtgatgcagtgtgatactggtaaatgacgggtaacagcggttactttgttttaggcgcagccgaaatcgctttttagaagtggtttcggctgtttttattgggaatatcatatatcactcatctctaaggtaaagaatagtgcagagagagcatttagacttggcgcaatatgcgtttaaagacccttataattttagtttttggggtactgtggcattacaatgtgagcttgatatagagaagaatcttactcggcgtattactgactttctttaggaaatgggtaagggcttttgcgtttattggtcgccagtatcatttaacggtagatggtgatgattattatattgatatataacttatgccggtacagccattaattcacaccctattgaacgtattgtttctataatatcttcaaaacgtttcttagacggcttttttgttccgcttacatattgagcaaacaaactctgagaaatatctaagcgtcgtgctatggcagcagcattcaattcaggatgagctataaataaatcatacagaggattagatttcctttcctgaaagaatccttcaaaactcaaatcttcatcaagctctctccaatgtattccgtcatggctcgttgtgaaatttgcgcgctgcgcaggagtagcccattttagcctttggaaatcagaaaacttctcacatgcctccttcccgtcagtggtacgtatccatacctctgtatcagttaaccataccttttcaactatgatattttccatagccacttattttgatttattaaaaaatttattccaatgctctgctattacttcttgattttcttctataactgattctacaagtttcagctcagatgacttcaagccattatttttgattaatgtaactggaaataaagtaatttagcacttatatctcctttgattacaggaacgtgtataggctcatggtcattagcgtaaaacataaaacgaaaaccaaataaaatcgccgctaactattctatttttcttgtactaaaattatagtctccgtaatttttctgactaagggtcaattttctgtcttatttttttagtcctccaaattgtattttagcttttgatatttgcgaattgtttcccgttgaaggctttcaagtgtgctgatctctatggatagttggcggagcttgggattagcctctttgagaattcgtgctgttttataatcatagatttccggtactatttctccgtttcttttacattcgttcagtaggtaggaagcgcaggcaatataatgctctttgagggttttgcgtcttttttcgagtagcgggcggtaagctttatcctcattgtatatgcgttgatagaaaccgtctaaggctactttgcggtcttttttttgttccgtattggtggctcttttgtataaagaatcgagggtgatatactccgggtaggatttcagtagtgtttcaacttcttttttagtcttttcataggccaatctctgaggttccagttcttcaggctttatggtagtggcaagttgtaccagccggggttcttgattgaagtttgtaattttgtagagttttttgcaatactcaatgtacttttctgttatttcccaattgtactgcaaagtcttttcttgcaaatcagtctgtatgtttgccagtgcattttctaattgagcgatttcaatttgtagcgaatctgtcttggaaagggactgtgctgttatcggcaataggcagcaaagagtaaagaccgctgatagaatgtttcttttcatgatattagatgtttgggttagtaatgaaagcaaatataaattctttactttataattccaataattcctttggttttttgaaggataagctgtgcgggtgtttttatagtctatttttgattagataaggatattagacagacaagatcaatattataataaaactgatgaaaacttccttaaataaagaacgcccctcaagtatgctgtcttgcgacgcgcctgagaggcttattatcttttgttattaaaacatctgccttttaatttgttacaaagatacgcatttttatctaaactgcaatgtctttttctcactatttcttgttattccatattatttcattttcccagttctcgaaaaatcccattgcattaagtgaaataatgtcctcattctctgttaataacgcttttaatttttttttgaatggcgatgtcggattggcagtctgtaacatatagttcagcatacacaggaaataatatagcttgctccttttggctgtatctggattgctgatccaatcaagggttttagaaaaagaaagtttttcagggactatattcaagtctctgttccaaagtctggcatgatgtgcacagatattacgaacataattgattgtatgaagccacgaacagaatgtttttggaggtaatgcgaaataggcggcaataccatttatatctgcacgttgcttcagccctgtgcatatgcgtgaaagatgattgaagtacatcacttcaatactcatccaagatggaggattttccggtttgtcatatttgtctctgtagtgttgaataaatacttctgccttgttgttatgtagttgttccttgatgtgtttttgaatgtcgttatatacgtctattgtaacggtcttcccgttacgtagggttacgagtgccggaggattaaaaatatcttgtctgtcttgccaatgtgaaccatatttatggctgagttgatagattatttgtgtacgaatggctatttcaagccgctcaatggcatcaaagactaatatacgcagttttctgtcaaatacatacaagttgtatatcatctcccaagtgattccatcacgaaacgtatcaagaattattccattttcactttgtttgtatggtagcatataagcgctgaggcggtagtaactgatattagcaagatgcctttgggctcgtctttcgtcagaaaaaattaggcctcttgatttcagtagttcaatctgttccgtatatgttaatggtgctttattgtaggtattcatatttctgtttttttagtaactgcaaagatacgatatttaagtcgtttaatttttgtgctcaatctcatttttcttcgtatctttgtgctccaaataattaacacctctgtttctatgcaagaaaagattattattcttgatttcggttcacagaccacgcagcttatcggtcgtcgtgttcgcgagctgaatgtatattgcgaaattgtgccttacaacaaatttcctcagggagatgagagtgtaaagggagttattctttcgggcagcccgttttccgtatatgatgagagtgcgtttaaaatagatttaaacgagattcgcggtaaataccctgtattgggaatttgctacggtgcacagttcatcgcttataccaatggtggaaaggttgagcctgcgggtagtcgtgaatacggacgtgcacatctgaattcttttgataaaggcaatgtgcttttcaagggagtgaaggagaacacacaagtatggatgagtcatggtgacactatcacagcaattcctgacaacttcaaaacgatagcttcgacagataaagtgaagattgccgcttatcaggtggaaggcgagaagatgtggggtgttcagttccacccggaagtgttccatagcgaggacggcacgcagatgctgaaaaactttgttgtggaagtgtgcggttgcaaacaggattggagcgctgcatcattcattgaaactaccgttgcccaactgaaagaacagcttggagatgacaaagtggtgcttggcctgagtggcggagtggattcttccgttgctgccgtactgctgaatcgtgctatcggtaagaacctgacttgtatcttcgtggatcatggcatgctgcgtaagaatgagttcaagaatgtgttgcacgattatgagtgtctgggactgaacgtagtaggcgtggacgcaagtgccaaattctttgcggagctggcaggagtgaccgagccggaacgaaaacgcaagattataggaaagggatttattgatgtgtttgatgaagaagcccataagataaaagatgtaaagtggctggcacagggtactatctatccggattgcattgagtcgctttctatcaccggaacggttatcaagagccatcacaatgtgggaggattgcccgaaaaaatgcatttgaagctgtgcgagccgttgcgtctgttgtttaaggacgaagttcgccgcgtaggacgcgagctgggcatgccggatcatctgattacccgccatcctttccccggaccggggttggctgtgcgtatcttgggtgatataactccggaaaaggtgcgtatcttgcaagatgcggacgatatcttcattcagggcttgcgcgactggaaggtgaaggatgccgacggaaatgaaacggtgctttatcatcaggtttggcaggcgggagttatcctgcttccggtgcagtctgtcggtgtaatgggagatgaacgtacgtatgaacgtgctgttgccttgcgtgctgttacttctaccgatgccatgactgccgactgggcgcatctgccttatgagttcttgggcaaggtttccaatgatattatcaacaaggtgaaaggggtgaatcgcgtaacctacgatatctcctcaaaaccgccttccacaattgaatgggaataagtaataccagaaaaggggatgaatttcattttgaattcatccccttttagtttcttacgtgaggcagtgcatcactctcatgcaagtatcagattttccgcatagggtattacgatttctccgcggtgcagctctatcaatcctctgtcctgcatgttgttgagagcctttgatatccctgcgcgagtctcgttgactatttgggctaaatcttccatcttgattttcagtactttctttcccgacgggcgttctacgtggctgaggatgaaatgggaaatacgtgcttcaagatcgttgcctgccaccttccataagcggttatgcagcatttgggcgcggttgctcaccatgttcatatagttcaggcggaatatctcatagctgaatagctctttcatcacgaacgctttgctgatgctgaccgtatgtacctccgtattggcgcggtgtgtagaagcataggatgtgttcatgccgaacatggaataaggttcgatcaggtagggagccggaaaatattccgtaaagctgtaagaagcatcagcggataatgtggaagatgctacttctccttttagaatgaacaccagttcgtggcaggaagaatctttttgcaaaagaagctctcccggtttatgtttcgtgaaatgcaattttaccttttccaagatacaggtgaagtcctcttgggcaagtccttgaaaaaggggtaattgtaatagtgtatcgaacattgtttccatatagtttctgtattatggttcaagaacaaaagtaggtataatcgctctctgccgtaaacacttaccctctctttttgttttttttattatttcttaaacgtgctattcattcagctttaagaaattttgcagaatgtataaaaatagattatctttgcagaaaagaaaaaggaggaacgtatgttttcagcatttaattggcaacaaatgaccagcgcttttattgtgttgtttgccgtaatagatattataggctctattcctattatcatcaacctgaaagagaaaggaaaagacgtaaatgcattaaaagctacgttgatatcgtttgcactgttgataggctttttctatgcaggtgatatgatgctgaaactgtttcacgtagacatcgagtcgtttgccgtagcaggtgcgtttgtcatcttcctgatgtcgttggagatgattctcgatattgagatatttaagaatcaggggcctataaaggaggctacattggtgccgctggtgtttccgttattggcgggagccggagcattcaccacgttgctctctttgcgtgccgagtatgccagtgtcaacatcatcattgcgctggtgctgaatatgatatgggtgtattttgttgtcagcatgacgggacgcgtggagcgttttctcggtaagggcggaatttatattatccgcaagttcttcggcattatcctgctggcgatttccgtacgcttgtttatggcaaatatatcattgctgttggagagttttcataattaagacggtcttttttattactgtccggggaggaggggtgtgcatctttcccttcactgttttttcctcttcctcaattatcctcttttgggactttctttcatattgtgggatgaatagttagaaatagcggtataatcgcagtcagaactatttgtcgggcatcatatttcatatattgtacacgaattgatgattttcgtacaatgctatgaattatttacttgaaaaacgaaaaaaaactgactttttattttgcgtataggctgaaatttgtacttttgagcatcgctacaagttgtgtagcgcgcatacctgaaataattaacctttaaataatgcacaactatgagttatttacgatttgacaagaccttgatggttaatctgcaagaatctttgccaagggagatacttcggactaacaaatcgggggcctatcattgtacgacaattgtagattgtaacacacgaaaatatcatgggttgttggtgattcccgttcccaacctggatgatgaaaaccatgtgctgctgtcttctttggatgaaacggtaattcaacatggcgcagagtttaatctgggtttgcacaaatatcaaggaaacaacttcagcccgaacgggcataagtatatccgagaatttgactgtgagcatatcccggcaacaacttaccgcgtaggaggggtaatcctccgtaaagagaaaatttttgtacatcacgagaaccggattctaattcgttataccttggtggatgcccattcggcaacaacactccggttccgcccttttctggcatttcgcagcgtgcgtgaatatacgcacgaaaatgcacaggccaaccgcgactatcaaccggtggaaaacggcatcaagacctgtatgtatcccggatacccggaactttatatgcaactgaacaaaaagaatgaatttcattatcagccggactggtatcgcggcattgaatatccgaaggaacaggaacgcggatatgattttaatgaagacctgtatgtgcccggctattttgaggtggacataaagaaaggtgaaagcattgtgttctcagcaggtatctcggagatttcaccgcgcaaactgaaacagacctttgaggcggaagcggaagaccgtactccgcgggatagcttctaccactgtctgaaaaattcggcccaccaattccataacaaacaaggagaggagcattatatacttgcaggctacccctggttcaagtgtcgtgcacgcgacttgtttatttctttgcccggcctgactttggcggtggacgaacaatcggaatttgaagatgttatgaaaactgcagagaaggctgtccgcgattttatggaagataggccggtgggctataaaatctatgaaatggagcatccggatgtgctcttatgggcggtgtgggctttgcagcagtatgctaaggaaacatcgcgtgagctgtgccggcagaagtatggcaaactgttggaggacattatgaattatattcgcggccgtaagcatgacaacctgttcttgcacgaaaacggtttgctttatgcaaacggtaaggagaaagccgttacatggatgaactctactgccaacgggcatcctgtaattcctcgtaccggttatatcgtagaggtgaacgctttgtggtataatgccttgcgctttgttgcagatttagttcgtgagggcggaaacgatatatttgcggacgaattggatgatctggccgaaatggcgggaaaatcctttgtagaggttttccgcaatgaatacggttatctgtttgactacgtggacggctatatgatggattggagtgtccgccccaacatgatatttgctgtggcttttgactactctccactggatcgcgcacagaaaaaacaggtactcgacattgtgacaaaagagttgctgactccgaaaggcctgcgtactttaagccctaagagcgggggatacaatcctaattatgtaggccctcaggtccaaagggattatgcatatcatcagggcacagcatggccatggctcatgggattctacatggaggcgtatctgcgcatttataagatgagcggcatttcgtttgtggaacgctatctgattggttttgaagatgagatgacgagccattgcataggatcgctgcccgaattgttcgacggaaatccgccgttcaaaggcaggggagcggtgtcatttgccatgaatgtggcggaaattctgcgtatcttgaaattgttgtctaaatataatttataggaggaggaacgaagatgaaagttttaatgtttggttgggaatttcctcccaaaatatatggcggtcttgcagttgcatcatacggaatcaccaaaggactgagcttgcagggggatgtggaaacgactttctgtatgccaaagcccacaggtgaggaagagaatttcttgaatataataggcatgaaccaagtgcctatcgtgtggcgtgatgttaattatgattatttgaagtcacgtttgtcaacgatgagtccggaacagtattatgcgttacgcgatcatatttattcggatttctcttatatgcatgtcaatgacttggggtgtatggactttgccggcggttatccgggaaatctgcacgaagaaatcaataacttttcaatcatagccggagttgtggcacgtcagcaggaattcgacattattcatgctcacgactggctgacataccctgccggagtacatgcgaaaatggtaagtggcaagccgctctgcatccatgtgcatgcaacggactttgaccgttcgcgcggcaaggtgaatcctaccgtttattctatggagaagaacggaatggattatgcagactgcatcatgtgtgtatcggagcttactcgccgcacagtgataaatgagtatcatcaggatccgcgaaaggtgtttgccatgcataatgcggtgtatccgctttcgcaggagttgcaggatattccgcgcccggatcattccaaagagaaggtggttaccttcctcggacgtatcactatgcagaaaggcccggaatactttgtggaagccgcagcattggtgttgcaacgtacccgtaatatacgtttcgtaatggcaggttcgggcgatatgctgaatgccatgataaacctggctgccgaacggggcattgccgaccgtttccatttccccggtttcatgaagggcaagcaggtgtatgaggtttataagaatagtgacgtattcgttatgccttccgtttccgagcctttcggtatcgcgccgttggaagccatgcagtgcggaacgccttccatcatctccaagcagtcaggatgtggtgagattctcgataaggtgataaaaaccgattattgggacattcatgctatggccgatgctatctactccatctgtattaatccgtctcttttccgctatcttcaggaggagggtaagaaggaagtggacggaataacctgggaaaaggtaggtttgagaattcgtgctctttatgaggatgtgttaagaaactatggtaaataataaaacaataaatactaatgagaactatctgtctttattttgagatacatcaaattatacatctgaaacgttatcgtttctttgatatcggtacaaatcattattactatgatgattatgctaatgagacaagtataaatgaagttgctgaacgctcgtatattcccgccttgaatacgctcattgaaatggtgaagaactcggacggtgcgttcaaggtggctttgtccatttccggtgtggcattggagcagttggaaatccatgcgcctgccgtaatcgacctgttgcaccagctcaatgatacgggatgctgcgagttcttggccgagccatactctcatggactttcttctttggctaatgaggattgctttaaggaagaggtaatgcgccagagtgccaagatgaaacagatgttcggtaaggctccgaaggtgttccgtaattccagtctgatctataatgacgagatcggtgcggtagtggcaagtatgggcttcaagggtatgctgaccgagggggctaaacatgtgcttggctggaagagtccgcactatgtttatcactgcaatatgaacccgaatctgaaactgttgttgcgtgatttcaagttgtcggatgacatcagtctgcgtttctctaattccgaatggagtgaatatccgttgtttgccgataagtacattagctggattgatgcattcccgcaagaagaacaggttatcaacatatttatggaactttgttcattgggtatgtcacagcctttgtcttccaatattctggaattcctgaaagcgttgcctgcatgcgcaaaggaaaagggtatcactttctcaactcctacggagattgtcactaagttgaagtctgtttcgcagttggatgttccatatcctatgtcgtgggtggatgaggagagagatacaagttgctggctgggtaacgtgatgcaacgtgaggctttcaataagctgtatagcgtagccgaacgtgtacatatctgcgatgaccgccgtatcaagcaagactgggactatttgcaggcaagcaataacttccgttttatgacaaccaagaatagcggtgtggggttgaatcgcggcatctatgaatctccttatgacgcatttaccaattacatgaatattctgggcgatttcatcaaacgtgttgactctctctatccgatagatatcgataatgaggaactgaatgctttgctgactactatcaaaaatcaaggcgacgaaatagaagagttacacaaagagttggaaaaaacacagcataagctggagaaggagaagacagcagagaagaagaaggaagcaaaggctgctgccaaaactgctcctaaagctgccgtaaaggctgctgtcaagaaaactgttgctaaaaagtcggttgccaagaaagcagaaccgaagaaaaaggctgaataggctcattcttctgctatatacataaaagaactcccgttccaatacttggaacgggagttcttttatgtatctgattgatagggattctatttattgaaagaagtatgggtgacttctatcttcaaagtgctgccgccaaatgccggatcaccgcctttgagcttggcatatgtcggtttcaagtcgtgttggatgccaatcatggaagggttgttactgcttgtatcgtatgtcacaactacggggatcagcactactttgttccagttttttccttcgccttcgttccattcatcttcccatgctgcttcgtcccatgctgctcctgccgcttctttcgctttttgtttggcagcctttttctcattgatacaagtggaaaccaagcgggctatgtttttgaaggtgtattggttggtttctacgctgttatgggttgccacaaaagaagtaacattgtctgcaagttcattgttgacaaagaaagattccatgtctttttggcgtaccagcagaactgtttgtggcgcactcatgctgaatttatattcctgattgtcctgcttgtagttcgtaaaagtcagcttgaccgcattcaacgtatcattagctaacttcttggctatttcatcataaggcagagttgcttctgtgaagataccggccggtgatttgagatagctccagcctttttcattgtcattgtttactttctctgccagcttttctgagttctcaaatttattggcttgaatcacttctttggtagaggcaaaagcaactgccgtagcaaggtatgtggagtctgtgccggcttcaccatttttgtctgtgacttttttggtcagcttaactcctaaactgtccacatagtggaatcggaattgcatttgcaggtctacgcggtctacatagagaatggttccgtcaccgtagtctgtttgcaggtaaacacctttgaatacattttcgataaacttatcagagttgtcaaaaaagtcattcttcttttcttgatattgccggttcaatttcaaaatattatttcccagctctttatccaatgggaaagtgatgttggggtaataagttgagttaccgtttgaatcggttgcttttcttacggagtcgggcacagaggtatcataagctgtatatgctttttttcctaaagcctttgattcgtgatatagctttgtatcgatattggtatatcggtatttatcaggatctttacgcactttcagccattcgtcgttcaattcgtatgcactcattctgcatgcatttaaggagtctccgaaccagctggaatagtagactactaactggattttctccacttcgtctttcaccattgttcctttgccgctttttccgtctgcgctttcttcatatacggcagggaatgtgaaattctccgtacaattcaattcggctaagaagctggcttcgtagtttccaaatcctttgggatcagggtctgtgaacttaccgatatatcctgtacttgtcttggagtaaactttatctgcaagcatggattttgtgctaacgtcaaatgtttctgttttagccgaaattccgtctgaatcgggcagcatatccatacccaacgtcccggtgttatcgtcgcatccgtacaaagacaggagtgctaaaagtaatactcctaaatattttactttcataattcttcgtcttgaaatcaacttattcttgttcagctccccaaacctgatcgtagaagtcgttgcaggcatctgcgaagttttcaggagattgatagcctaagataggtttaccggcttggcgggcatactccatgagctcctcatttacatgttcgctttgctggataataccatcagagtagtctattgccaatttgcaaagagcaatatagtctatcggttcttttaagtcggcaatatccttcttgttgatgcctttcagcaggagtttgctggtgaagtcggaatgaaatggctgtttgaagtcattgtcatacagtgaaaagaccactttggcgtctctgaatgaaggttcgtctttatacgcctttttaatatatagcggagccagtgctgtcatccagccatgacagtggataacgtccggacaccaacgcaatttctttactgtttccaatactccacgagcatagaaaatggcacgtgcatcattatcctcgtattcaacaccgttctcgtcaatcacttgcaggcggttttggaagtaatcatcgttgtcgatgaaataaacctgcatgcgggcggattgtatggatgctaccttaatgataagcggatggtcggtatcgtcgatgataaggttcataccggagagacgtatcacttcgtgcagttgatttctgcgctcattgatgttcccccacttgggcataaacgttctgatttctctgcctttttcttggattgcttgcggcaggtttctgccaacaagggacatctcggattctgaaacgtaaggggtaatttcttgtgttataaataaaaccttgttcgcctttgtcataataacaatgttctcaattattctgcaaagatataaaaaaaatcgggcaataacgcaaacagggctcgcctataattccttatgaattgttaaccggttgtatatcaatgaaaaataggcgcggatacacctctgaagccgggacaacttttgcattaatttacgatatttcttctttatatggtaaataatagcttattttgcaccgtttttgcaaacaacttaagttattatataaccaataaaatggaaatagtacatactatcaaggacttgcaggccggactttcggctatgagagcccaaagtaaaaaagtgggtttagtgcctacaatgggagccttgcatgccggtcatgcttcattggtaaaacgttgtgtggcagagaatgatgccgcagtggtaagtgtttttgtgaatccgactcagtttaatgatcagaatgatttggccaaatatcctcgtacgctggaggctgattgtcgtttgctggaagagtgtggggctgcttttgtttttgcccctacggtggaagagatgtatccggaaccggatacacgccggttcagctacgctcctttggatactgtgatggagggggctttccggccggggcactttaatggtgtgtgtcagattgtgagcaaactatttgatgcggtgaagccggatcgcgcttatttcggcgagaaggatttccagcagttggccattatccgcgaaatggtgcgccggatgaattatccattggagatcgtgggttgccctattgtgcgtgaggaggatggactggctttgagcagccgtaacgcccgcttgtctgacgaagaacgcaaaaatgctttaaaaatctcgcagactttatttgaaagtcgtacctttgcagcctcgcatacagtcgctgaaacacagaggtttgtggaagatgccattgcagcggctcccggtttgcgcctggagtattttgaactggtggacggcaatacgttgcagaagattgccaattgggaagatacttcctatgcagtgggatgtattacggtgttctgtggagaagtccgtctgattgacaatatcaagtataaggagtaataaacataaaaaaagaacaatcttatgatgattgaagtgttgaagtcgaaaatccattgtgcccgcgttacggaggctaacctcaactatatggggagcatcaccattgacgaggatttgatggatgccgccaacatgattgccggcgaaaaggtttacattgccgacaataataacggtgagcgttttgaaacttatatcattaaaggcgagcgcggttcgggcaaaatatgtttgaacggtgcggcggcccgtaaggtccagccggacgatattgtaattatcatgtcgtatgcattgatggactttgaggaagccaagacgtttaagccgacagtgatctttcctgatccggcaacaaataaagtggtgaagtaagaacaggtttgaaatcctactcataagagcttttgttcagcctttttgagtatgttttcctctttctctttcgctacctgttctcaggagggtagcagctgaaaatgaaaaaagaaaaagtcccgtttactaattgtgaacgggactttctttttttatggtggagcgtttatttcttcaattgctcattcatggctgcagcagctttccggccgtcacccatagcaaggattacggtagcgccaccgcgaacaatgtcgccgccggcgtaaatggtcggaatggacgactgcatactatcatttacggcaatcgttcctttgcgacctaattcaagtcctttgatagagctgggaacaatagggttgggggatacgcccacactgacaatggcaaggtctatatcaatcgtttcagtggctcccggaatgggaacaggactacggcgcccggaggcatcgggttcgcccaattccatcttttgaaggatgacctgcttaacttttccttgctcatcggcaatgtattctatcggattgtgaagtgtcaggaattccactccttcttctttggcatgttttacttcttcgatgcgggcaggcatttcttcctctgaacgtcggtaaataatcatggcgcgttctgcacccaggcggcgggctgtacggacagagtccatggctgtgttgccgccgccgataacggctacgcatttgccaaaaggcacaggtgtatcagagtcctcgctggcggcatccataagattgacacgcgtcaaatattcattggatgacaggatgttgatggagttttctccggggatgttcatgaagttcggcagtccggcgccggaagcaacgaatatgcctttgaatccttcttcctccagttgctctacgcttaatgtcttgccgatgatgcagtctttgatgaacttcacgcccatttgggcaaggttctcgatttcgacatccaccaccttgttgggcaaacggaattcggggataccatatttcaatacaccgccaatctcgtgcagcgcctcgaatacggtaacgtcgtatccgtattttgccatgtctccggcgaaagagagcccggcggggcctgaaccgattacggcaatcttgatgccattcttttctttgatttccggtacggagatttgcccgctttcgcgttcatagtccgcggcaaagcgttccaaatagccgatagctaccggcttttcattcatcttcaggtggatgcacttggattcgcattgcttctcttgtggacagacacgaccgcaaacagcgggaagcgcactggtctctttcagtgttttggcggcttcaaggaattcaccgcgttctatattcttgatgaaacgtgggatgtctattcctaccggacaaccttctgtgcagcccggattggcgcagtccagacaacgtttcgcttctgtcagtgcctgttccttggtcaatccctggtttacttcttctttgcggctgtgggaacggtagtctgcatccaattcgttcatctccacgcgagggatcgctgtgcgttctttggctttcatggatttgcgcaattcctgacgccaagcggcattgcggcttttttcatccggctccgctgtgctttctccggttgcctggcatgtctgtggctcttccagtttgtgcatttcttcgcgctcaatgcttttgaatgctcccatgcgtttcagcatttcgtcgaagtctacctggtgaccgtcaaattcaggtccgtctacacatacgaatttggtcttgccgccgatggtgatacggcaggcgccgcacatgcctgttccgtctaccatgattgtgtttagagagacatcggtgggtatttcgtatttcttcgtcagcaaacaaacaaatttcatcattatggcggggccaatgcagaagcatttgtcaactttctcgcgtttgatgacatcttctacaccttctgttaccaatcctttacggccgtatgaaccgtcgtcagtcatgataatgacttcgtcggagctttcacgcatttccttttcaaggataatcagttctttggtgcggcctgccaatactgtgattacacgattgccggcagctttcaatgcctgtacgatagggagcatcggagctactcccacaccaccgccggcgcaaactacggtgccgaaattttcaatatgggtggcttgtcccagcggaccaacaacatcggttatataatcaccttcattgagttcgcacaggcgggtagacgagagacccacttcctgcacaaccaaagtgatagttccctttacgggatcggcagaggctatggtcagtggcatgcgttcgcctttttcacctacgcgtactattacaaagtgtcctgccttacgtgacttagcaattaacggtgcttcaattactaatttgaagaccttttctgaaaaatgctctttgctaatgattttattcattatctaataattttgttggtataattacgtaatctctttcagattgatagattatgcaaagatactgcttatttattaataacaaagaatgtgaggggaaaaaagaatggatgcaggacgaaatatgatattgcaaatcgggcacagatttcaagaatcctgccggttctgtccattgaagaaccatgctgtttcttgtaatctgtgcccgaaatataatggatggaaacttttcttagtctatcacctcgaatcctgtatacggaaccagcgccttcgggatacggataccttccggtgtctggttgttttccaatagagctgctacgatgcgcggcagggccaatgcggagccgtttaatgtgtggcaaagctctgttttcttttctgctgtgcggtaacggcatttcaggcgattggcctggtaggtatcgaagttggatactgaactgacttccagccagcgtttctgtgcctcggaatagacctcgaagtcgaagcagagagcagcggtaaagctcatgtcgccgccacataaacgcaggatgcgataaggcaactcaagcttctggagcaatccttctacgtggttcagcatctcctgatgggattctttggagtgttccggcttgtcgatgcgcactaattctactttggagaattcgtgcaggcggttcagtccgcgtacgtctttaccgtatgagccggcttcgcgacggaaacattgcgtgtaagcgcagttcttgataggcagttgcttttcgtccaaaatcacgtcgcgatagatgttcgttacgggaacttcggctgtcgggatcaggtataaatcatctacttcgcaatggtacatttgtccttctttgtcgggcagctgacctgtgccatagccggaagcggcgttcactaccgttggcggcattatctccgtatagcccgacttgcgtgcttcatccaggaagaaattgataagtgcacgctgaagctgtgcgcctttgcccttatacacagggaaacctgcacctgtgattttcacacctaagtcaaaatctatcaaatcatatttctttgccagttcccagtgggggagcgcgtctttaggtagttcggtctccatgccgcccattttctctaccacattgtcgtcggcgcctacgccttcgggcacgctgtcataagggatgttggggattgtatagaggaggttttgcaagtcggttgcagcttggtccatttcttcttgcagggccttgttggcttctttcaattcggccacccggttcttggcggtttccgcctcatctttcttgccttctttcatcaacagtccgatggacttggaaagggaattgacttccgacaggttcttatctaagattgtttgggtattgcgtcgtttgttgttcgtttccagcacttgcccgattgtttctttggcatttttgaagtgcttcttttccagaccgcggattacggcgtcggtgttgtctgtaatttgtttaatggtaagcatatcttatacttgttattatgtttttttattactgcaaagatagagaaaatgcttattcattgtatgaaaaagtataataaacagcagaaaatatgaaaataaggtgcttttttgaatgaatagtgcgataataaagaaagggatgcaatcaaaccagattgcatccctttctttattattcttttatccggaaacttatgcttctgcgttttcggcaggaataacagaaacagatcttctgtctgctttacctactttgaactgtacagttccgtctaccaaggcgaaaagagtgtggtctttacccataccgatgttgttacccggatggaattcagtacctctttgacgaacgatgatgttacctgctttgcaagcttcgccaccaaatatcttaacgcctaatctcttactctgtgattcgcggccgttcttagaactaccgacaccttttttatgtgccatttcttcttacttttttaattgattaagctactacttccttaattgttaactctgtgaattgctgacgatgaccgttcagtttacgataacctt

SEQ ID NO: 455 - DNA, 12954 bp, unidentified
  source 1..12954: mol_type = unassigned DNA
ttatttatccttttcacggatttccacgcgacgaatctttccactgatggtctttggaagttcttctacaaactctatgacacgtgggtacttgtacggagcagtcacacgcttcacatgatcttgtaactcctttaccaactcaggtccttccttacccttaaaagttttagaaaggacaatcgtcgcctttaccacctgaccacggatttcatcaggcacaccggtaatggcacattccacaacagccggatgagtcatcaaagcactttccacctcgaacgggcctatacgataacccgaactcttgatcacatcatcagcacgacctacaaaccaaaaataaccatcctcatcacgccaagccacatcacctgtataataaataccatcatgccaagcatcttccgttaattccgaagcacgataatattctttgaacaatcccaatggtttacccctatctgtacgaataacaatctgaccttgttctccatcttcagcagaacgcccgtcgtgagtcaacaaatctatatcatattgaggattaggtacccccatacttccaggtttaggctccatccagggaaaagtacctaaagtcaacgtggtttccgtttgtccaaaaccttccatcagacgaatacctgtgattttcttgaacgtttcatatacagaatagttcaaagcctctcccgccgtagtacagtattccaaagaagaaagatcatatttactaatgtcctccttaattaaaaaacgataaatagtgggaggagcacataaagaagtgatatgataatcctgaatctttccaagaatatctgccggtgtaaatttctcatgatcatacacaaaaatattggctcctgctatcatctgtccataaagttttccccaaacagctttcccccaacctgtatcggcaatggtaagatgaagactgtcacgatgcaaattatgccagaaactggcagttacaatatgtcccaaaggatatgtaaaatcatgtgccaccatcttaggttctcctgtagtacccgaagtgaaatacatcaatgaagtatcttcattcgtattaggatgttccggtttaacaaaaggagtagccttctcaatacctttatgaaaatcttcaaaaccctccggaatatccggtcctacactgaccaacttttttactgaaggacaatcgggcatggcatctataatatgctttgttatcacatcttctcctgcagctacaatcatcttgatatcagcagcattacaacgatacacgatatcctttttcgtcaacagatgagtcgcaggaataaccacagctcctaatttatgcaaggcaataatagagtaccagaactcataacgacgctttaaaataagcatcaccatatcgccatgaccaataccaaggctctgaaaataagaagcagtcatatccgtatactttttcaagtcagcataagtatattgtatatgctcccctttatcattagtccataacaatgctttcttatcgggttcttcggcagcccaagcatctactatatcataaccaaaattaaaattttcagggattttaatctttaaattctttataaagtcctcttgtgaggtaaatgtggtctgttctaagaatttttctaccataatcttattcaattaaaaattgagaactaaaaattagaaatattatgcggtcaatgacaacacagtctttttaatctcaatttattataatattactgccaagaatttcacagtcttatcgtccaatgccagcataccatgtggaatagaagaatcaaaataaagactgtcacctggattcaagatcaattcttttccatttatattaagtaacattcttccttcaataaccaaattgaattcttgtccctcatgtgagttaaaatgaatcggagtattttccggtttcggttctacagttacaataaaaggatcagccttacgcccacgaaaaccggaagccaatgactgatatttatacgccttggtacgctctaccgacactcctgaaccacaacgagtcagaaaataagaactcatcttaggttcttcaccaaacattaatacatccaatgcaataccgtatttacgggctattttctgtaaagcactgacagaaatatctttctccccgctttccatacccaaatactcttccactgaaagctggcaacttttagccacttcatcaggagtcagttccagaacgtctcttaatccctggagacgctcagctatttgttttatctggtcactcataatcttattgttttatgcctcaaagataatgaagatttgagaattcctagcaaagtttcattaagtttcgaagaaaactatctaacagacaataaaattgcacaaacacgcttacaatgagcacaaacaaaccttttacagaaagtgatcattcaaatactttcatttgaaactataaaataatctttgtcccataacctttcttataatcatatttatacttactttgcagaaaaatgaaatagaatgaattatacgaatgaacaaatcagacgccaagaccgtctgttagaaaaagaaaaagctatcagcttattgaaaaacggagaatacggagttttgtccatgcaagatgaagaaaacggcgcttatggagttcctatcaattatgtatggaacaagaaaaattccatttacattcactgtgctcccgaaggacgaaaattacattgtatcaaacgctgcaacaccgtttctttctgtattataggaaagactcatatcatatccaatcaattcacaactgaatatgagagtattatattgaaatgtcgggcatacattggcttaaatgaagaagaacgaataaacgctttacatttattaatagaaaaatactctccaaacgacaaagtaattggtaaccaatatgcccaaaaatcttttcacagaacagaaattatccgactagatatagaagaggcaagcggaaaatgcaaacatatacctatgaaataagtattaaaagttcattgaactatcctctaatattctcaactattattcccccgagaaaagagagttaaaaggagataattgagaaagacgaaaagaaacacgatacaacttttataaaggatcattgagaaaattacatgctataaaaacattattccggcaaaacaatattaccggaataaattttctttatgttatcctttttcagattaggtatttggaaaagcaaccatcttaacaaccataaaagttgtacacattataaattatttctcattctttctacaaaatcatgaataatggaatacaaaatctccaaagaattctcctcataacaaagagtttccaaaggacaccaacctgtccggttcctattctgaatacgaggaactacctgcatacaatctagctttatattcgcacgccgcaataaaaccaatgcaggttcactgataatatctgtataaacttcctgtactctacctaataccatcaaaacagcagcagcttttcctatcaccttgtcagcaatctgagccccacgcagaaaagccggatccgtattcaacaaatcatacaaatcagttattccacgctgtgtaaaagtgctgatttccttattctttattacacaagaataattaccttcatgcaacagtttgattaatttatccattttttatttcattcaaataacacgatgcatttcgtgtccttccacataaatggcactgaacggacgtgccggacaaagattttcacaagcgccacaaccgatgcaacgttctgtattcacaaccggtattttaggtgaactttcatcattctcatctttaggtatcatttgaatagcaccagtaggacaatgacgagcacaatttccacaacttaccttatccgtattcactatacaattttgagcaatccacacggcatgccctatttgaatagccgacttttcagccaaactagtcaaatgaatggcatcagtaggacatacttctgcacatttcgcacattcggggcgacaatatccacgttcataggacatctcaggctgcatcaaccgcttcagatcacccgatggacgcaatacctgattagggcacaccgacacacaaagctgacaagccgtacaatgctgtgcaaaatgacgaagacctctcgctcctgcaggaacaatagaagtggcacgtttaggattctttttatcaataagaggcgccaatcctccatccactttcttttcctgcgctttcattacggcacttgtagcaagtaaagcagaaaccgtaaaaaaatttcgccgcgacgtattcaccttttctgaatttgaagacgattgagaagctgactgacctgtttcttctcttctcaaaacctgctttttctgaattattgctccagatacatactttatcgcatcctgacgacatttacctaaacaatccatacaagcaacacaacgggaataatcaatctcatgtgctttgggattaatgcaggaagacttgcaattacgagcacaaagtccgcaaccattacatttagacgtatcaataaccggtttaaaataagaatatctagataagagtcccaatactgtacccaccggacaaatggtattgcaataagttcttcctccacgccatgccaaaataaaaagcactatcacagtacccactgcaactacaaaagtagaaagacctttcatccaaacatctaccgaataaaaagcataactgtctacacgctccgcccatagggcaagtacattgttcccccactgatacaaaggtgtcagcaggttagaaatgatacggccgtatgcactgtaaggagcaatcaatgccgtcaatgaaactacccctgctaccaaagcgacgataaacaccgccaataccccatagcgcaaccacgacaaagcaggcgagtagtggaaacgattcttctttacccttcccgaaacccaggaaataatatcttgaaacacacctaacgggcaaacaaccgaacaatagacacgccccaaaagcaacgtcaacaaaacaagggctatcatcacccccacattcagtgccagcacggcaggaagaaactgtattttcgccatccagccaaaccaactatgcacagttcctgtaaaatccagaaacagcaacgtgatcattgtaaagaacaaaagggcggcgacgagtcttattttacgtaacataagcattcgttattttatcatgtttatccattccattataaagtctcttgtttcaactgctccacatatgcgtctatacgatgcagttctttgggaatatcaatactttgagggcaatgcgggttacactggttacatccggtacaatgacttgcctgccgcagtttgggcacactacggtcataacctatcaggaaagcacgccgtgcacggcggtaattctcatcctgactgcttttaggcacatttccttcgttgacacatttattataatgcaccagaatcgccggaatatccaagccgtaaggacagggcatacaatatttgcagtcattgcaaggaatcgtagggaacttcagcatcaattgggctgtttcttccaagaactctttttcctcctcattcaaaggttctaagggagaataagtccgaaggttatcctgcaaatgttccatataagtcattccactcagcacacacaacacattgggatacgtaccggcaaaacggaatgcccacgatgccacactgttctccggacgacgctgcttcaagcgcgccaccagatggtcgttcagtttagacaaacgtcctcctaacagaggctccataatcacagctggaattccacgcttggccaactctccatacaaatattccgcattaacatttcgacccgaagcatggcgccaatctacatagttcatctgaatttgcacaaaatcccatttcacatccagcgacagcaaataatcaaacacttccaccgatccgtgaaatgaccatcccaaattacgaatacggccttcttcacgctcttttagtaaaaagtcaagaactccattgtcaatataacggtcatggaaagttttgatcccttcccctccacctacagaatgaagcaaataataatccagataatccgtctgcaattctttcatcgactgatggtacatcttgatggaattctcacgagtataattttgaaaattagacatctttgtcgcaatcaacagtctttcacgaggatgacgtttcaaagccacaccagtggccctttcagaaaatccctggcaataaacaggagatgtatcgaaataattcactccgtgagcgatagcataatccaccagctcattcaccgcatcctggtctatcacatttccatcactgtccggcgctggtttcaacggccagcgcatacatccatatcctaaaagtgaaacatgttctccctttggagaagtacgataagtcattttatcaacaggcacttcgcctaaaatagaagcctcagacgcatccgacttctcgccggatgcacaaccatacattgccaccgtagatgcaactgtactaacacccacaatttttagaaattctctacggttcatttcctttttgtctcttttgtccatagtcttttacttaaccttcctttatttactgtaaaccaccactatagcctgatcatcagttaatgcaaagttaattagaattcatgaaattccttgcaacacaaccttaataatcaaaacaactttaattacagaaagcaaatcactttttaattcacatagatcactattgaaaataattatttaaacaactgtatcatagggcggcctatccaaacctgcggttgtttcaagccaaaaataaaagcaactgtagaagcacaatcaaactgcatcatactttcatcaaaaattcctcctttttttacattctttccagcaataataaatggagtttccatttcttgcatcgtttttccaccatgccccttatttattcctccatgatcggctgtaacaataataatactattatcataaatacctgcctccttgatagcatctactatccgacctacatatccgtctaattctttcaattttgcataataagccggagtatcatgtccatccacatgacctacatggtcaggattatcaaaacaaattgcagtcaagaccggcttcttttctgtaatatacttacatgccatctcacatagagcagcgggatatagattatagtcaggagcctgcacatgataattcaaagccaaagtatctactagatatttaataccatcccactcatacaacactcctatttcagcatcaggaacagctttacgaagttcactgaaaatagttggaaatatatgatgctcatttactacacgtgaaggaagttcgggagttttagacccccattctgtatatccatggagttcaggtcctgcccccataaacatagaagcccagtttactgcacttgaagaaggaagcacactacgttttttcaaagtatagcaacctgcatccattaaagttttaacatttggcatctcagccttttccacactataagccccccaaccgtcaaggccaatcaagaacacatggtcggctttccaactctgagcaaagcaagaaaaagtaaagaatgctatcaatatagcaaataaacgattttttttcatagcaacttatatttttcagttatacatattatcttaacaattctccacactatgaaatgattggatactctccatcggataaacttccacttacacacaatatttcatcaagaaaggtggaaacgatatctaatcccaatattgggagatatccctataatatgaaaaattaaaagatgagcaagcgctggtttcctttctccaaacgcctgctcagttcaaatagagacataaaagctgatttccatcacagctccatcatacctattatctatttcagacaagccttcattgctttaatgatcgctgagtcaaacccttcgtgatccaattcattaatacccttgatagtcataccaccgggcgtacacaccttatctatttccacactgggatgagtatcattattcaatatcaaggaagcagcccctttcacagattgagcaaccattttctgtgcatctttcggataaattcctaattcaatacctgcctgcatagctgcctgaatatatttcaaaacatatgcgataccacatgaagtcaaagccgtagtagcagccatctgactttcaggaataagaatagccaatcctaattcattaaagatatccagcatcagttgttcttgttccttactggcgttacgactggatatcaaggtcatactttccagctgagatatagcagtattgggaatcagacggaatatagtctgttccgggcctacactcttcaccaattgctcaaaggttacaccgcctgcgatagaaactaatacttgttgaggagtcaaatgaatcacactcaatacctgatctatcaaccacggttttacagccagaataacgatatcggcatcctttatcgctttcgggttttccgttgttacattaatctccggataatccgcctgtagagtttccagacttccgctgaacggatcggctactgttacatcactcgcaggaatgatagtgccttgggcaaggccgcgagcaatagcccctcccatatttcccgcaccaataattgctactttcatattattaaagattaagtctatagctacaaagataagggaaaaaaaggagaagaacgtattatgaaaagctaaaaataaaattactttgaagaagattaaatcaaaaagcctcgccggaaccgaaatgtttcctgacgagacctcattttctttcgtagattattatcccttttgaatctccagcttataccaacactttacgaaagcgttcaagaaattcatcagcctctgccatagtaaggcacaaaggcggaagcagacgaatcacattagtaccactgactccggtaaatactttctgttcgaacagcaaacgctgacgcaattccttaatcggttcttcaaattccataccgatcatcaaaccttcgccacgcacctctttaatctgtgagaattgtttcaattctttcagcagatgagcacctaccttggcagcattctctaccagattctcacctttcataacatcaagcaccgcgatagcagcagcacaagctaggtggttaccaccaaaagtggttcccaattgtccatataccggcttgaatttcggactgatcaggacaccagccatcggaaagccattaccaatcccctttgctaccgtaattatatcgggacggatacctgcatgttggtgagcaaaaaatttaccgctacgcccgtagccggattgtatttcatccaaaacaagggctgcatccacttcttcgcaagccttactcagttctttcaagaattttacttccggaacctgaataccgcctactccttgaataccttcaataatcaccgcacagacatctccttttgccaattccgctttagctgcttctatatcgttcaaaggcagataagtcacatgcccattgtcattgattggggctataattttcggattgtgggttacctccactgccagtgaagtacgtccgtgaaatgctttgcaaaaagaaagcacacggttgcgaccattgtaaaaagaagccagtttcaacgcattttcattagcttcagctccactgtttatcaaaaacaattgataatcatcataacccgaaagtttccctaaacggtctgccacttcctgctgtagcttgttaaccaccgaattggaataaaatcccaactgtgcaacctgcttgcttatcatttccacataatatggatgtgcgtgaccgatagaaataaccgcatgaccaccatacaaatcaaggtattccgtaccttggtcatcccatacatgacaaccttttcctttgacaatatttatgtcaaaaagaggatatacatcaaataatttcataaactcttctttattaaaaagcagacggtttcaacctcaaccctacggtttcttccaaattgaacatgagattcatattatgaaccgcttgtccgcttgcccccttcaacaagttgtcaatgcaagagataaccagcagcttatcgccatttttctccaaatgaatcaaacacttgttggtgttcaccacctgcttcaaatctatatttttgtctacaatatgaacgaaagaatcctcggcataatagtcttgatacatcttcaccagttcttccagttccaccttgcatttgactaccagagtagcaaagataccacgcgggaaatcaccccggtaaggaataaaatctatttcagcattaaagctgttttgcaactgtttcaatgattgcttgatttcgggaacatgctgatgagaaaacggtttataaatgctcatattattattacgccaactgaaatgactggtagcacccggtttcacccctgcccctgtacttccggtaatggcatttaccattacatcctcgttcagtaacagatgtttggctaacggcaataaacccaattgaatacaagtggcaaaacatcccggattggccacgtgcttgctatggcagatagcacgacggttcagttccggcaaaccataaatgaagtcatggtcatcactcttgatacggtagtccatactgaggtctatgattttcaaatcctcgggtacattgtgactatccataaacttctttgtatctccatgagccgtacagaagaacaatacatcaatctcatccagaggaagttcgtctgtaaaaaccaaatccgtttcaccatagagtccctcatgtacgtcggtaatcttattgccagcgttactgctgctatttataaactttatgtctacatcagggtgattaatcagcagacgaatcaattcgcccgccgtataacctgccccaccgataattcctgctttaatcatacttattaaatttcttcgtccttgtggttattataataaacacgcaaaggtgtagaagtcactttgataaagcctttagcatcttctgctgtccatcccttctgcatttcaccatattcaccaaatttggtcttcaccagatcgtcttttgattcaacacccacagtagagaatgaaagcggacggagttccaagatagctgtaccatttacattacgctgagactcctgcaacattgcctcaatatcgcgcattaccggttccagatactgactttcatgcaagaacattccgtaccaattggcaacctggtctttccaatattgctgccacttgctcaacgtatatttttcaaggaaacgatgggcaccgataatcagcataggagcagcagcctcgaatcctacacgccctttgataccgataatggtatccccaacgtgcatgtcgcggccgataccgtagggcgcaccgatctcctccactttttgaatagccttgataggatcatcaaacttctcgtcattaacagctttcagttcacctttttcaaatgtaagacgaagttgttcgcttccttccttggtcacctgttttaaataagcactttcgggcaaaccctgcgcagagtccaatatttccccaccgcagatagaagtcccccaaagacctacattataagaatatttcaattttgtaaagtcagcggcaaaaccatgttcgttcaaataatcgatttcctgctgacggcttaatgccatgtcacgggtcaatgtaatgatctcaactcccggagccagtaccaaaaaagtcatatcgaaacgaatctggtcattacccgcaccagtcgagccgtgtgcgatagcgtccgcacctatttcattagcataacgcgctatagccaacccttggaagatacgttcagaacttacagaaataggataagtaccattacggagcacattaccgaataccatatatttcaagctcttctcatagtattcctgggtcacatccaatgtcacatacttcacagcacccagtttgtaagcgttctcttcgttctgcttcagctgctcctcactgaaaccacccgtgtttgcacaagctgcatacacttcataccctttttccttagccagatacattacagtgaaagaggtatcaagccccccgctgaatgccactactacttttttcttcttttcttccataatgatattattttaattgagaattaaaaattgaaaactgagaaataagtacatgaatgcgcagccatcttttaattcttaatttttaattcttaatttttaatttattaaatagtgtcttcttcgtgcaaagccggatcgtaaagcatggctgtacaaatacagaacttacggttcttcgccactaatatatcgtgattgatacagccttcacaacctttccaaaaggcctcatcatcagtcagttcattgaaagttacaggaacatatcccagttctgtattcattttcattaccgccgcgccactggtcagactgaatatctttgctttaggccatcgtagacgtgccaatcggaacgaagccgcctttatacgcttggccaaacctattccacgataattaggatgcacaatcaatcccgaggttgctacatattgcttgtttccccatgactcaatataggtaaatcctgcaaaatcatctccacataaagcaataatcgcctttccttctttcatctttgtagtcacatattcatgtgtgcgttctgcaatgcctgttccgcgtaccttagcagcttctctaatagtatctaaaattttatcaacgtaaacttcatgtgaggcatctgccaccatcacatccacttgtttagcatccat

SEQ ID NO: 456 - DNA, 23327 bp, unidentified
  source 1..23327: mol_type = unassigned DNA
tattattttaccgtcacgattacattttccctcgacttcagtaccaaggtagtcatgcattccaagtagccggagaaaagtctcaagttctcctgttctatttaactctatgagtattctttctaaatcatcattgagaacatctctgataacctcttccaattccaataattcattaagttcaagcattatttgtgcccccttcctcaatgatatgtgccattctgttctttgctttttcaagcttcagctgaagcattgtaatttcatcttttacagtcttatatttgtcagcaatctctttctgtttttcaattggcggaattggaataacaagcttcgtcaactgctcaactccgatatttggaatcgttgcaccaaccgttatactccttagtgccgctgtaccttgctcacttccaaagaatgctgcaagataataaggatctgccttttcttcatcgagctctataatataaagatttccgttacctaatatcctttgtccttcctttacttctgcaacagcaatcttgtaaggatatccattcttagaaagaataaggcagtgatttgataaacaatacttatcatttttcttatcaatagacttcaaataaggtaattccttatcaataagtccatttttgatgttagccagcatcaaatactgcatgtctgtaggcacagtagtagtaatttcatctaatgccctagcattaagctgggctccacgagtaattcttttaatcacatcgccaaatgccattccatctgctacatcatggacaatatatcgattcatacttaacacataatcgttatctcgaagctgctctgcacttacatacatgcttatatcagagtcgttcttagttgcattaataataagagaaatgttttcataactcagttcatttactcttcttccctttacaaagagttcggaagcatcaaccaagcgcactcctttattattacggctaaaaactatcattgaagttgcaatagctgttcctgcaaataacctagccggtaaagcaattacacattcaatcaaaccattctctatgaaatagcttctaattgctgaatcactctgattccatgtacttccattagtcatgatgcctacagcttttccgtcctctgaaagcatatcaaccattaagctattgaacagccaatcagatgatgtgacttttgaaacagatggtattctcttttccaactgctccagatactgatttccaaaacctaattctttaatcctcattccaaacggataatttgcaaaaatcttatcaaagcgtctgccattatcttcgtctaatcccagttcaaagatgtccttagcttcaaaagtaatcttcccttctgataaatcgttgtaaatctttgctattgcaatagaagatacaagcttatcgaatccatatgcttctacagttggatgacttttaacaacatcagccacaacagctcctgcaccacagcagaaatctgcgaatttatcattggcttttatctcaagtaattcttcagccaattttcctaagctttcaggtgtcatcatcggatcagataaatcccttaagagtgaaactaaatagaagattttctgctcatgagcttttgtaagttccattaattccttccagtattcagaaatataaaagtcttctgcgactttcttaatgtcagcatctattctttcatcttcttcaaatgaatatgtggcgtgtgcactgcaatcaaatgactttgccaaaaggtaagcagccaccgtaacatctccaaacactccaaaaaatccttttcccgccatcgaagtcttgcttcttaaaattaattcaatttcatctttgcaaacaaatatttcatcccaaacagctttaagttccggtgtaagctgattagctgtttcattgtcaataaagttaccttttacttcattaatttcgtttaacaacgcaatccctctttcttggttttgtataacctatttatttcttgattatagattaccaagtttcattcagtttgtcaatatcttttttggttttcagaaccaacattttgaaattgaagttgggttagattaaatagtgatttttaatctgaattttaaactaatacgtgatatattaactccccagaaaaggtgccgccgatagactgctgccccccctgaaattgtttagataagaatagccgctcaacttcatcattgggcgactatttttgtgtcttattattatacttaccaaagaaataccctccacagatggtcaaccgcctactgttatggtggcatccaatgaaattttatcatagcgcattggcattttaatgtaatattactctaaattgacaagactttctttacaatttgaagctcaactattttgccatctactaaagtaatcttcaaaatatcattgtagctcataattgatactatttcattcctgtttaaaacctgcaggctgccaattctaatcactgatttctccactgatatctcctgtggagagctgtagaagagacgaatggtgccatcatcatacattaaaacactatattctgataaatcattaattgaaactcggtttattgacatttctttctccatactgtaaataatacttaataatttcaacactaactgaacaatggttccataacatcctttacttctctatctgatatattatcaataaccattttaattatttcattttctaacacagacttcctagtttcagatacgctccataaatattcaacaaatgcataaaatttattcttagctttttccctcatttagtaaattgcactctttatatttagtatcatttattacatttacatcactttgcaacttttttctatagtaagctctcaatattccaatgctaaattttaattaacgcttacatctagcttaattgcattgccaattgttgtggtcaagcaccaatttaatccatttttaaaactcaaggattaccctatccccatgtgatgcaataatcctctaatatactgctttatacatggtatcggaaaacataatatacttgccatatcaaatctcatttttttatttaatttaaaaaaaagagttcttcttttaggcattttcataggtttttcaagttgatgattgcatagaattgcatgttctaaatctacatcatataaagaaatattggccatatctagcaatttttttccttttccagtttgacataaaaccaaagaaattccatttaatacttgttttttatctaacattgacccccatgagtcaccaaccgtaatatcggacactcttttaattgttgcaaaatcacatttatagcaattatcagtgtatatttttccattaagaaataaatttgaatatgtatctctctgagctcgacaatcaatttttttattatcaatatataaattaaaatctgtattctttctaaatgttattgatttagcttcagataatactattttattctcaattaaatactcctctaataattttacagatggtgttccatgacaaatcaaatcaatagtatacaattttttttctaattcatttcctaaatataatcttaatccagcaacttgacatggcaaacctacaaacaagactttattattttttttaagcaataattctatttctttataaacatttgaacaatcactttttacatattttgatcctgcaaattctttcatcacatttgtatttttcatttcacaaaatataaattctccatcaataaatttgcatagatatacaaaaccttcattttttttaaaagctgtagcaatagccgaaatcatccctcctgacgctgctaatgccctcgcatcagcattattattccatccctgtctccaaattatagggtcaatcaaatttggctttttcactttttgacagactttcatacataagccacaatttatacacaaatcttgatttatgtatgcattataattttgcaaagaatcacaaatttttattgcatttactgggcaactatttttgcatgcagcgcacgcagtacattcattaatttgacataccgttttcatgttttactaatcactcctattaataaagattttgttaaatgcaggctttttttattaattagtaaaaaaatacaatataaaatcaatatacaaaaaaataacaaaatatcattttttataaacgttactgccaatatcattataattactataaacattacttcacatattaatgtataaataattgaataattcattatttttgctagatgcatttctgatacaatacttctaaatgcaattgcacataccattgacaataacaccattacactattttttaaacaaaatccacaaatactacaaaacactatactaaatataaaagatgagatattaattttacgcaaatatttttcctctcgtaaaaccttaaaataagtattacacaataaattcatctttgcatcaaaaaaacatattggaagagctaaaatgagataattcaagctatttgaatactccggtaaccatatttgcattattacttttactggaatagacacaacaaaaatcataggtaaaacgactgataaaacactcctaaatttataatatatatttttttgttgttctttagaaacctgtcttaatgaaggaaaaagtaccatactcacttgtgaaataaacataattgcaaaagacgctaaagaaagcactaatgaaaattttgcaaattcctcaattccccaaacataatctattatcattctaccaattccaagaattaacatacttgcaacgcttgcaatagtcaagttaaatcccaccctaacactttctatgtagcatcttattgattttcttattaatatatttttaacaaaaaatatttctttcccgtaatatatactatatatatacgatataaacttagaaataatatatgcgacaataaaccaaatataattatttattttaaataataaaagaaaaaataatagaaacataaaacatattttatctatcataaccgacttagaatatgtttttgtatcatttgttgcttggaaaatatatcccaaacaaaacgaagaattaaatataagcatatatataaccgtactgtataaaacaagttttctcgaaaaatccatattaaaaaaagaacaaatgattgcaaacacaactcctaatataagttgtacgaaaaaactaatccaaaatgcacctcctatttcattataattcaactcatcgtagttttttccaccatttagcaaatatataccatcattaaatccaaaatgaaaaaaaccaacatatgaagtgtaaaaaataaacaattgccaatacccaaaatcatttacagacaataccttaggtacaattattgacattagcgcacttaaaataaaagataacccctgcgcaacaaatgcatataataaattttttataaatatctttattctattattcaaacctcatgtacctcattattaaaatcataaatatatatacaaacatatactgtatattaaaataggcagaaataaaatgagctgctgtaatttgacgtagtatactatacgaaaaatacgcgtatgtcatagttctaatacctacatttttttcattcaaggcttttccaagcaaatgagttaaaaagaatcccattaaaaactctattatccatgttccgaataatccaaaatcactatagtagtctctaaatgctgtatatacatttgtcgaattaccatttttaaaataaacaaattcctttatagccgagcttatatttatattaataaatcttccaattaactgatacaaacttctaaatgtttcttctccaaacagtacagaccctttatttaatccatatgtattcttgagccactcatttaaagctgcaattcctgatccaaaatactcacctataatctgtaaaactgttactttttgagttttacccgttaacattcctaataaaataaatacaataccaacaataacaacacctgcacatataatttttatagcttttttattatatattctgaccggtccatttttcttgtataaacatattataatcacagatatactatacataaatatctggagaaatcctgttctaccagtacttaatatatataatataattacaggtaatattgcaatcacatatcttctctttaaagtttttattccattcttcacaacatctctaagtaaaaaagcaatatttacatacccaaaagcaataataaaatattcacatatagaaagaatcaaattgttttcaactctatcatacaaatatgctttccttgcataattcaaagcaaattcaccaccagcatatccagcaagttttgcaacagatataacatgtttatactcaaaaaaaatcactatagcactaaacagaaatactattaatactgtagattcttttactgtaaacatagcatcatcatttaatttgcatacacaatgtacaccatatgcattcgttttcttacaaaatcgctctcccaaaaacataaaaataagtgatcctaatattaaaaacattgtaagaactcctatttccactccccatccatttgcattcgctaaaaacacagctgaaacagtccaaaagagcatcaatgattgaattgaaacagataaaatattaaaatcatttatcgttaaaattagaataaataaaaatgtaaaaaaaagaaaaaatacgtaattcataatttcctacccataatcaatttaacttgttagatcacttatccacttctcgaaagagtacttaagaacaatttctgaatcaatttttttataatggcttgatacaaattcctttaaatcgtccaaagaatcccttcctaacaaaaaaatattatttttatcataaaatggttcttcaattattaattcatgattagtaattaattttttttcaaaataaagagcctctaatggtctaaatgataaccctgtatacggatccatatatagatctaatatacagttactattttgtattttttttaaaatttcgtagtatggtaaagcttttgaatattccatcttatcatgaatttgataatcatgatctggtacaatataaaaatctgttgatatattttgttgttccataatctctttatatttcattatccaatcgtaacgtcctttatctatcccaacaaagaaaacatcttttttttcactatcattgcataaaggcacttcagcaatataaaacggaacatggtattttaacccatattgtttactttcttctttagaataactccaaatttcattagcaccttttaccgagtctggtaaagctgatttcgataccggatttcgataccatactattatctttttctttggatgtttttttctaagaaattcaacatcagattttaaatcttctgaatcaaaaacgattatatagtcagaagaaattttttttaattcctcattataaatgaaattcacatttaaaaaatgaaaaatttttttcaatagcctaagtattctaataaaataagttttacttttataggtttctataacttccacattctttttaataatttctgtatcaataccttctacaattccatacttaacaattgttgctttattttcactattcttctccataatcatttaacaactcctctaaatatttctttgatgattcaatctcgccacatcctccaattactattttatcatccaacaaccttttaccatctattattaacctatcttttaaatcaaaacgagttgccaaagatactaaacgctcatttcctaatgaattcaattgaaatatatgcattggtttttgaaatattatagaaaatgaaaatccatgaaaagaattggttacaacttcttttgcattcattaaaagagaaatgaataatttcggatcaggattccaataaaacttatcaaccatattttttatatcaattaatgaatttgaaatagctacaactttacatttgcgctcacatgcgagtttctttgcataattataaatcgcaacatctcttctaaaagcataaactaaaatgtaatttttttctttaacatttgatttttcaccaaactgttgccatttttctttgctcaataaaaagactggatctactacacactctacattatttaggcctgctttgattaattgctctttaccactatactctctaactgaaattcgcttaaaatccttcagcatttttttgtaaaacggtatctgctgattaggaattttatcaattccaatactagcagcatatgatgtcttaattcctttattaacaaaacctaaaaaataattattatccttaccattatctagaattggattccatatctgatcacttcctgcaatgaatatttttttttcatcatctaaatttgaatttatacatccattcattctatctgtcaacttcagatatttctttttaaagctatcaaatgagatttttcctttaattaaatcataccacctaaataatactcttaatattctatccttttctattttcttagcatagacaggtatataatcgataattttcacattatagcctaattctataatataattttgtaatgcatatgcttgtaatactgcaccataattaattggccaatgacaagtaataatattaatttccttttttgtttttttcttcttatccattttattatcccatccttatatacctacatgatatatttatctaaaaatgattttattttatataactcagtccatacgctattgggaattgttcttcccaaattccactttaatttttcactaaagctcattgttatattacatgccttttttaaattataatcattattaatataattatatgaaaaatcttttctcttttttttattcgtacgactcatacacacaaacggattacaattgttccaatcgtatggcaattccatcttaaatttattaaaaccacattgttccaatactctttttcctttaaatgtatgtatagaaacaattgacattccttttttattaatatgctttaaatatttttccgcaccccaaaaatctcctattgtaatgtctccaacacgattttcacctttaaatttacattcataacacgataatctgccaaaagaattgtaaccatatgcataatacgatgtatcaaaaggtatcaaaactttatcattttcagtttttagacaaatgaatggaactgaccaatttttatatgtataacgttccacaatatttactatttctgtattatttttaattatttcattcttcaaactctcaagtaacttaggagaagtaacccccatacaaactaattgaacagtaattaatttttcatattccttacccaaaaatatctttaaagcagctatttcacatggaaccccaacaaataagactaatttttcttcacataaatctttcaaaacaagtttaaagatatttccttttctagcctgtgaatattttgttcctaataatttttgataatttttagtgtcaaccctcttgtatactgcactttcaaaattctttgtatattcgacaccatatataataccttgtctttctattatatatttatataatgcctgtgccataccgcccgatgcacttttacaacattgatcttccttatcaatatatccataatattcctcataaatttcattattaaaactaacatcgtttaacaaaggacaattattctcacattttccgcaattaacacatttacgattgtctatatagggttgtaagaacccttctttatcaggtttcatttctatagcatttgtcgggcaaactatagcacaattttcacatccacaacattttgttgcatcaatataactatttatcattagattctccccgaaatattttattataaaattcttgcaatttttctgtttctaattgtatattatacccagctaaatctaacaactcttttgtttcaacatttactcgatttttcaaaacttccaaagctttatcagcccattcacctgctgaacaattcaatgacaatgaacttatcaatggtgtaaccattatttccttagaaatacaatctgaacataaaattttcaattttgaatactgtgcttctactaacgaaacaggtaatccctcccacaatgacggaaataacataagatccgcggctgacagataatcatttacattactcttaactcccaaaaattttacattattttcaatattaagtttcttgactttttctttaatttcattaattaatgttccatctcctaatagaaaaagaacacaattatcatctctcttcaaaatttcagcaaaaatctctatgatgaaattgtgatttttttgtacctcaaatcttcctacatgaataaataattttttattgtcaacttcatatttatttcgaataagaattcttgcctccctgtcataaaaaaaatcactcgaatcaactgcattttttacaattttataatcactcggaaacatccactcgccagctagatctgaacatgcaaatctaacatcagaatatttatttacatatcttcgatttattttatgaattaaagttcctattttattttcagatttagtattatgactatgaataatcacacattttctatgttgtaatttacatataatagctggtagtatatatataagcgcattacaatgtatttgtacaatatcatattccttatgcattttaaaaaatttaattgtttcataaaaatttttaaaaatatgtctaggaaaggatggcactatatatatttttccaccatgtttttttatttcttttataaaagaattcttttctgatcttagcaaaaaatcaaactttatattttcgtttgtaatatgtgtcatataattaacaataagtgctggagcccctcctcgtccaaaactacttataacatgcaatattctaatcattttttttccctttactaatcatatttgatatatccaatatatttcttttcttttctacgaaaattattttaaaaattttagtaaaatcaatattctcaactaattcaaattctcgctttccattaaacaaaaattcttctgcttgaatctccttaagcaaatcaactatcctagaagcagattcattagcacaactgtataatttctttttataaataatcgaaaaaactgtagcatgaaatgaatcagttacaacataatcagcattttttatataccctatccattcagatggtcctgctgtcatatcacaataagcattaacggtgcccataacaaatggaactgctactactttcagtcctgttttttgttttaactttttaataatatctgtcatatatctagatggtgataactgatacacaaaaatataatccttaacttttggttctattgctattttatcccaatcatctttttctaaaagtaatgttggatccaagcctacaacaacctttttattcaaaactctctcaagaagtacacttgcacttttttctctaacatttaaagctgaaaaatcattcaataataaattatattctttcgctattttttccgaaaaagaatcaaatcctaaactagcagcataacttaatttcttcttactgtcattaacaaaatctaagaaataacaagtatcaaaattagtcaagttataattccaaacctgatcactcccagttataaaaaaatcatattctgaatttaaagctgatatagtaactttatctactttttttgtttttttaattaatttacgaaactttataaaatttttcttcctaggcaatctaataaatacatttatatttccaagtatatatctaattaaaccttttcgttttaaagcatctatactatatggccttgccaaatactcacattgataatcgatcacatcacactcatatccgatattttgtaatactttttgcatagcatagcattgcaacatcgccccataattatctgcattttgaaaagtaatcgtagctatctttttcatcaatttttccctatcgcatccattattattttgcttaattgatcaatactattttcaattctatacctacgtgcacactcttgattaaattttcccatttcttttcttaagactttatcactaataagtttctttaagccatctgtgtatccatctacatcatttggttcatatgaaaatccatttttaccatttttaacataatcttttattccctgtacattagatgtaattaatggtaaaccagctgccattgcttcaatagcggctattcccaacccttccctttgagatggatgtacaaatatatcagatacagataatatttccggaatatcatatctatgccctaataaacaaaactgatcttctatattcaattttttagccatttgcaataactcattttccaattctcctctaccacaaataatgtatttcaaatgggcatccttaatatttgcaattgcttttagaataaccatatgatttttcctttgctgtaattcccctacagaaataatcaatatatcatccttattaacccctaactcatgcctttttaaatcataattcacattaacatttgaatatttacctaaagacaagcctataccatctatatgatatactggaactttaaaatgtttctttgtaaaattataatcctcccaattaattactgttattaaatcacagaaatgagacataattttttctactggataatatatccaattctttttaggtgctcccttaaaaaaatgatatccatgcgctaaatacatcacgatacatccatttttgcgtgaccatcgcgctgccaacctagtcattactcccatgactggttcattcgtccaaatgaaatcataatttttttcattaattatattctttaaatccttataacccttaatattactaaaatttatcggatttctttcagttcttatctcaaaaaagttaactgtatttggaagtaattttttaattttattctcataatcttcttttttatatccttcagccttagaacatgcaatatcaacatttgcacctaactcaactaaatgaactacatgaggaactaaaaactgtatcatcattacatctgttgacgttaccaatatatttttatttttaatcatatattctagtcacccaatccttatattcctcaaccttacctctgacaacatccaaataagtcatatgcaaatctttagtcaacacacctgtgtccccatcaccaatcacatacttatcaatgctgagcaccggagtcatctccattgcagatccacacaggaatgcttcatcgcatgtatacagttctgttctatcaatggttctctctacaacaggaattcccttaccttttgcaatcttaataacagtgtctcttgtaatactctcaagcacactgtctgtcagctgtggcgtaataatagttccattctttacaataaagaaacaagaccccggtccctctgctacctttccagcttcatttaagaagatacaagtatcatagccattccggagagcttctctctgtcctacacggctattgatatagtttgcaccacacttaattctaggcgaaagtgtttcatcacttattcgtctccacgaagttacacatacattgagtccttttttattgtactctgcacttgtctttcctctgggaataggtgccacaaacatgtcaaccggaccatcagatccccatgaaccaaatccatctacaaacaaggtctgacgaaccgaaagattctcatcatactcattagccttgatcacatctacaaatgcttttttgaaatcctctttagtatatggacagtcaagctgtatcagctttgctgatctaagcagtctatcataatgatcatccagtctgaaagcatagagctgcttttcctcttcattccagtagcaagggattccctcaaatacattgagtccgaactgtgatgttggtgcaagtatattaatctttgcatcatttacatcaagtatctcacctttgaaccatattcttctgtgtgccacatcatatttcatttcacattcctccagtctattactccacgtcaggtaaatgtgccagcctgataatctctgcttcctctgcctgtgcagcctctgcatcgttcatggattcatccattttgttttcatatattttatcatgcttgaatgctttaaatacggattccaaacctatctttatatctgcaaagaatccatacttttcaaactgatctacatattcattatcatatgtaaccttttcatcccatgagatgtcatttctgccctttatctgagctagtccagtcaggcctgctttcactctgaaacgtttcttatatttcttatttaatgtttcaaaatctcctagctcataggttacacatggtcttgggccaaccactgacatatctcccataaaaatattaaacaactgtggcagttcatctatactgctgtcacgtagttttctgcccacctttgtcactcttggatcattctcataattgaataatccggctcccatggtctcagcatttacaaccatggatctgaatttcagcatttgaaatacccgtccatctttggttcttctgccctgcttgaagaaaaccggtccttttgaatctttttttatcattatagatacaacaatccataccggggtaagcagcacaatgcatatacccgaggaaactatatcaaatactcttttaacaaataaactaataaacttcattatttctgcccttaaaaattgaatgtatgaaatatatcatcaaatgtctcagctctttttataacctcaacgttcttaccacatatatcaagtaccggaaagtttggcaatataaatggtggcttcataacaagtgaataagaaccacaattactaatcacaaccgcatcaccaatagcaagctcccctgtataatccttataaagtacatctccttcaatacatgtaaatccaaccatgttcagtttcccatattctgtagtttcatttcccatatgaatcacttctatcggcggattaacaccagacatactgatattcttctgactacctagcacggaagctatatattgtcctcttacattcttaatggtctttactgttccaacgaacctcatacagtctccaaccactgctgagccaggctctataactagctccggcttaacgtccttgtctttgaaatattctgcaaaaactgttgctgccacctttgcatagtccttatattgaggaatatctgaagtaaactgttttttcagttcatcaggcatctttccaaacagtccgcctccaatatcaattctctccggtattattcctaatctgtctattaattcaaccattccctttgctctggtcggccaatactccacctgtcttttagcaaaatggcactggaaatttacaaaatgaagtttctcattattaattacaatatctaataccttcttaaagtcttcaccatctgtatcaaatccaaatcttgatacaacaccatccttcacatcataattgcatcgtattccaacattgaataccacatcacttttgtctgcaagtaattcaatatattcagcctcatctatggaatctatattcactgtcactccaagacttaaatattcctcgagcttttcgtgattctttattggtccattccaaataatattctttggattgactccacattttagcgcaagctctacttccatctcagatactgtctctgcatatccacccagctcatttactatcttgcaaagttttggagtgtaattcgtcttatatgaatatgcaatgttaaaattggagtagatactcgaaaaggcttcttttaactccaaaaaattatttctgaactgttcagaatccagtaaataaaaagcatctccaaattcttttcttaactctgtaattacttcctgatttattatcattagcttgctttcctcttttttaaaactattctttcaacaatctcttttacttcggttctatttttatctaagactgccctaggcatttgactcacttcttcttcatatgcctgtagcttttccatgtttattttaaaaatcttttctatttcagaaatatctgtgattatttcggtattacaaaagcttcttgataaaatcgcacgcgtagaaccaattctataatgttccattataattttctctgccggcaaatcaccgcatccaagtgatgcaatacctccaaaaccacacggaattccagcttgtttgattttattaattagcatctcaactgttccattagaaagcaattcaaacatgaagtctaatccatatgataaatgtaaatcatttaatcctatatgtatctcatccattccaccgttatgtaatacttcatctaacgattcagcggcctcttttgtttcaagcaataatgtggtcttacatctaccatctactgcattgagaaaagcatttacctcttcggctgtcttccacatgggaagcattatcatatctgctcctgctgatatgacatcatctatttccttttgtgagttttcattccagtgattaatgcgtacaagcatttccgacttcgttagcagtggctttattcgcctaatgtcatctatcgtatgcttagattttacagaattcattcccttctggcgctcttcttttccaaggctttctaaatcaacccagatcctgtccactccatatttttctgctattaatgcgacatctgcattgtttgtaatatacattaatttaagcgccattgtttttcctttcaagctatcctaatatctctccactcttcacccaggtgccatccttcaccctgacttccttcttcactatcgccccgcagtccacatgacagtacttcccgagcactgcgctcgaattaaccactccgttggatgccactatagtgaagtcacctagctctgcatcacctactctggctagagggagtattgctactccatcacctatctgtgccatagctgacacattggctgccggtgatactatactcggtatgaggaagttgtattccctgagcagctctgcgtaccttcgtctgagcttgttgtcaccgattgcgacaaatgcgcatggatactggctgcggtattttaacaaatcgctgcacctgcctatgatgttctctccctgcacgctgtcgtccaaaaagcttatttttctgaatacgtgaagcgacctggctatctcatatacatccctgccgtgtgtaccggctccgatgatgagcaggttaaactctgttggtctttttcttgtctttgccgcgagtatctcagcttctgctgcctgtcttttggctattacctcttctctggtctgggcataaacagaacggtatcttgcccgtccgtctgcgtttacccctacacggaatcttgcctcccaccgtccttcatttcgcttgtatattccttttgtcttctcttccaagttcttgtcccctatactattctatgctctaaacctctctaaaattagcatactataggatacgagtcaataaatttcttgtattatatgtgcttatcgttcatatttttcttgtcttttcttgtctttttagacatagatatggttttggacaaaaaaatcccggcccacatcaggatacttaactttatcctatgacgtgagccgggattgattgtctctttattctttttgtgttttagtcttaatgctccagatttgcaaacttcgtgtactcaggcagccatgcaaggtttacggtaccgattggaccgttacgctgtttagcgatgatgatctctgagatacccttgagctcggtgtccttgttgtagtagtcatcacgatagataaacatgacgacgtcggcatcctgctcgatagctcctgactctcgaaggtctgaaagcataggcctgtggtccggtcgctgctctacggctcgtgatagctgggagagtgccaccacagggactgaaagctctctggcgagtgccttaagtgaacgtgatatgtctgagatttcctgctgacgcgattctgagcctcgtcctgagcctgtcatgagctgcaggtaatcgatgataatgagctttaagtcatgttcgagcttgtatttacggcacttgcttcgaagttctgatatgctgatacccggagtgtcgtctatgatgagctcggagtctccgatgattccggctccctcgaccagcttttcccagtcggcatcagacagatttcctgtacgcagtgcctgcgcatctacctttgattcgagtgagaacagacggtttacgagctgttccttcgacatctcgagtgagaatatggctgtacacagatgtgcatgaaatgccacatgctgtgctatgttgagcacgaaggctgtctttcccattgacggacgggctgccacgagcacgaggtctgacggctgaagtcccgctgtcctgtagtcaaggtctatgaagcctgtcgggattcctgttactgtgccctcctgctgtgctgctttttcgattttctcgagggcattcatgactacagtacggattggcacgtagtcacctgtctgccttgtggaaagcagctcaaatacatcgtgttctgtcttgtcgagtacgctctctagcgattccttgccggcgtagcactcgttctctatgtcctctgtcacatggatcagctttcgctttatggcattttcttttacgatattggcatagtacttgatgttggcagaggtcggcacactggtgacgagagttctcacaaagtcaaggctttgtatttcctgcggcacatccttttcctttaaacggttctggagtgtaacgagatctacaggctgaccctctgtaaagagctcaaccatggtctcaaatatgatgccgtactgctgatgataaaaatcctccttaaggagcatctcgctggcggtcactatggcatccttgctcataatcatggagccgaccacggactgctctgcctcaaggctgtttggcattattcgtttgattaatgcttcttccaaggggattcctcctatccttcaactactgatactgtgaggtttgctgttacctttggatgaagcttgacaggcacctcatagtttccgagtgccttgattgactcgttaagctgcatctttttcttatcgagctctaagccatgctgctcctttgctgcagccgagatctccttggtggatatggagccgaaggtcctgccgccctctcctgagcgcagctttactactacctttgtgttctctactacctttgcgagtgcaagtgcactctcgtagttttcctgtgctaccttgtcagcgtgctggttctgaagctttaagtcatttaagttctttggagtagcctctactccgagctttttaggtatgatattgtttctggcgtagccgtcacttacgtttactatctcgccttttttgcctaatggttttacgtcctgtaataagattactttcattcttctatgtctccttcttttagcatttcgtccagtgtatcctgtatcatgcgctttgcctgcacgatagtaacgcctgtcagctgcgcgcctgccacatttaagtgtccgccaccgcccagcttctccatgattatctggacatttatctcgtcgattgaacgagagctgatataaatcttgtcattgtactccgtgagcacaaatgatgccttgattcctattatgttgagcagctcatttgctgcctgtgcaccgacgattgtcgggctctccacattctcgctagggcataccgatatggcaaacgagctcctgtatacctctgcatggcgtactgcctcggctcttgctttgtagcatgccatgtcatttctaagcatctttctgacgcgtgttacctctgcgcctgagcgcttcaaaaaggctgccgcctcaaatgtacgcacgcctgtcttcgtcataaagttgttggtgtcgatgaggattcctgcgtagatgcagtcggcctctgtcgcattgatcttgactccgtcgttgaagtactgcaatacctctgcaaccatctcacacgcacttgatgcatacggctcgatatatgagagtataggattctctattatctcgctgctttgtctgtggtggtcaaatacgactatctttcctgtctttctgaggagttcaggacactctgtgtagcttggcctgttggtgtccaccaccatgacaagcgtatccttgctcaccatctcaagagcctcttcgctgtttataaacatatccgccgggtagccctttgcctctgaaaatgtctccataagaggtctgactgagcttgtcggatcatttattactatctgtgcctttttgtcgagattcttggctgcacagtatatacctatgcctgctccaagcgagtctacatctgtgatgctatggcccatgataagcacgttctcacatgtctcaataatctcctgaagcgcctgtgccttgactctcgcctttacccttgtcttgctctccacctgctttgacttgccgccaaaatacaggatatcgtcatgatcctttataactacctgatcaccgcctcgtccgagggccaggtctatggcatttcgcgcatatacgtagttttcattatacttatcgctctttataccgattccgatactgagtgtgaccgccatctcgttgccaacctttatagccttgacctcatcgagcaccttgaacttgtcctccttcatgctgtcaagatacttgtacttgaacaccacgaagtatttgtcgttttctatctttctgacaagtccgtcatacttggcaaaatactggtttacacgcctgtcgataagtgcaacgagcagtgacctctttacgtcctctatgctgtcaagtgcctcatcatagttatcgatatacacaagcgctgagacctgcttctgctctgtgatttccttcttgcagtgataaagctccgactcatcaaatacgtacagcgccgtcaaaaactggtctgcttcatttgtgtcgattatctcattttcctctgcgatagagttgaaatatattcgcttgacggacagacggactatgctgtcctcctcctcatttactatcttgaagtctgtcggcgcatcactcttggtgagaagctctctggtcactgtcggaaaaagtgtcgtgatggatttgtgatattttttatccacacccattagctctgcgaatttgtcatttacccagagtatcttgccggagtactctagcagggcatacggcacctcaaactcattaagcagcctcttctgcaccgatgaatactgtgttgcaaagcttatcagctcatttgcaacgactgacttgcttctgacatacaaaaacagcacgagcgcaaagtaaaacactgtaaagcctaccatgccatagccaagccttctgtcatagcgcagtgctattccgtcagcacatatccacacaaacgtcagatatagcggccagcacatgtagcttttcagcctgcccttgaattttatttttttcttcattttactctccttatccccggtgcgctgcgctgatgctgccggtgcaacggttacggtttcgagaatgtactacaaatttataagttaccggtcacacctttgtgcagcccgcatcgattgatatacctactagagagtataccactttgtggggattattcctagtactatatttatcagtttggaattacaggagttcagggcaatcctgtgtaatctaagcacaattctatgcaatctaaaaagcaccgcatatatctgatattgatatgatacatgcgatgctttttgtgtgctctcatcttccggtattcattttaattaactataattacttctcagtcttatccgcagctatctctgcaattgactttgtaagacctgcaatcccctgaatctctgatgggatgattatctttgtagccttgccgtctgctgccttggcaaatgcctccaggctctttatctggagcactgcgttatccggatttgcctccttcaacatgcgaagtccgtctgcattggcctgctgtatcttgaggatagcctctgcctgacctgctgcctcctggattgttgcctccttctttgcctctgcgcgaaggatggctgcctgcttttcagcctcggcatcgaggatgactgactctttatttccctctgcaacaaggattgttgattttttctcaccctctgcacgaagaatggcctctcgtctctcacgctctgccttcatctgcttctccatggcatcctggatggcctttggaggtatgatgttcttgagctcgacacggtttaccttgatgccccatggatctgttgccacatcgagtgttgcgcgcatcttggtgttgattgtctcacggctggtgagtgtctcatcaagctctaaatctccgatgatgttacgaagtgttgtggctgtgaggttctcaattgccatgattggattctctactccgtatgcgtagagctttggatctgtaatctggaaatatactacagtgtctatctgcattgttacattatcctttgtgattacaggctgtggcgggaaatctaccacctgctcctttaagatgactttctttgctattctgtcgataaatggcaccttgaggtgaagtcctacgctccatgtggtgagatatcctcccaaacgctcaattaccattgcatgtgcctgtggcacgattttgatgcagtttaccagtactataagtacgattacgagtaacactgcaagtgctattaatccttccatatccgattaagcctcctttaccctttttacaattagttttactccgcttatctttactacctcgataagctcgccttttcttatgacctgggtctcgtcctgcggtctgactgtccactcctgaccgtttacaacggcttttcccgtctgcttcatgctgtcagcatcctcggtgagcacagctctttctccgaccagactgtccacgtttgtcttcactgtcctggaattgatgtacttcccggcccatggctttgtgag

SEQ ID NO: 457 - DNA, 24238 bp, unidentified
  source 1..24238: mol_type = unassigned DNA
tattcggttattgttaatgtccttatcgggggacagatttttgtccctcataccaatatcgggggacaatctggggacaaaaatacaataaaaatgtgtaactaagcagaaaacatggagaaaaagagaaaatacaatatcctaataaaacaactgatatagtgcattttacaggtttatattttctctttttatgcttttcttttctttatatcactttccgatgcaaaaatgttcgaaaatattcccaagtaccatatcgttcgtaacttcccctgcaatatcgcttagatggaaaatgcattcgcggatatcttgtgaaacaaaatctccggatagattttctgctaatccttgttggacccggtggatggcttccaaggcatgggtcaaagcctcgtaatggcgtatattcgtgacaatgacatcgttttgggtaactgtgggcaggttagcggcagagattagcatttgctgaagcttgtcaaggttggtacgccctttggcagagatggagatgcattgcacattagtagcggccacggtgaaactggggttggggatggttgaggcatcctgcaccagatcggccttgttgaatacgagaatgagccgtttcccttcgcaacggggaagtatctgggcagttagttgtggtatccgtgagacggcgttcgtggcatcaactatccagagcacgatttccgcctgctccaatttctggaaggttcgctcaattcctaggttctcgatggtgtcgttcgtttcgcgtatgcctgccgtatcaataaatcggaaagttatcccaccaagattgactgtgtcttctatcacatcgcgggttgtcccgtgtatgtcgcttacaatggctcgttcctcgtttagtagtgcattcaacagggtggatttaccagcgttcgtttcgccgatgatggctacgggcacgccgttcttgatggcattgcctacactgaaggattgtactaaacgggaaattacctgctctatgccgtctgctaggagacatagctcggagcggtcggcaaattccagttcttcgtggtcgctgaagtccagctccagttctatgagtgatgtgaagtgcagcaattggtcgcgtagtgaggccagctctttactgaacccaccgcgcatttggctcatggcgaggcggtgagtggcggcagaggtggaggcgatgaggtcggccacagcttcggcctggcttaggtccattttgccgcccaagaaggcccgttgcgtgtactcaccgggagctgccaggcggcaaccattaccgatgagcagttgcaacaccttctgaagaatatagctcgaaccgtggcacatgatttccgtgctatcctcgcccgtgtacgagtggggggcacggaataagcttacaagtacttcgtctatgatgttttcttcttcatggatatgaccgaaggtaagtgtgtatggcttggcatccttcagcttcttccccttccgggcaggggtaaatatgcgggatgttatctctatggcatccggtccggagacacggatgcatcctatggctcccccttgggcggtggctatggcacaaatggtatcttggttcattttatccggcttatttttattcagcaaagataatggtttctttacaaaaaagagagatggtgattcaacttatgggcttttatcgtaactttgtgcaaatcgataatggatagatgcttataaagcctaatccgcctctgtgcccattgtgggtatagcaggacattgctacactatacagaccagcaacgggcacgtcaagcaggatgtgatgaagtcattactaaaccctactcctaggattggctgaaggaaagggaggagcatttcttgaaggatacttagatacggtcgagtactgttttgataagagtatctatcgtattcttgtatcccgtgttagcttcttttatcaggcggttggcaatgaccatgcataccgtcatggccttgtgccccatcagacggctcaagcctgccagggcagaactttccatctcgaagttggtgatacggtagccgttgtattcaaatttttcaatcttctcattctgatgtgggtcggcaagcggcacgcgtaactcgcgtccttgaggtccgaagaagcccccggcggcaatcgttacgccacgtaccatgtcgttttgtgcgatgcggtctatcagttcagtgcttgcgtcaatgacgtagggggcaggggcacacatgttgccggaccatcccatatggttgaggaaggcacgctccatgggcaggtcgcacacggagttgcgtccggcatagaagttgagcagcccatcgaaaccaatggacttttcagaacatacgaatgtgcctaccggagtgtagggttgcaagccgccgcaggtgccgatacgtaccagctcaaggctacgcagacggggcttttcttcgcgcgtctcgaaatcgatgtttgccagggcatccagttcgttcatcacgatatcgatgttgtcacatccgataccggtggaaaccaccgtaatacgtttcccctggtaagtaccggtgatagtcttgaactcgcggctttccacttcacattccttgttctcgaaatgggaggcaaccagtgccacccgtccggggtcgcctaccaagatgactttgtctgccagccattcgggctttacgtgaagatgaaatacagaaccgtcttcattgatgatcagttcggaagaggcgaaatatttcttcatatgcttgaggctttaatcttttgtttataaatagaaacgccgggaaccgattcttgttcaccggttccggcgtttcgtcagttacttttcgggttatttactcaacggctggctggtattgcccgtcgtcggtttagcaatgttttcgcgcatggaagtgtcggcttctatattcttcatccggtaatagtccatgatacccagattgccgttgcggaatgcttcggccatggccttgggtacttccgcttctgcctcgataactttggcacgggcttcctgggcttttgccttcatttcctgctctgtggctacggccatggcgcggcgttcctctgccttggcttgagcaatgttcttgtcggcattggcttggtctatctgcagggcggcaccgatattcttacctatgtcaatatcagcaatgtcaatggacagaatttcgaatgctgttccggcatccaaccccttgcgcaataccagtttggagatagaatccggattctctaatacagacttatgattctctgacgaaccgatggaagacacaataccctcgcctacacgggccagaatcgtgtcttctccggcacctcccaccaattggcggatattggcgcgcaccgttacacgggccttggcaatcagctggataccgtctttggcaacagctgtcacgggaggggtgtcaattactttggggttaacggacatctgtacggcttcgaacacgtcacggccggcaaggtcgatggcggttgccatctggaacggcagctcgatattggctttagaggcggataccagtgcgtgtaccacccgctctacgtgacctccggcaaggtagtgcgcttccagttcgtcgcgcgtgatgttttgcaatcctgctttatgagcttcaatcatgccgggcacaatgatataaggaggaacattacggatacgcatcaggaaaagttgtaccagcgagatgtttactcccgatactttggcagacagccacaagaagaacggtacataatggaagaaaagtaccaggaagataatgcctcctataatgaggaaggcggttaaatacattgtgcttggatccatgagattaaatattaattgttagttataaataggttgattcctgaaatttcactgcttgagccgttccactaagaggactccgtcggcaatacggtctacgataatcggagtcttttcgttcaggaagccgtctgatgactttacttccacgatgtctccgttgatttcggcatagccgataagagccaggcgagtagtggttacgcctatatcacctaccttgactttttcctcggcactacggtctactttggaggtgatgttttttttcaatgcaattttgtcgagtgtcttggagcgcatgaaccataccaacgagccgatacaagccagggcagatatgataagcgtaatgacacctgccgtggtgcccatataggcaaaggcatagtagttggcaaagatgatgcaacctcctgccagaaaaccggcaacgctgatgcccggaattacgaataattccactaagaacaagattactgctcctataatcaatgaggcgataatgagtatatccatagttgtctttatttggtggcttgtttttccaggttgcgcacttgaatggcagtctgctccatctcagtggacaattgccgtacacgttgctccaggtcgaggatggcggcggacatcttgtccttttcctgcttgttggctcgggagtattccgaacgcatatcttccagtttctcctgcagttgtttgtagctctgctccagctgattgtatttgccatacgaggctttggcctgtggggagcggaaatcgtccagctggtagtaggtggagtggtcgtcaatgatgaattggaaatcatgcttcttggtagtccgcggctttgcgttggcagcagtccgaagcctttctcgggcgccctttaccgcatcggtgtccgtccatgtgtccttgatagagtgaagttgcgccaatgatatcatcttgtccgggtccatcccttcgtagttgtacacttgcttggatgagttgggaatgaatacatagatacacactttgccttcgggctggtagcggtcggaggcaaaccatcccaagtcgttgaattcgtcgatgacgtacatatagtcgttgtagggcgaattgaacggcatgcccacattttccggcatcagataggagtcggtattcgtattgtaacgggtgacgaaaatgtcatatcctcccatcgagccagggccatccgaagcatagtagatagtgataccgtccgtaagtacatagggatagtctgcattcatggcctcgttgatgcttccgggcaacaagctgccatcactccatttgtccagcaacttgttgcgcgaaaggatactgagggtgctgtccggttgcatttcgctataatatagcttattgcccagctccgtttcgtataccgttccgccttccttaccggaatcattgaagtaggtgtcgtacatgaacagcttgcccgattcggggctgattttgtatgcatccaggaatttttccttgtctaccacaaagctgtcgatgaagcagacctcttccacgcctttcagcatgcgcaagttggatttgcttttttccaataattgttcggcctcttcggtggagcgttttctctttttcaggtcggaaatgtaggtctcataagtctcgatggcatcttcgaaccgatatagatcattgtatgccagggccaaatagagttgcccgctggggacacgtctcttgacggcgctttccaggtacttcaaggcttctgcgggttcgccggtttccaggcaacatacaccgtaccataggttgtaatttccattaccaggttgtgtcttgacgagtttcttgaaagtgggcttggcttcttcgtattctcccttctcgtacaaggctttggcttctgccaggctttgtgcggaaattgttatgctcaaaaggccgaatagaaagaaaaggatatattttttattcatattgatacatgctgattgttcagaaggtcaaaaatacaaatttatcgtgaataaagctggtttccgtaattctattttgttaattcttctttaaatcgttcttttgccttacttttgcaaccggaagagctataattcataacttataactcataactcgtatcaatggcacaatttactgaagaagaaaagatgttgcgccgcatagacaagcggtttagcaaaggtgtggtggaatatgggctgatagaggacggcgataagattcttattgggctttcgggaggcaaggactctttggcgctggtggaattgttggcacggcgtgcccgtgtctataaaccccgtttttccgttgtcgccgtacatgtagtgatgaagaatataccttatcaaagcgatgtggactatctgagggagtacgtagagtcgtggggagtgccttttgttctctttgaaacggagtttgatgccacgacagatacccgcaagtctccttgttttctttgctcttggaataggcggaaggcattgtttaccgtagccaaggagcagggatgcaataaaatcgcgttaggccatcacatggatgatattctggagaccttgctgatgaatatcacctatcagggagcgttcagctccatgcctcctcggctggtaatgaagaagtttgatatgacgattatccgtccgatgtgtctggttcatgaggcggatttgatggagttggcacaagtgagagggtatcgtaagcaggtgaagaattgtccgtatgagtcacaatccagccgtagtacaatgaaaggcattctgaaacaattggaggaaatgaatcctgaggcacgctatagtctatgggggagtatgacgaatgtgcaggaggaattgctgcctgcaatcataaaacattaaccattaattattaaaaaatatatgaaagcattttataccattttgctattgattgtatctaatattttcatgacgtttgcctggtatgggcatctgaagctacaagagacaaaagtcatctccaactggccgttgtatgccgtggtgctgttttcctgggtaatagctttggcagagtattcttgccaggttccggccaatcggataggctttttaggcaatggaggcccgttctcattgatgcaactcaaagtgattcaggaagtaatcactttgattatctttacggtgttcacaacggttcttttcaagggggaaacgctgcattggaatcattttgccgcttttgtatgtctggtactggcggtatattttgtattttataaatgatgggttaatcgcatttgcacattatttcatatacttttccattccttttgttaagaacgtttgaagctttccttcttcatccgtataaatgaaacaggcgtcgatatccggatgtgcatccgccacgcgttctgcttcttccagccccatcaccatgaatgccgtggcataggcgtctgcactcatgcaatctttggcgatgacggtggctgacaagatgctgtgctgtaccggatagccggtacgcgggtcgatggtatgcgcatatttctttccgtctttatagtagtagttgcgataattgcccgatgtagccatgcctaaatccgtgacttgcagcactgcttgcagttcctggttcactgccagtgagtcgtctatcggcttgttcaaaccgatgcgccaaggtccattttgagggttttgcccgtgaacaaccacttctccgcctatatcgaccataaagttgcggataccctttttcttcagaagttgggctatgacatctactgcatatccttttgccacagcgctgcacgagagcattatacgcgggtctgttttcatcactttcccttcatcggacaattttactttttcgtatcctgtcatctccagcaggctgtctatcatggcagagtcggggaagttacccttcttgaacccaaatccccaggcattggcaagaggggcaacggtgatatcgaaggcaccatcggtctcccgggagatttccatgctacgtcggaagacgttggtaaagaatgtgtcgggcacaatgtcctcgttgcggttgatgcgcgtaatggtcgccgtatcattgaaaggggacaaggaaccgtcgaaacgtttgagttccgtttctatctccgccttcagattctggtcacattgataggtcactttatataccgtaccgaatatcagtccgttatccgtctgataaggagtgacttggttgtggcgggcaagtatccagatggttcccagtaccagtagggcaatccataaaaaattccgttgtactttcttttccatatcctatctgagtttttactttttaattaaaagaagagatgctctaccaatatcttggtaccgatgatgacgaggataatccctccccaaagttcggcgcgcagtctgcgggctatgccacatccgaaacggatgccgaacatcagaccgaccatcgacaaggcgaatgatacaaaaccgataatgccgatgggggaaagaatagccgagaattgcttgataccgaggaatgcaaacgaaacacctaccgccaatgcatcgatgctggttgccacggccagagcgagcaccaccttcaggctggtagggtcatactcgtgcttgcaatcttcgtccttgaaggattccattatcatgcgtccgcccaggaaggcaaggataccgaatgcaatccaatggtcaatactttctatcaggtggctgaaaaaactggcgcctatccatcccagcagaggcatcaaagcctggaaaaagccgaagctgatggccatcaccagcatagggcgcagccgggcgcgtttcaatataattccgctggctatagaaacggcgaaacaatccatcgcaagtcctacggccagtagccaaatctctaaccctgtcataagtcgcttaaagaggtagtttataagttatcgtataggttactcccatcgtgttggagccatatttcccgaaaccgggcacataccacgggtcaccgtattcatcggccgaggcagacaatttgaacttgaagcgtagtgaccagcccatgtacaatgccttccagacgtgcgcccggataccgacacaaaattccgcccattgcatggagcctttcattcctttatggttatagggcaggctgcctccccatatttcgtcgtccagattcggattgcctacgatgccaccgtatatcgggtcgtccagtcccaaggcgtctacatcgtacttgaagctacttacaccgtaacgcaagcctacgagtagcatgtgtccgtgctgcttcttgtatagcgtgttatagtccattcctatgcggaagtagggggcgttgcttttgtagtgtatgcctttgtcactccaggtgtccgtggagccatatcccagttcggcaatagggaagaagcggttcttgaggtttacatccacggccacttcggaactcaggaaatctcctccaaatacggaacttccgattccccacaagtccaagccgacggacatgccgttgtataacggatagtgcacttcttctttcgcgtccttcttctccttcttgggaggtgctccctggggggggacggtaggattcccgttctgcgcccgtagggggaggaacatcagcaggcagagtgccagactaatagaataacttaagattttcctttccatagatgcctgcttcattgtctttgatgtatatcgagtccagagagatgcgggtgcacgttacgtctgtgatggcctgcttcatctgatagccgcaatccatcgataggaaatagggggtgttggtgtggcgtatcaccatcgtgtcactcttggtccggctatacttgaatatcagcttggtggaatcctccgtatagcgcagtggcagggagatgtcgtgtaccttcttctggttgttgatgatgatggagtcggtgccgtatgctgtgacggtgagcgagtcgagcgtgtcgttctccacgtattgggtttcggggtctactctataaagaatgcaattcaccatggggcgtgccgtcatggagcaatctgcctcctccgagcaggagatagctatgcttattatcgggcaaaggatagctccgagtatgacaagtctgactaattttttcatcgttaaatggttttctctatttgatatttgtttcgttccggggcattacgtgaaatcagctctccgaggaatcctgccacgaatagttgtgtgccgataatcatggaggtcaacgagaggtagaagtagggagagtccgtcacaaggcggtagggcatgccatggtgcatgtagtacaacttgctgacacccactatgaccacggctatgaagccgaagatgaacatcagcgaacccagcaatccgaaaaagtgcatgggcttgatgccgaaccgggaaaggaaccaaagggaaagcaaatccagatacccgtttacaaaacggttcagcccgaacttggtctttccgtatttgcgtgcctgatggtgcaccactttctcgccgattttcttgaagccggcgttcttggccaggtaggggatgtagcggtgcatttcgccgtatacctctatattcttgacaacctctttgcgatatgccttcagtccgcaattaaagtcgtgcaggtttttgatgcccgatactttgcgggcggtggcattgaacaatttggtggggagggtcttcgacaacgggtcgtaacgtttctgcttccagcccgatacgaggtcgtagccctcctgggtaatcatgcggtagagttcgggtatttcgtcggggctgtcctgcaggtcggcgtccatggttatcacgacgtctccttgtgcttgttcgaaaccacagaacaatgccggcgacttcccgtagttgcggcggaacttaatgccccgtaccttgtccggagcttgtgcctgcaattgctcgattacctgccaggaacggtcggtacttccgtcgttcacgaaaatcacttcgtatgaaaagccgttggcattcatcacccgctcaatccatgcgaacagttcggggagtgattcttcttcattatatagtggtacgacaactgaaatatccattgatgtatgatttttctatttacaattgaaataacatttctttttactgttccgtcactttgccggagcgttgtctttcttgcgtctcatcacgaacaaggcggtggggaaagccagtatcgaaccccaaaacacattggacgatatcatctgtagcgtaatgtcgataggactgagcagtcgggctgtctccagagcttcctgataggtggcgatgtacgaatccattcccggcatgttgctttgggcaagcgtgtctaccatcgtttcgcacgtgtttatcacatatccgtggtctatgaacctgaagtagatgtagtgtgccacggcggcaagcagcgcagcaaacatatacatgaaaacggtgaatatccatgcatgcaggaagctgatgccgcctccgcatacctgattacgatacatccgtgcataataatatcccataaaaggtacgcatagcgtgagtcccatgaaaaggaaaagtaaaaaaggaaccgacagccccacaggaaagagtatgaacttcaatatccagaaacctcccatataggtaccgaacagcattgcgtatcgttgcatgtaacctctattttctgccatctttcttagaaataatatgcaaaggtacaaatatagttggattcaagggcaagccgatgtgtagattttaaataaattagaggattctttgcggggcaaaaagaaaaaagcaggtaacactttcgtatcatctgcttttctttcgagcctcttgtcggattcgaaccaacgaccccgagattacaaatcacgtgctctggccaactgagctaaagaggcgggtgggtaagcttactatatcgcgccgctacaaccaactacctttgctgcgatcaagccctggaggattcgaagggagctggccgtataggacttacccgttttcgttttgcggttgcaaaggtaggcattattttgaaatctgcaatagcttgcggcgatttttttatttgtttttttagattctctattctatccctcttcacggctccttatacagatactttggaggggaggtacggattctttccggcattacgatggacaaatattccttttactaaaaagtattcgtccgatatgtgtaaccttatcgtccgacagttgttgaattatcgtccgacagctgtcggacgataattcaacaactgtcggacgataaggttacacatatcggacgaatactttttagtaaaaggaatatttgtccatcgtaatgccggaaagaatccgtacctcccctccaaagtatctgtataaggagccgtgaagagggatagaatagagaatctaaaaaaacaaataaaaaaatcgccgcaagctattgcagatttcaaaataatgcctacctttgcaaccgcaaaacgaaaacgggtaagtcctatacggccagctcccttcgaatcctccagggcttgatcgcagcaaaggtagttggttgtagcggcgcgatatagtaagcttacccacccgcctctttagctcagttggccagagcacgtgatttgtaatctcggggtcgttggttcgaatccgacaagaggctcgaaagaaaagcagatgatacgaaagtgttacctgcttttttctttttgccccgcaaagaatcctctaatttatttaaaatctacacatcggcttgcccttgaatccaactatatttgtacctttgcatattatttctaagaaagatggcagaaaatagaggttacatgcaacgatacgcaatgctgttcggtacctatatgggaggtttctggatattgaagttcatactctttcctgtggggctgtcggttccttttttacttttccttttcatgggactcacgctatgcgtaccttttatgggatattattatgcacggatgtatcgtaatcaggtatgcggaggcggcatcagcttcctgcatgcatggatattcaccgttttcatgtatatgtttgctgcgctgcttgccgccgtggcacactacatctacttcaggttcatagaccacggatatgtgataaacacgtgcgaaacgatggtagacacgcttgcccaaagcaacatgccgggaatggattcgtacatcgccacctatcaggaagctctggagacagcccgactgctcagtcctatcgacattacgctacagatgatatcgtccaatgtgttttggggttcgatactggctttccccaccgccttgttcgtgatgagacgcaagaaagacaacgctccggcaaagtgacggaacagtaaaaagaaatgttatttcaattgtaaatagaaaaatcatacatcaatggatatttcagttgtcgtaccactatataatgaagaagaatcactccccgaactgttcgcatggattgagcgggtgatgaatgccaacggcttttcatacgaagtgattttcgtgaacgacggaagtaccgaccgttcctggcaggtaatcgagcaattgcaggcacaagctccggacaaggtacggggcattaagttccgccgcaactacgggaagtcgccggcattgttctgtggtttcgaacaagcacaaggagacgtcgtgataaccatggacgccgacctgcaggacagccccgacgaaatacccgaactctaccgcatgattacccaggagggctacgacctcgtatcgggctggaagcagaaacgttacgacccgttgtcgaagaccctccccaccaaattgttcaatgccaccgcccgcaaagtatcgggcatcaaaaacctgcacgactttaattgcggactgaaggcatatcgcaaagaggttgtcaagaatatagaggtatacggcgaaatgcaccgctacatcccctacctggccaagaacgccggcttcaagaaaatcggcgagaaagtggtgcaccatcaggcacgcaaatacggaaagaccaagttcgggctgaaccgttttgtaaacgggtatctggatttgctttccctttggttcctttcccggttcggcatcaagcccatgcactttttcggattgctgggttcgctgatgttcatcttcggcttcatagccgtggtcatagtgggtgtcagcaagttgtactacatgcaccatggcatgccctaccgccttgtgacggactctccctacttctacctctcgttgacctccatgattatcggcacacaactattcgtggcaggattcctcggagagctgatttcacgtaatgccccggaacgaaacaaatatcaaatagagaaaaccatttaacgatgaaaaaattagtcagacttgtcatactcggagctatcctttgcccgataataagcatagctatctcctgctcggaggaggcagattgctccatgacggcacgccccatggtgaattgcattctttatagagtagaccccgaaacccaatacgtggagaacgacacgctcgactcgctcaccgtcacagcatacggcaccgactccatcatcatcaacaaccagaagaaggtacacgacatctccctgccactgcgctatacggaggattccaccaagctgatattcaagtatagccggaccaagagtgacacgatggtgatacgccacaccaacaccccctatttcctatcgatggattgcggctatcagatgaagcaggccatcacagacgtaacgtgcacccgcatctctctggactcgatatacatcaaagacaatgaagcaggcatctatggaaaggaaaatcttaagttattctattagtctggcactctgcctgctgatgttcctccccctacgggcgcagaacgggaatcctaccgtccccccccagggagcacctcccaagaaggagaagaaggacgcgaaagaagaagtgcactatccgttatacaacggcatgtccgtcggcttggacttgtggggaatcggaagttccgtatttggaggagatttcctgagttccgaagtggccgtggatgtaaacctcaagaaccgcttcttccctattgccgaactgggatatggctccacggacacctggagtgacaaaggcatacactacaaaagcaacgccccctacttccgcataggaatggactataacacgctatacaagaagcagcacggacacatgctactcgtaggcttgcgttacggtgtaagtagcttcaagtacgatgtagacgccttgggactggacgacccgatatacggtggcatcgtaggcaatccgaatctggacgacgaaatatggggaggcagcctgccctataaccataaaggaatgaaaggctccatgcaatgggcggaattttgtgtcggtatccgggcgcacgtctggaaggcattgtacatgggctggtcactacgcttcaagttcaaattgtctgcctcggccgatgaatacggtgacccgtggtatgtgcccggtttcgggaaatatggctccaacacgatgggagtaacctatacgataacttataaactacctctttaagcgacttatgacagggttagagatttggctactggccgtaggacttgcgatggattgtttcgccgtttctatagccagcggaattatattgaaacgcgcccggctgcgccctatgctggtgatggccatcagcttcggctttttccaggctttgatgcctctgctgggatggataggcgccagttttttcagccacctgatagaaagtattgaccattggattgcattcggtatccttgccttcctgggcggacgcatgataatggaatccttcaaggacgaagattgcaagcacgagtatgaccctaccagcctgaaggtggtgctcgctctggccgtggcaaccagcatcgatgcattggcggtaggtgtttcgtttgcattcctcggtatcaagcaattctcggctattctttcccccatcggcattatcggttttgtatcattcgccttgtcgatggtcggtctgatgttcggcatccgtttcggatgtggcatagcccgcagactgcgcgccgaactttggggagggattatcctcgtcatcatcggtaccaagatattggtagagcatctcttcttttaattaaaaagtaaaaactcagataggatatggaaaagaaagtacaacggaattttttatggattgccctactggtactgggaaccatctggatacttgcccgccacaaccaagtcactccttatcagacggataacggactgatattcggtacggtatataaagtgacctatcaatgtgaccagaatctgaaggcggagatagaaacggaactcaaacgtttcgacggttccttgtcccctttcaatgatacggcgaccattacgcgcatcaaccgcaacgaggacattgtgcccgacacattctttaccaacgtcttccgacgtagcatggaaatctcccgggagaccgatggtgccttcgatatcaccgttgcccctcttgccaatgcctggggatttgggttcaagaagggtaacttccccgactctgccatgatagacagcctgctggagatgacaggatacgaaaaagtaaaattgtccgatgaagggaaagtgatgaaaacagacccgcgtataatgctctcgtgcagcgctgtggcaaaaggatatgcagtagatgtcatagcccaacttctgaagaaaaagggtatccgcaactttatggtcgatataggcggagaagtggttgttcacgggcaaaaccctcaaaatggaccttggcgcatcggtttgaacaagccgatagacgactcactggcagtgaaccaggaactgcaagcagtgctgcaagtcacggatttaggcatggctacatcgggcaattatcgcaactactactataaagacggaaagaaatatgcgcataccatcgacccgcgtaccggctatccggtacagcacagcatcttgtcagccaccgtcatcgccaaagattgcatgagtgcagacgcctatgccacggcattcatggtgatggggctggaagaagcagaacgcgtggcggatgcacatccggatatcgacgcctgtttcatttatacggatgaagaaggaaagcttcaaacgttcttaacaaaaggaatggaaaagtatatgaaataatgtgcaaatgcgattaacccatcatttataaaatacaaaatataccgccagtaccagacatacaaaagcggcaaaatgattccaatgcagcgtttcccccttgaaaagaaccgttgtgaacaccgtaaagataatcaaagtgattacttcctgaatcactttgagttgcatcaatgagaacgggcctccattgcctaaaaagcctatccgattggccggaacctggcaagaatactctgccaaagctattacccaggaaaacagcaccacggcatacaacggccagttggagatgacttttgtctcttgtagcttcagatgcccataccaggcaaacgtcatgaaaatattagatacaatcaatagcaaaatggtataaaatgctttcatatattttttaataattaatggttaatgttttatgattgcaggcagcaattcctcctgcacattcgtcatactcccccatagactatagcgtgcctcaggattcatttcctccaattgtttcagaatgcctttcattgtactacggctggattgtgactcatacggacaattcttcacctgcttacgataccctctcacttgtgccaactccatcaaatccgcctcatgaaccagacacatcggacggataatcgtcatatcaaacttcttcattaccagccgaggaggcatggagctgaacgctccctgataggtgatattcatcagcaaggtctccagaatatcatccatgtgatggcctaacgcgattttattgcatccctgctccttggctacggtaaacaatgccttccgcctattccaagagcaaagaaaacaaggagacttgcgggtatctgtcgtggcatcaaactccgtttcaaagagaacaaaaggcactccccacgactctacgtactccctcagatagtccacatcgctttgataaggtatattcttcatcactacatgtacggcgacaacggaaaaacggggtttatagacacgggcacgccgtgccaacaattccaccagcgccaaagagtccttgcctcccgaaagcccaataagaatcttatcgccgtcctctatcagcccatattccaccacacctttgctaaaccgcttgtctatgcggcgcaacatcttttcttcttcagtaaattgtgccattgatacgagttatgagttataagttatgaattatagctcttccggttgcaaaagtaaggcaaaagaacgatttaaagaagaattaacaaaatagaattacggaaaccagctttattcacgataaatttgtatttttgaccttctgaacaatcagcatgtatcaatatgaataaaaaatatatccttttctttctattcggccttttgagcataacaatttccgcacaaagcctggcagaagccaaagccttgtacgagaagggagaatacgaagaagccaagcccactttcaagaaactcgtcaagacacaacctggtaatggaaattacaacctatggtacggtgtatgttgcctggaaaccggcgaacccgcagaagccttgaagtacctggaaagcgccgtcaagagacgtgtccccagcgggcaactctatttggccctggcatacaatgatctatatcggttcgaagatgccatcgagacttatgagacctacatttccgacctgaaaaagagaaaacgctccaccgaagaggccgaacaattattggaaaaaagcaaatccaacttgcgcatgctgaaaggcgtggaagaggtctgcttcatcgacagctttgtggtagacaaggaaaaattcctggatgcatacaaaatcagccccgaatcgggcaagctgttcatgtacgacacctacttcaatgattccggtaaggaaggcggaacggtatacgaaacggagctgggcaataagctatattatagcgaaatgcaaccggacagcaccctcagtatcctttcgcgcaacaagttgctggacaaatggagtgatggcagcttgttgcccggaagcatcaacgaggccatgaatgcagactatccctatgtacttacggacggtatcactatctactatgcttcggatggccctggctcgatgggaggatatgacattttcgtcacccgttacaatacgaataccgactcctatctgatgccggaaaatgtgggcatgccgttcaattcgccctacaacgactatatgtacgtcatcgacgaattcaacgacttgggatggtttgcctccgaccgctaccagcccgaaggcaaagtgtgtatctatgtattcattcccaactcatccaagcaagtgtacaactacgaagggatggacccggacaagatgatatcattggcgcaacttcactctatcaaggacacatggacggacaccgatgcggtaaagggcgcccgagaaaggcttcggactgctgccaacgcaaagccgcggactaccaagaagcatgatttccaattcatcattgacgaccactccacctactaccagctggacgatttccgctccccacaggccaaagcctcgtatggcaaatacaatcagctggagcagagctacaaacaactgcaggagaaactggaagatatgcgttcggaatactcccgagccaacaagcaggaaaaggacaagatgtccgccgccatcctcgacctggagcaacgtgtacggcaattgtccactgagatggagcagactgccattcaagtgcgcaacctggaaaaacaagccaccaaataaagacaactatggatatactcattatcgcctcattgattataggagcagtaatcttgttcttagtggaattattcgtaattccgggcatcagcgttgccggttttctggcaggaggttgcatcatctttgccaactactatgcctttgcctatatgggcaccacggcaggtgtcattacgcttatcatatctgccctggcttgtatcggctcgttggtatggttcatgcgctccaagacactcgacaaaattgcattgaaaaaaaacatcacctccaaagtagaccgtagtgccgaggaaaaagtcaaggtaggtgatataggcgtaaccactactcgcctggctcttatcggctatgccgaaatcaacggagacatcgtggaagtaaagtcatcagacggcttcctgaacgaaaagactccgattatcgtagaccgtattgccgacggagtcctcttagtggaacggctcaagcagtgaaatttcaggaatcaacctatttataactaacaattaatatttaatctcatggatccaagcacaatgtatttaaccgccttcctcattataggaggcattatcttcctggtacttttcttccattatgtaccgttcttcttgtggctgtctgccaaagtatcgggagtaaacatctcgctggtacaacttttcctgatgcgtatccgtaatgttcctccttatatcattgtgcccggcatgattgaagctcataaagcaggattgcaaaacatcacgcgcgacgaactggaagcgcactaccttgccggaggtcacgtagagcgggtggtacacgcactggtatccgcctctaaagccaatatcgagctgccgttccagatggcaaccgccatcgaccttgccggccgtgacgtgttcgaagccgtacagatgtccgttaaccccaaagtaattgacacccctcccgtgacagctgttgccaaagacggtatccagctgattgccaaggcccgtgtaacggtgcgcgccaatatccgccaattggtgggaggtgccggagaagacacgattctggcccgtgtaggcgagggtattgtgtcttccatcggttcgtcagagaatcataagtctgtattagagaatccggattctatctccaaactggtattgcgcaaggggttggatgccggaacagcattcgaaattctgtccattgacattgctgatattgacataggtaagaatatcggtgccgccctgcagatagaccaagccaatgccgacaagaacattgctcaagccaaggcagaggaacgccgcgccatggccgtagccacagagcaggaaatgaaggcaaaagcccaggaagcccgtgccaaagttatcgaggcagaagcggaagtacccaaggccatggccgaagcattccgcaacggcaatctgggtatcatggactattaccggatgaagaatatagaagccgacacttccatgcgcgaaaacattgctaaaccgacgacgggcaataccagccagccgttgagtaaataacccgaaaagtaactgacgaaacgccggaaccggtgaacaagaatcggttcccggcgtttctatttataaacaaaagattaaagcctcaagcatatgaagaaatatttcgcctcttccgaactgatcatcaatgaagacggttctgtatttcatcttcacgtaaagcccgaatggctggcagacaaagtcatcttggtaggcgaccccggacgggtggcactggttgcctcccatttcgagaacaaggaatgtgaagtggaaagccgcgagttcaagactatcaccggtacttaccaggggaaacgtattacggtggtttccaccggtatcggatgtgacaacatcgatatcgtgatgaacgaactggatgccctggcaaacatcgatttcgagacgcgcgaagaaaagccccgtctgcgtagccttgagctggtacgtatcggcacctgcggcggcttgcaaccctacactccggtaggcacattcgtatgttctgaaaagtccattggtttcgatgggctgctcaacttctatgccggacgcaactccgtgtgcgacctgcccatggagcgtgccttcctcaaccatatgggatggtccggcaacatgtgtgcccctgccccctacgtcattgacgcaagcactgaactgatagaccgcatcgcacaaaacgacatggtacgtggcgtaacgattgccgccgggggcttcttcggacctcaaggacgcgagttacgcgtgccgcttgccgacccacatcagaatgagaagattgaaaaatttgaatacaacggctaccgtatcaccaacttcgagatggaaagttctgccctggcaggcttgagccgtctgatggggcacaaggccatgacggtatgcatggtcattgccaaccgcctgataaaagaagctaacacgggatacaagaatacgatagatactcttatcaaaacagtactcgaccgtatctaagtatccttcaagaaatgctcctccctttccttcagccaatcctaggagtagggtttagtaatgacttcatcacatcctgcttgacgtgcccgttgctggtctgtatagtgtagcaatgtcctgctatacccacaatgggcacagaggcggattaggctttataagcatctatccattatcgatttgcacaaagttacgataaaagcccataagttgaatcaccatctctcttttttgtaaagaaaccattatctttgctgaataaaaataagccggataaaatgaaccaagataccatttgtgccatagccaccgcccaagggggagccataggatgcatccgtgtctccggaccggatgccatagagataacatcccgcatatttacccctgcccggaaggggaagaagctgaaggatgccaagccatacacacttaccttcggtcatatccatgaagaagaaaacatcatagacgaagtacttgtaagcttattccgtgccccccactcgtacacgggcgaggatagcacggaaatcatgtgccacggttcgagctatattcttcagaaggtgttgcaactgctcatcggtaatggttgccgcctggcagctcccggtgagtacacgcaacgggccttcttgggcggcaaaatggacctaagccaggccgaagctgtggccgacctcatcgcctccacctctgccgccactcaccgcctcgccatgagccaaatgcgcggtgggttcagtaaagagctggcctcactacgcgaccaattgctgcacttcacatcactcatagaactggagctggacttcagcgaccacgaagaactggaatttgccgaccgctccgagctatgtctcctagcagacggcatagagcaggtaatttcccgtttagtacaatccttcagtgtaggcaatgccatcaagaacggcgtgcccgtagccatcatcggcgaaacgaacgctggtaaatccaccctgttgaatgcactactaaacgaggaacgagccattgtaagcgacatacacgggacaacccgcgatgtgatagaagacacagtcaatcttggtgggataactttccgatttattgatacggcaggcatacgcgaaacgaacgacaccatcgagaacctaggaattgagcgaaccttccagaaattggagcaggcggaaatcgtgctctggatagttgatgccacgaacgccgtctcacggataccacaactaactgcccagatacttccccgttgcgaagggaaacggctcattctcgtattcaacaaggccgatctggtgcaggatgcctcaaccatccccaaccccagtttcaccgtggccgctactaatgtgcaatgcatctccatctctgccaaagggcgtaccaaccttgacaagcttcagcaaatgctaatctctgccgctaacctgcccacagttacccaaaacgatgtcattgtcacgaatatacgccattacgaggctttgacccatgccttggaagccatccaccgggtccaacaaggattagcagaaaatctatccggagattttgtttcacaagatatccgcgaatgcattttccatctaagcgatattgcaggggaagttacgaacgatatggtacttgggaatattttcgaacatttttgcatcggaaagtgatataaagaaaagaaaagcataaaaagagaaaatataaacctgtaaaatgcactatatcagttgttttattaggatattgtattttctctttttctccatgttttctgcttagttacacatttttattgtatttttgtccccagattgtcccccgatattggtatgagggacaaaaatctgtcccccgataaggacattaacaataaccgaata

SEQ ID NO: 458 - DNA, 37853 bp, unidentified
  source 1..37853: mol_type = unassigned DNA
  misc_difference 3654: note = a, c, g, or t
  misc_difference 3655: note = a, c, g, or t
  misc_difference 3656: note = a, c, g, or t
  misc_difference 3657: note = a, c, g, or t
  misc_difference 3658: note = a, c, g, or t
  misc_difference 3659: note = a, c, g, or t
  misc_difference 3660: note = a, c, g, or t
  misc_difference 3661: note = a, c, g, or t
  misc_difference 3662: note = a, c, g, or t
  misc_difference 3663: note = a, c, g, or t
  misc_difference 24912: note = a, c, g, or t
  misc_difference 24913: note = a, c, g, or t
  misc_difference 24914: note = a, c, g, or t
  misc_difference 24915: note = a, c, g, or t
  misc_difference 24916: note = a, c, g, or t
  misc_difference 24917: note = a, c, g, or t
  misc_difference 24918: note = a, c, g, or t
  misc_difference 24919: note = a, c, g, or t
  misc_difference 24920: note = a, c, g, or t
  misc_difference 24921: note = a, c, g, or t
  misc_difference 37143: note = a, c, g, or t
  misc_difference 37144: note = a, c, g, or t
  misc_difference 37145: note = a, c, g, or t
  misc_difference 37146: note = a, c, g, or t
  misc_difference 37147: note = a, c, g, or t
  misc_difference 37148: note = a, c, g, or t
  misc_difference 37149: note = a, c, g, or t
  misc_difference 37150: note = a, c, g, or t
  misc_difference 37151: note = a, c, g, or t
  misc_difference 37152: note = a, c, g, or t
caggcaggggacaagggccagcgccgcggcgtatcccgccgggtcggcggcgggcaggtcggcgggcggctcctgaatgccgaacgccccgggccgcagcaggcacaatgccggtatctccacccagtccatctcggttttgctccgcacacggggcagcagcaggcgcttgccgtcggccagcgcgtgttttagtatttccgccgtgtccggctcatccggcatggccgcaaaggccagcaccgccccggcacgctgccattgcggcaggctgaacagcgcctgcgccatgccgcggcccacagccgccatatccagttccgcgcgccgggccttggcccatgcgcgggcttcgcgttttgtcattctgcacaccaccttccgggctatcataccatatctgccctccacttaacaagacggaaaagccgtcctgttgttacagcagcgacaaaatttttccgccatcttgcccggcgcagtgaaatagagtataatatatcctgtatcgctatgtattagacttatgaaatataaaaaggagattccaaaccatgagcaagttcaatttcatcaagaccgatattcctgacgtgcagatcatcgagccgactgtttttggcgatgaccgcggctattttatggagacctaccagatcgacgagttcgccgcagcgggcatcgacaaacccttcgtgcaggataaccagagccgctccaccaagggcgtgctgcgcggcctgcacttccagaccaagcacacccagggcaagctcgtccgcgtgaccctgggcgaggtgttcgatgtcgccgtcgactgccgccccaacagcaagaccttcggcaagtgggtaggcgcaacgctgtccgccgacaacaagaagatgctctggatccccgagggcttcgcccacggctttgtcgtgctgtccgatgtggccgagttctgctacaagtgcaccgacgtttacgaccccaccgccgagggcggcattccctacgatgacccgacggtcaacgtgcagtggcccgactgcggctgcgagcacaagaccagcgccaaggacaaggagcacaccccgtttgccgcccagaagttcgaatattttgagaaatattgagggtaaaccgtgcagaaactgaaagacaccttcgcaggcttctggaaataccgttacctgctgcaaaacctgatttcccgtgatttcaagctgaaataccgccgcagcgtgttgggcgtggcgtggagcgtgctgaacccgctgctgacctgtctggtcatgtgggccgtgttcggcgcactgttcaaccagcgcggtcagggcatcgaggactttccgctgttccttatcatcggccagctgatgttcaacttcttccgcgagagcacgaccatggccatggagagcgtgctgaagaacggcccgctgctgcgcaaggtctatattcccaaatacatcttcccgctggaaaagtgctgctttgcgctcgtcaacttctttttcagtctcgtggcgctgtttatcgtcgcgctgctgacctggtcgcacatctcgatcgggactgtgctgctggccatttatccccttgtgatgctgtttattttcagtctgggcatcgggctgattttgtccacgctctacgtttttgtgcgtgacatcatgcatatctgggaggtcttttgcacactgcttgtctacggcagcgccatcttctacgacccgcgccagatggaaagttggatgcagtacgtcatcaacctgaaccccatctactggtacatcaccgccgtgcgttcctgcgtcatgtggggcgaggggctgacccccaacatggtgctgattccgttcctctgtgccgcgctgagcctgggcctcggtatctgggtgttcaaaaagaatcaggacaagttcgtcctgtacatgtaagggggcatcgaaatggcagagcagaaacccatcatctccatcgaccatgtttcgatgcgcttcaacctctccaaggaaaagcacgaaagcctgaaagagtacttcgtcgcgctgctgcacggcggtgtgcggtttgacgagttcttcgcgctggacgatgtatcgtttgatattatgcccggcgatttctacggcctcatcggcctgaacggcagcggcaagtctacgctgctgaaagtgatttccggcgtctacaagcccagcgccggcaaggtcacggtcaacggtacgattgcgccgctgatcgaattgggcgcaggctttgacatggacctgaccgcacgggaaaacatttatttaaacggcaccgtgctgggctacacgcccaagtacatcgactcaaagttcgacgacatcgtcgaattcagcgaattgcaggattttctcgacgtgccgctgaaaaactactcttccggcatggtcgcgcgtctggcgttcgccgtggcaacgataacgaagcccgacatcctgattgccgacgagatcctgtccgtcggtgacttcctgtttcaggagaagtgtgagaagcgcatggccgagctgctgtccggcggcacgacggtcattctggtcagccactccattgaccagatcgagcgtatgtgcaacaaggtagcctggctcgaccacggccatctgcgccgcatcggcgcgacgaaggaaattaccgccgagtaccgaaggttcgagaaaaaggacgccatgccggccaaagttaccgaggaataagctatgtccgagaacatgaaaccgaacaacgagcgccctgccgacctggccgtacaggacagcgtcggcggcatggcgcggcggcttttgaaccccgcccacctgcgggacctcgcggggcgcagcgtcaagaccctacgggagcagggggccgagcagctctggcgcgatgtgaaattccgcgtcgggctggcgatgcaccacgacgactggcggcaccgcgccgacattccactgcgccgggagctgaaggcccagcgcgccgcgcacctgcagggaccgaagatcagcatcatcgtgccgctgtacaacacgcccgccaagctgtttgacgagatgctgcaaagcgtcgtccggcagacctacacaaactgggaattggtgctggtggacgcatccgacgccgacaagcggctggagcgccgtctgcccaaggctgtgcccggcacgattgtgtatgagccgattgaaaacggcggcattgccctcaacacgacccgcggatttgcgctggcgcacggcgagtacatcacgctgctggaccacgacgacgtgctctactcgaacgcgctgttcgaggttgtgcagacgatacaaaacaccggagcggattttgtctatagtgatgaaatcgttctctccgccgatttgaaggagctgggcggctaccacttcaagcccgactttgcgcccgactacctgcgcggggtcaactttatcacgcatctggcggtgttcagccgtccgctgctggacgcggcgggcgcgtatgagtcgaaggagtttgacggtgcgcaggaccatgatttgatcctgcgcctgacagaaaaagcacagcgcatcgagcatatcaagaaggtgctctacatctggcgtgccgcggccggctccaccgccgcgggcatggaggccaagccctacgccgtcgcggcggggnnnnnnnnnngagcgcgccatcgacgcgcagctcaagcgtctcggtctgccgggccacgccatggccgtgcccgacgcgcccggcgcatttcaggtgcggtacgagctgaccggccacccgaagatcagcgtactgatccccagtaaagaccacattgacgacctggaccgctgcctgacgagcctgtacaaaaacgcaggctacgacaattttgaggtcatcgtcatcgagaacaactccaccgacccggcgacgtttgcctattacgagacactgcccagccgctttgccgactgccgcgtcgtctactacaagggcgcattcaacttctcggccatcaacaacttcggcgcgacgttcgccgagggcgagcacctgctgctgctcaacaacgacattgaggtgttgtcccacgactttctgcgggaattgctcagctacagccagcgccccgacgtgggtgcggtgggcgcgaagctctactaccccgacgacacgatccagcatgcgggcgtgctgatgggcatcaacggcagcgcgggccacagccacaagagctacccccgcaccgccgtgggggacatgtaccgcttggtcacgacgcagaattatatggccgtgacgggtgcctgcctgatgacaaaagcgtcgctctaccgcgcatttggcgggctggacgaggaaaagtttgccgtcgcctacaacgatgtggactactgcctgaagctgtggcagaaggggctgttgaacgtttacaccccgcgcgccgaggcctatcactatgagagcaagagccgcggccttgataccttaagcgagaacgccaagcggtatgagcgcgaaaaggcgaatttctacgcgaaatatcagcagtatatcgacaattacgacccctattacaacccccatttcaacaatctgtttgagaatttcgggttgaagtgatggaaaccgtattgccgaagcgcaagtctcaccatttgcagggttacgattacagccaaaacggcacctattttatcacaatatgcacgcaccaacgcagaatgttgtttggcccgaaccgggctcccgtaggggcggattccatatccgcccgcatggcggcgcgcgttttccgggagatcatcggccaatatccggcggtccagtgccgttattttgtggtgatgcccaatcattttcacgcgttggtcgagattgaacgggcacgggcggatatggaatccgcccctacgattatcagcatcgtgcaggcgttcaaacggtattctaccgtcgagtacatccgtcttgtcaagcgcgggcaagccgcaccgttcgataagcacctttggcagcgttcctttcatgaccacgtcatccgcaatgaaaccgattaccgcatgattgcggaatacattcaatccaacccccgcctttggcacaaagactgcttttatgaggagccatcccatgagccttgaaacgaaacgcatcaaagaactgttcggctatgcgcggacgctgacgaaagaacagggcgtcggcgtcatggccgggcgggccgtcggcttttttaagcggcggttcttcggcaaaaaagcacggtatctgccgtcgaagcagacgctggagacccagcgtgccgacgcagccgcccgcgccgacggctggccgaccatcagcattctaacgccgctgtacaacacaccgccgcagtttttgcagcaatttttggacagcgtgcaggcccagaccgcgccgaactggcagttggttctggtggacgccagcgacggtgcccacccagacgtgggcgagacagtccgcacccgcgccgcgcaggacaagcgcatcgtctacgccaaaatcgagaacaagggcattgccgccaatacgaacgaggccgcgaagctcgcagcgggtgagtatctggctcttgccgaccacgacgacatgctcgcgcctcatgccgtctattgcatgagcaaagcgctggccgagagcggcacggcgtttgcctacagcgacgaggccctgtttgagaaaacgcccgagcacccgcgcgtcggccacttcaagccagactatgcgcccgagtacctgatggccgtcaactacatctgccatctggccgtgttcaaaaaatcgctgttcgacgccgtcggcggtgagcgcccggcctgcgacggcgcgcaggatcacgacttattcctgcgtctcatcgacgaaatgcagcgccgtgaccccgcagccaagccgctgcacatcccgcaggtgctgtattactggcgcgtgcacgcggcgtccaccagcggcggcacggcggccaagccctatgtggaaaaggctgcgcaaaaggccgtggccgaccatctggccgccacagggcgtcagggcagggtggagccgggcaaattcccgggcacctgccatgtggtgtgggacattcccgagccgcagccgctcgtgtcaattttgattcccaacaaggaccacaccgacgatttggaaaaatgcctgcacagcatctacgccaaaacgacctacgagaatttcgaggtcatcgtcattgagaacaattccaccgacccggccacagcggcctactacaaaaagctgccggagcggtatgaccgcgcgcgggtcgtgacttacaagggcggcttcaacttcagccgcatcaacaattttggccgcaggtacgcggcgggcaagtacctgctgctgctcaacaatgacgtcgaggtcatcaacggcgactggctcacccagatggtgggcgagtgcagtcagcccggcgtcggcctctgcggggcaatgctctactatcccgacgacacgatccagcacgccggcatcatcacggggctgggcggctacgccgggcacagccacaagtaccacaagcgcggcggcagcgggtatatgttccggctggccacggtgcaggatttttccgccgtgacagcggcctgcctgctggtgcgcaccgccgtttacgacgagctgcacggcctggatgaggagttcacggttgcctacaacgatgtggacttctgcctgcgtgcgcgcgacgcgggctggcgcattgtctggacgccctacgccgagctctaccactacgaaagcaagtcccgcggctccgacgagaacgatcccgccaaaaaagcacgctttgacgccgagcatgaacgtctctacgccgtgcacgggcgggagaatattctgcacgacccctattacagcccgtcgctgtcgctggattatgaggatttccgcgagagcggggatttgcggaatctgaaatgagttgatcaccttccccgtgggggaaggtgcccgaggccccgaccatgggcggatgaggggcgggtttgccctattgcccgtcagtgggaaattcccggtaagtttgcccctcatcagtcagcgggcggggccgctgacagcttccccctctggggaagccatactgacaaaaaatgcacgccgtaaattttacggcgtgcgtttttattattcttttttatccggcgggaactcaccctgcttttcggcttccaggcggctcaggcgggcttcgagctcggagatgcgctggttgacaatatccggcagatcctgctggtccagatcgtccgccgggcagcacttgatattgccgacgcggacgatctccgctggtacaccgacggcagtggcgttggcgggcaggttcttcagcacaacgctgcccgcgccgacgcggacgttgtcaccgatgtagaccgggcccagcaccttcgcgcccgcgccgatcagcacattgtcgcccagcgtcggatggcgcttgccggtgtctttgccggtaccacccagggtgacgccgtggtagatcgtgcagttgtcaccgatctccgtcgtctcaccaaagacgatgcccataccgtggtcgataaagagcttgcgcccgatcttggcgccggggtggatctcgatgccggtcaggtggcgcgccagctggctgacaaaacgggccaggaagaaacaccggtggttgtacagaaaatgtgcgatcttgtgcgtgaccagcacatgaaagccggggtacaggatgatgacctccgccacattgcgcgcggcggggtccttatcacggatattttttgcatcttcccaaaggcccatagttcgttcctcttcctatttaccatacttattataaatataccacaaagccggacaaagtgcaatgctgtacgcgccgcgcgcggatttttgcggattttgtcaaatcctccaaaagtcagcgcaaaaatctataaaatccttacttttgcaaaaagcccgtttgcattgacaccgccgtccctgcatggtacaataagtaaaacgtaggtaaagtcataggaaggagtgtgccgggatgatgcgttttatttctgtctttaaaaatcacggcacagtgttctttcccgtcgccgctttgtgtatgactttttgacttttccctttttgggaaaagtttttttttgcaaaaatatccctgcgggatgtttttgcatggggctttgtaggggcgagcattgctcgcccgcaggccgtttgcctcatgcgcggctttcccgcagaagctcaaccacgcaaagttgacgggcgaacaatgttcgcccctacactctcagctatgacaaagtttcctatttttaaggaggttcccaccatgctgatccgcaacgcaaaggacagcgcgggcaaggccattgaggtctggctgcgcgacggaaaaattgccgctgtcggtctggggctgcttgtcccggaaggggaggaggtgctcgacgcgaagggccgcacggtcctgcccgccttcatcgacacccactgccactggcgcacccccggcttggagtacaaggaggacatctcccccggctccgccgcggctgccgcgggcggatacaccttcgtcaacctgatgcccaacacgaagccggtctgctccagtgccgagatcgcccacgccgttgaggccgaggccgcccgcgtcggcctgtgcgacgcaaaccagaccgtctccatcacgaaggacttcgacggcaaaacgctggatcatctgctgaccctgcccgaggacatcaagttcatcaccgaggacggcaacggcgtcatgaacaacgccgtcatggcccgtgcgttcgcgattgccaccgagcgcggcctgaccatcatgtcccacgccgaggatcgcgagatcagcccctgggactaccgcctggccgagaacatcgagaccgtgcgcaactgccatctggccgagtactacggcacccggctgcacatgtgccacgtctccaccagggaatccgtcgacgccgtccgcatgagccggatgcgcggtgcgcgggtcagctgcgaggtcacgccgcaccacctgtggtttgacgacagccgcctgacctaccgcgtcaacccgcccatccgcaaggcggacgatgtgaccgcgctgatcgacgccatcaaggacggcaccgtgacctgcatcggcaccgaccacgccccccacaccgccgaggagaaggagaagggcgctgccggtatggtgggtctggaaacggccttcggcgtctgttacaccaaactctgccgtgagcagcgtctgccgctggaaatgctcagcttcctgatgagcgccggtcccgccgccgtgctgggcctggccgaccgcaagggcatgctggagccgggctacgacgccgacatcgtgctggtggaccttgaccacatgtacgaggtccacgccgacgagctgcacagcaagagcaagaactgcccctacgacggcgcactgctgtacggaaaagtggtaaccacgatcaaaggcgggaaggttacgttccagattgaagaataacatcccttcacgcacaaaacacccgtaggggcgcattctatatgcgcccgtgcaggctgccgctggcacagtcccgcgggcggatatggaatccgcccctacgattcccaacattatataatagagccgcaatttatatacatcaaacggaggaatcagcatgcttaccaacatggacaagctctacgagagcgtcgcagcaaacggcccggtctgcgtgggcctggacaccgagatcagctacctgcccaccaccgacaccgccaagacagcgggggagaatgtcgtcgcgttcaaccgtgcgctgatcgacgccaccaagggcgtcgcgggctgctacaaggtgcagatcgcctattatgagtccctgggcctggacggcatgcgcgcctacgccgaaacgctgaagctggcccgcgccaccggcctgcccgtcattgccgacatcaagcgcggcgacattgccaagaccgccgaaatgtacgccaaggcgcactttaccggtgatttcgaggccgacatcatcacgctggccccctacatgggccttgactccatcagcccgtatctgccgtactgcgccgagcagggcaagggcgtgttcgtgctctgccgcacctccaaccccggcgcgaaggactttgagtacaaaaagctcgacgatggccgtcatgtgtacgacctcgtcggcgacagcctgaccgcccttggcaaggactacatgggcgagcacggctattccagcatcggcctggtcatcggcggcacccacaccgaggaggccaccgccatccgcgcggcctacaaggacaccttcttcctgatccccggctacggcgcacagggcggcaaggcagcggacatcgcgcagtacctgaccaagggcaacggcggcgttgtcaactccagccgcggcatcctgctggcttacaagaagcagcccggcgttgcctttgacgaggctgcctacaacgagtgcgtgcgtatgcgggaggatattcagggtgaatgcaacaagctgtaatctgacggtcctgcgccaggaaaccgtcgcagaggatattatgcgccttacggtccagtggcaggaccgcagccgcgagccccacgccgggcagttttacatgctgcgcgcctgggccgcggacgccacgccgattctttcccgccccatcagcgttgacgactttgacaaccagaccggcgcactgaccttcctgtatcaggtcaagggcgagggcacccacaagctggccgcgctgaaaaaggacgacacgctgaccgtgaccggcccctgcggcaacggctttgacactgccgcactggccgggcagtacaagcgcattgccgtggtcggcggcggcatcggcaccgcgccgctgctgctgctctgcaaggagctctgccgcgcgggcgtgcgccccgacctgttcgtgggcttccgcgacacgacctacggcatggaccgctttgtgccctggtgccgcgacatctacgccgcaaccgactccggcaaggagggacaccacggtctggtcaccgacctgctggacgtgagcaagtacgacattgtgctgacctgcggccccatggtcatgatgcgcggcgtggctaagctctgcgccgccgctggcgtgccctgcctggccagccttgaaaagaagatggcctgcggtctgggcgcgtgcctgggctgcacctgccatacgaaaatcggcccggtcaccgtctgcaaggacggcccggtctttaacgcacaggaggtgtttgactgatggcagacctgcatgttgattttctcggcaagcggctggccgggccggtcatcgcagccagcggcaccttcggcttcggccccgagtacgcgggcattgaggatctgcgcgtgctgggcggcatctccggcaaggggctgaccctgaacggccagcccggcaacgagggtgagcgcctctacgagacgccgtcgggcctgatgaactccatcggcctgcagaaccccggtgtgcagcactttatcgaccacgagctgcctgccatgcgccggtgcggcaccaccgtctgggcgaacctcggcggccacacgattgaagaaaacgtcgagggcgtgcagatgctctgcgccgcgggcgtggattttattgagctgaacatcagctgccccaacgtcaagcagggcggtctcgcgttcggcatccgcgcggcagacgccgccgaggtcgtcagcgcggtgcgcaaggtctgcaccgtgccgctcatcgttaaattaagcccgcaggccgaaagcatccccgagatgtgcaaggccgttgaggctgccggcgcggacgccatcagcctgtgcaacaccttccaggcgtgcgcgatcgatctggaaaagcgccgtcccgtgttcaacaacacgtttgcgggcctgtccggcccggcggtgcgtcccatcgccctgcgcatggtctggcaggccgtgggggccgtcagcatccccgtcgtgggactgggcggcattctgacgggtaaggacgccttggagttcatcatggccggtgcagcggcggtacaagtcggcaccgcgaacttcctggacccgaaggcctgcacccgcatcacgaacgagattggccagtggatggacgcccacggcgtcaagacgctggatgagatcagagggtgcgcacggtaaatcaccggctgccttcccctcatccgcccgttcacgggctataacggcaagcccggccctcatcagtcggcgggcgggccgccgacagcttcccccgcgggggaagccgccccgccatatacattttgcttgcatttttatacaaaatatgctactataagttgaataacatacaggaggaacaaattatggcacgcgaagcacttgaagttttaaaggaatgtgaagcatttttagaggggcacttcctgctttcctccgggcgccactccggcgcttactgccagatggcatttctgcagcagtaccccgacaaggccgcggaggtcatggccccggttgccgagaagctcaaggagctgaacattgacgtcgtggtcggccctgccatgggcggcatcgtctacgcctacgagctgggccgccagatgggcaagcgcgccatcttcaccgagcgcgtcgacaacgtcatgaccctcaagcgcttcaggatcaacccgggtgagcgctgcatcatcgcggaggacgtcgtcaccaccggtgtttccagcctcgagaccaagcgcgtcatcgaggaaaacggcggcatctgcgtgggcattgcctgcgtcgtggaccgcacccgcgccgaggccccgtccccgatccccatcgtcgccagcgccctcaagctcgacctgcccaactacgcccctgaggaatgccccatctgcaaggagggcaagctcccgctggtgcacctgggcagccgcaaaatgaaggaagctgcgaagcaaactctgtaaaagataggagataggagatgggtacagtttgccttttctcctctctcctcactccatatcttaaatgtaaagtgagaggctaccaactatgcaggcatatctgatattggccaatggccgggtgttccgcggcgtcagcgtaggctgccccggtaccaccatcggtgaggtcgtctttgcaaccggtatggtcggctttgaggaaaccctgaccgaccccagctactacggccagatcatcacccagacctatccgctcatcggcaactacggcatgaacagtgaggatgtcgagagcacgaagatttgggccaggggctacattgtgcgcgaggcgtgcaagaccccgtccaacttccgcagtgaggaaacgctggatgccttcctgaaaaagaacggcatcatcggcattgagggcatcgacacccgcagcctgacccgcaccctgcgggagagcggcgttatgaacggcgcgatcaccaccgagttcgaccccgacgccgagcccgagaagaaggccgcgctgctgcccgagatcgccgcctacgccgttgtcgacgccgtcaaggccgtcacctgccgcgaggccgtgacctatgagccgacggctgccggtgcatggggagacacgccgctgcacgtggcgctgctcgacctgggctgcaagaacaacattgtgcgctgcctgcagaagcgcggatgccgcgtgaccgtgctgcccggcacgaccaccgccgccgagctggccgccctcaaccccgacggcctcatgctctccaacggccccggcgacccggcagagaacgtggaaatcatcgcgaacatccgtgaaatgctgagcaccggcatcccgaccttcggcatctgcctgggccaccagctgaccgccctggccgccggtgccaagacctgcaagctgaaatacggccaccgcggtgccaaccagcccgtcaccagcccggccaagcagcgcacctttatcaccagccagaaccacggctacgccgttatggcggacaccctgcccgaatccgtcggccagatgagctacttcaacgccaacgacggcacctgtgagggcgtcgactacttgaaatggaactgcttcaccgtgcagttccaccccgaggctaacggcggccccaaggacactgaatttctgtttgaccagttcgtcagccgtatgctggccgcgaaaggagtaatcaacaatgcctaaagacccgcgtatcaaaaaggtactggtcatcggctccggccccatcatcatcggtcaggcggcagagtttgactactccggcacgcaggcctgccgtgcgctgaaatccgagggcgtagagaccgtcctcgtcaactccaaccccgccaccatcatgaccgaccccgacattgccgatcatgtttacattgaaccgctgaccgccgaggtcatcgagcgcatcatcgagaaggagaagcccgacgccatcctgccgaacctgggcggccagatgggcctgaacctgtcgatggagctggcccgcaacggatttttggaccgcagcggcgtccgcctgctggcctgcaagcccgacacgattgaccgcgccgaggaccgccagctgttcaaggacacgatggagaaactgcaccagcccatcatcccttctaaggttgtggaagatctggacgacgcgctggactttgccgaggtcatcggctaccccgtcatcgtccgccccgccttcacgatgggcggcaccggcggcggcatctgcgaggaccgcgagaagctgcacgaaattgccacgaacggtctgcgcctgtccccgatccatcagatcctcgttgagaagtgcatttccggctggaaggaaatcgagtacgaggtcatgcgcgactccaaaggcaacgtcatcacggtctgcaacatggagaaccttgaccccgtcggcatccacaccggcgactccatcgtcgtcgcgcccagccagaccctgtccgataaagagtaccagatgctccgcaccgccgcgctggacatcatcaccgagctgggcatcgagggcggctgcaactgccagtttgccctgaagcccgacagctttgagtacgcggtcattgaggtcaacccccgtgtgtcccgctcctccgcgctggcctccaaggcgacgggctacccgattgccaaggtcgcgaccaagatcgcgctcggctacacgctggacgagatcacgaacgatgtcacgggcgagacctgcgcctgctttgagccggccctcgactatgtcgtcgtcaaatacccgaagtggccgttcgataagttcgtctacgccgacaagtctctgggcacccagatgatggccaccggcgaggtcatggccatcggcaacaactttgagcacgccatgatgaaggccgtttcctccaccgagctcggcctggacacgatgacgctgcccgatttcgagaggctgacgacggaagaagtcatcgagcacctgcatgtgcaggactccgagcgtgcgttctgcgtctacgaggccctcaagcgcggcgtggcgcacgacgtcatttatgacatcaccaagatcgactggtggttcctcgacaaactgcagcatctggccgacattgagatgggcctgaaaaacggcgagctgacgacggaaaagtacctgaatgccaagaggttcggtttcctcgacaaaacgatacgccgtctggcgggcgtggacaccctgcccgaggccccgaaggccgcgttcaagatggtcgatacatgcgccgcagaatttgccgccaagacgccgtatttctactccacctacgacgaggacaacgaagcgaagccgttcattgccgagcgcagcgaccccgacaagaagaaggtccttgttttcggctccggccccatccgcatcggtcagggcattgagtttgactattgctcggtccacgcggtctggacgctgaagcagcacggctgcgaggccatccttgtcaacaacaaccccgagacggtctccaccgactttgataccggtgaccgcctgtactttgacccgctgaaccccgagagcgtcgaccacatcatcgagaccgaaaaaccggacggctgccttgtgcagttcggcggccagaccgccatcaagctggccaagcacatggacgacatcggcctgccgattttgggcacgcccgccgacgccatcgacgaggccgaggaccgcgagcgctttgacgagctgctggagcgctgcggcatcccccgcccggagggccgcaccgtctttacgctggacgaggccctgcaggccgcgcaggaggtcggctatcccgtcctgatgcgcccgtcctacgttctgggcggccagaacatgatcgtcgcctacaactccgccgatgtcatcgagtacatgggcgttatcacgaagcacgttgacatgagccatcccgtgctgatggacaagtatattctgggtaccgagtgcgaggtcgacgccatctgcgacggcaccgattatctggtgcccggcatcatgcagcaggtcgagcgcacgggcgtgcactccggcgactccatctgcgtctacccgccgtacaccttcagccagaaggtcattgacacgctggtcgattacacgggccgctttgcccgcgagctgaaggtcgtgggcctggtcaacgtgcagtatgccgtccagaatgatcgtgtctacgtcatcgaggtcaacccccgctcgtcccgtaccgtgccgtacatctccaaggtcaccggcgtgccgatggtcgacctggccgtgcgctgcacgctgggcgaaaagctcaaggacatgggctacggcaccggcctgtggcgcaacggcaagagcccgtactacgccgtcaaggtgcccgtctacagcttcttaaagctgcacggcgttgacacgatgctcggccccgagatgaagtccactggtgaggtcctgggcattgcgccctccttccacgaggccatgatgaagggtctggtcgcagccggctatcagttcaagacacccggccccggctcctgcgtcatcatctcggtcaaggacagcgacaaggccgaggccgccgagctggcctggaagctgcacgactacggctacaagatctacggcacgcccggcaccgccaggttcctgaacagcgagatggtgccctgcagcgttgtgcgccagatgagcggcgcgcgccccaacgtcatcgacctgttggagagcggtctggtggattacatcatctcgacgagtccgcatggccgcgacccgcaccgtgactccgtcaagttccgccgcaaggcaacggagctgtccatcccgaccatcacggccatggacactgcccgcgtcctcgtcgatgccctgcgcggtgaccatgacatcagccagatggagctggtggacattgcgcacctgcaccgcgaagcggcgaaaggggaataagtaagcagcaaacaaaccgcgtccgcaaggatgcggtttttgttttttcttggccctctctgcgagggggctccgcccgcaggcggtgggggagagaaccttttccccggtgactacgactacatcaggcagggccgcgggcacaacgtctgcctggccgtcagccgcgacggcgagcacatcgacagcaagcagtgcctactgtacaacaaggactatcccgccgggctgacctgccatgtgcgcgaccccaaggtgttcgcttatgagagccgttattacatggtgctgggggcccgcacggtggacgacaggggagaggtgctcgtgctcgagagcaccgacaggcagcactgcatgacgctcccgcgcgtgctgacccacgacggccaggggcacattttgcaaaatcccgcgcctgagctgactgccgccccggcgggcgacttctcgctggcctttgacggcgggctgacgctggcttatgccgatgccgcccgcatgggactgtaagactttgcccgtcaagaatatttttgcatggaacgtgcattttttgccaaatgtcactttttgacgagatgaacgtgaaaattttatagtttttgccgaaaaacgtttgatttccgaaaaaactcttgattctgcgcacaattttctctataataatagcgtaataataccgggcaattgtgtgcctataaggataggagttaaaaatattatgacgagatctcagttgattaccaaggttgccaacgacaccaacatgaccgctgctgaagttgagaaggttatggacggcatcttcggcaccatcggcgatgtcctcaagagtggcgacaaggttaccatcgcaggctttggccgcttcgagatgcgtgagcgccagaccaagaacttcaccaaccccaagaccaaggtcaccagcaagctggagccgacggccatccccggcttcaaggccagcggccgcctgaaggagaaggtctccggctgatttcgtctgtattgatatgatttggaaggacccgcggaaatgcgggtcctttttgcgtctaagcctcccttgtcaaagggaggtggcccgcagggccggagggattccgacgggctttccgggttcaacacccccgcggcggcatgagggcatgccgccctacgtctgtccgcggagtatacgtagggcggggtgccctcaccccgccgggtcgtgtgcggccaccgcaagcctcccgggtcgtcgagggcgccgacccctacagcagcaaaaaacggagcgccgcattttcatacggtgctccgtttttatttttgcaaaattacagatgaatatgccgcggcacgccgttgatgtagatcggcgacagctcggcctggatgagcgggcgggcgtagcgctcgaacttctcgttgacgtgcatcccatcctcggtgatccagtcggcggggaccttcttctcaaagtttgcgaccttcgtcacatcgaccatctcggtctctacgcggtagggctggtcgctcaggcgcttgatggcggccatcttggcggtctcgccgcgcatggcggcctccaccgctgcgccgccgacctgataggcctcggtcacatcggtgcggctggccagatggctggcacagcgctgcagcgtagaaaactcgatagcgcgggtcttgcagcccaggcggacgcggatcaggtccgccagatagcggctcgtgccgctcaggatggccatgtggccgaaggcatccagctgacctgccgtggagaccaggtcgcacaggaaaacgccgtccttgttcttgacgccctcgctgaccgcgataataacattgtggcgctctttttccagctcggccacgcgcttgaggaacgcctcctcgtcaaaggggcactcgggcagcaggatcaggtctgggccgttgcagtccggaccggcagccaaactggcggcagcagccagccagccggtgtggcggcccatgatctctgccaccgtcacgctgcgcaggtcgtagacgctggaatcgcagatgacctccttcaggatcgtggcgatgtacttcgccgcgctgccgtagccgggggtgtggtcggtcagcatcaggtcattgtcaatggtcttgggcacgccgataaagcggatctcgctgttgacggtcttgccgtaggcgctcagcttggagatcgtgtccatcgagtcgttgccgccgatgtaaaacaccgcgccgatgtcgttctgccggaacagctcaaacagctgcacaaacggcttctcgtcaacggaggggtcgggcagcttgtggcggcagctgcccagaaagctggacggcgtgcgcttgagcagctcaatgtccattttgtcgcccagcacggtgtccagatcgatgagcttgccctcaagcacgccctcgatgccgtactgcatcccgtagacatggggtgcgccacaagccttggcggtctcatagacgcccgccagactggagttgatgacggcagtcgggccgcccgactgaccaaccagaacatttttcatgaatttacctctcgtatattttattttaattttacaatacgtatttttctattgccgctgccacaccgtcatgattgttgtcatccgtcgtgacatcggcaatttccctgatgtcgtcggtggcgttgcccatggccacacccagacccgccgcttcgatcatcgcgcggtcattgccggagtcgcccacagccatcgtctgcgcgcgggtcaggcccaggtgtgccgccagcgccagcagaccgctgcccttcgtcacgccgggggcgttgacctccatgttgcggggcaggctggacgtcaactccacgccggggcaggcggcctcgatggcacgccaggcggcgtcgcgctcggcctcatcgtggtagatcatgctgtacttttcgatctcgtgcgcgtgagtgcgcagcgtcgcgtgcatgtcgtctacctcaatgcgggtcgtgcggaagtagcttttcaggttttcgggcaccacgtccatgtggttctcggcgtttgcgcgggtcgtgtagcttttgccgccgatgaaaatgctcatcatgccgccgccctgctcaagaagatcgtaaattttcaatgcctgctcggtcccgaacggctggttcaccaactgctcgcccgttgtcaggtcaacgacgctggctccgttggaggtcagcgcgtaccgcacgccggggatggacgtgaacgccgcggggatgccgctggctgtacgcccggtggcgggcagcaccgccacgccgcgtgcacaggctgcgcggatagccgccagcgtgcgcggggtgatctcttttttatcgttgaaaactgtcccgtcgaggtccaacgccacaaggcggatgtccttcataccttcacactcccttatctgatttattgtaccgcaaaacccgcgcgattgcaagccgcgcgcgggtgtgctagaatagtgttacagtaaatctttgggaaagaggcggtaaaatgcccatactgcgcaccaaaaccagccgtatgtggttgcccgacgccctgcgcgggctggcgctgctgaatatgctggcctaccacgctatgtacgactgggtgtatgtgttcggccacgaaagcagctggtacaacatctgggcctccggctgccatgtgtggcagcaatatatttgttggagctttattctgctgtcggggttcagcttcccgctggcaaagcggcccgcaaagaacgggctgatcgtggcgggctgcgcggctgtgctgacgtttgtgaccgcggtgttcatgccgtcggaggcaatctggttcggcgttctgcacctgaacgctgccgccgtgctgctgacctgcctggtctatccgcttttgcagcgtctgcccgcgggcgcgggcctggcggcgtctgcggcgctgtttgcgctgacgaaccagctgcccgaagggtatttgggcttcgagaattggcggctctgtgcggtgcctgcgggactgtaccgggccaacctgttctggctgggcctgcccgacctgacaaggttcacgtcggcggattattttcccgtagtgccgtgggtgttcctgttctggtgcggtgtgtttctggcgcggctgtggcgccccggcaggggagagccgcccgccgcgctgcgtcctctgtgtgccatcgggcgcaatacgctgctggtctacatgctgcatcagcccgtaatctacggtgcgctgtgggtgtggcacacagtgctggggtaaagggtcctaaatatgaacaatataaaaattttcattttagcgaaaattgttgttgacagacagggggtcaatatagtataatcttttttactggttaatagtatttgaccggcaaactcctgtctcaggtcaagggagggaagaagatgtcggagatccgtgtcaaagagggcgagtccctcgagagcgctctgcgccgttttaagcgcagcactgctcgcagcggcgtgttagctgaggtccgcaagcgcgaggcttatgagaagccttccgttaagcgcaagaagaagtccgaggctgcccgcaagcgcaagtttaagtaaggtatcttacaacgaacgactgtgcaggttcgcgttacgcgcgggcctgcacttttattttagggcaaagcggcaatggcggcagccttccacgggcggatatggaatccgcccctacacgtaggggtcgatgcccgcatcgacccgacaatgcagcggcctccgccatgctcccgcagggtgtcggagacgccgacccttacaacttttatttaaaaggtcaccaccatgattctaacccctgaatacatcttcaaaaccatcgagtgcatccacccggattttctcgcggcacacggcatcaaagccctcgtgctcgacgtggataacaccctgaccgctgacaacagtcaggtgctggagcacaccgtgcaggcgtggctggacgagatgcgcgcagccggcatacgcctgaccatcgtgtccaacaatacggccaagcgcgtgcgcccctttgccgagcgcatcgggctggactgggtgccgctggcctgcaagccgttcaccatcggcctgcgggtggcgcgccgccgcctgggctgcaaaaagagcgaaatggccatggtcggcgaccagatctttgcggaccggatggctgccgggctgtacggctgcccgtgcctctacctgatgccccgcacgaaccacgacaagaacaaatttgtgctgttaaagcgcaagtttgagccgtactggatcgacaaatactatcagaagggcggcaagctgtatgaatgacaccccgcgcttcggcacagccggtctggccgacagctacacagtcaaaaagtttgaccccgccgccatcgccgcctacacggcgggctttggcctgacggcatttgagtaccagtgcgggcgcggcgtgcggctggcccacgacaaggccgctgcgctcggtgccgcctgtgccgagcgggacattgccctgtccgtccacgcgccgtactacatcagtatgtcgagtctcgaggaggacaagcggctgcacagcatcgactacctgctgcaaagctgcgccctcgtcaaggcgctgggcgggcggcgcgtcatcttccattccggctcctgcggcaagcaaagccgggaggaggcgctggaaaaggcgctggatacgatggcccgcgctgtcaaagcctgcgacaaggccgggtttgaggactgcatcctctgtcccgagacgatgggcaaggtcaaccagctcggcacgctggacgaggtgctggctctatgcgaggtcgacccgcgcattacgccctgcatcgacttcgggcacctgtacgcccgcagctgcggcgtgcagtttgccgacgccaccgccgtcgcggactacgccgccctgctggacacgctggccgcgcggctgggggatgaccgcgccgtgcatttccacgcgcatttttcccgcattgcctacaccaagggcggcgagaagtgccatctgacctttgcggatacagcgttcggcccgccccacgcaccgctgctggcgctgctcaaggaacgccatttggccccgacgatcatctgtgaatccgccgggacccaggccgaggacgccgccgcgctggcccaagggtacgcagcgctgtaaattggacaaaaaatatcaattttcccgcaaaaaagtccgaacaggacttgcaaaattgcttttcatcctgtaaaatataaacaggtatgtataatttatttatggaggaatttctatatgatttctgcaggcgaattccgtaacggtgtcaccttcgagcaggacggccaggtccttcaggtcgttgagttccagcacgtcaagccgggcaagggcgctgccttcgtccgtaccaagaccaagaacgtcatcaccggctctgttgttgagaccagctacaacccgaccgccaagttcccgcaggctttcatcgagcgccgcgaggtcacctactcctacgaggatggcgatctgtaccacttcatggatgttgagacctacgacgacattcctgtcggcgcggctgacgtgcccgataacttcaagttctgcaaggagaacgacacctgcaagctgctgagctacaagggcaaggttttcagcgttgagatccccaacttcgttgagctggaggtcaccgctaccgagccgggtgtcaagggcaacaccgccaccaacaccctgaagcccgccaccgttgagaccggtgccgagatccgcgtccccctgttcatcaacgagggcgacaagatccgcatcgatacccgcaccggcgagtatatggagcgcgtgaactgattaggttctctttgccgggcatggccgtaccgccgcgcccggcattttttaatattagggaggattttgactatggctatggatctgaatgcaaaggccgcctacatccgcggcctgatgaccggtatggattttgacgcagactccaagaacggcaaggtcattgccgccatgatggacctgctggaggagatggccgcccaggtcaccgagcacgacaacgccctggatcaggtgtacgacgagctggagaccctcgaccaggatctggacgacgtcgtcagcgacatctacgccgatgaggacgaggatgacgaggatgacgaggaggacgccgaggacgacagcaccatgtatgaggtgacctgcccgaactgcggccagatctccacgctggacgaggagaccctgatggatcccgagggcgatctggtctgcccgcactgcggcgcgaccttcgacatcgagcttgaaggcaccgaggacgactctgccgaggagaccgacaagcaggaccactaagcagtaaatctccgttctgtatgggcggatgcccgtcatccgcccgccccgttttgacatcaagtgcaaaagcccnnnnnnnnnnccgtttggctgcggggctttgtgttttgtgcggggcaggggagacgcttacttcttccgcagcgcgccctgcagcatgatgtcgccgaaggacagcgcgttgtacaggccgactttgttggcctggcgggcaatgcgctcgggcaggggcttgctctcgtcggtggaaagcagcacgatgtggaccttgtcggccacgtcgacgccgttttccttcttggtcgaaagcacctgcaggtagacaacgaacgggtccttcatcgagccgtagtaaatatcgttgccgcagcgcaccagcgggcggcccttataggtcagtttcggggtataagccatatctgagaccttctttctctttagtcaatactttattatagcatagttttggagggaatacaaattttaattttgcgcacccccaaagcattcccccaagggggaaaaaaggcggcccatagggccggatgagggggagccttgccgcaattgcccatgagcggcctgccatggcgcacccgcccctcatcagtcagcggtcggggccgctgacagcttcccccaagggggaagcctttttcacaggtccagcttatcccgctccgccttttcctcgttcagggcgacctgctcggtcaggatacggaccttgctgtcgagctggctcaatttgatggacataaagaactgcttggccagcagcaaaaagatgatgacaacatagacaaagttgatggggctcatgaagcccagcaggtttgcggcccaataggcgatgccggggaagatggccaggatcagcagcgccgcactgaacatcagccagaagatcgtatcctcgatctggacctttgcgtgccgcacgcgccgcaggatgtaccccgccgtgatgaagctgcccaggatcaggcagacacgaatcagcgtttgatcgaacatttcacaggctcctttcggggtagggcgtctcggtgtcgcgcttgcggaaccactggatcaacagaatcgagatggacattttgaccatatactgcacgctgcgccagaaggtcaggtagctctggcccgccagacgttcgcccatttcgacctgcacctccttgaccgtcgcgccgtttttgatcagatagctgatcgtgtcgggctcggggccgtagttcaggttctgggcaaactcctcgaccatggcgcggttgaacatccgcatgccgctggtcgggtcgcagatggcgcggcccgtcgtcaggcggatggaccagctgatgatgtagctgcccagcatccgcagcgtcttgggcttcttcacggtcaggaagcggctgccgatgacaatgtcgttgccctcctccagcgcggccagcatcggggcgatatactccggcttgtgctgaccgtcggcgtccatctgcatggcgcagtcgtagccgttctccgcggcaaagcgtagcccggtctggaacgcgcccgccagccccaggttgaccggcaggtcaatgagccgatagccgtgggcacggcaaagcgccgcggttttgtcgcggctgccgtcgttgacgaccacgtaatcatactgtggataactgcgggtcagctcctcgacgacctgcacgatgttggcttcctcgttgtgcgcggggatgacgatgagtaattttgacatcttagctccttttggcagacgttacggcttccatcattgtagcaaagacagcctgccatgtaaagtggctgcaaaggttttggcgggcgttttcggcgcgggtgcgggccgcagcggggtccgccagcagcgtttccagccctgcgcggatggtctcgggcgcggcgtttgccaaaaacaccgcgtagtcgtccccgggcagcagctcgtcggtgcccgccgtgcgggtcgtcacgatggggcagcggcaggccgccgcctcgagcagcgtcgtggggaagccctcggcgtactcggtgggcagacagtaagcgtccgcttgtgtcagcagctggacgatctgctcatgcggcagtgcccccagcgcatggataccgccgcccagcgcggccagagcggcctcctcggggccggtgcccgccacggccagcgtacagcccggaatgccctgcacggcctgagccagccgcagcgcccccttctccgggatgagccgcccgacaaaggcgacgagcctaccgtccgcgggcacgttcagcctcctgcgccagtcaaccgcgttgtctgcgtgggccagccgttccagctcggcagggtcaacggcgttgggcagtcggcccgccgcctggatgccgaacgtttccagccagcggcagacatccccggagacaccgtagaacgggaacccgcagcggcggatgctgccgcaggccgcgtgctcatacgccttgcccagcgccccggccagcccgccgtgcagcatatagccggtggagtggtcgatgaccagcgccgggatgccgcgccgcttacactgccgtgcggcccagacgctttgcgtgtacatccgggtctggataaccgcaaagtcgatgccctgtgcccaaaggtcgtctgcatcggcaaggggctttaacacggggaaccgcccgcccatgacaggccaggacggcagacggtagatttcgatgccgtcggcatcacgctcccgcgcgggcaggcccggcagcgacgccgtgacgacaagggcgcgatgccctgccgccacacaccgccgcgccagattccaggtataccgctcgaccccgccgggggtggggaggtattgcgttgagaagaaacagataaccatagtacagccttttttagcgaaaagataagcgataaaagataaaaaatatggtggatgcggctcactgacgcgcccgcaaaatttgaaatcgtgcgccttgcgcactccttttttagtatctattatcttgtttttatcttgcaataatcgccagcataatattcacgaccatccccgcctgtaccaatgcaagcgcggccacaaggcgggtctgggcggtgtcctcgtcgggcacggcggccagacggcggggcaggcaggtcagcagaagcagcggcagcacgggcaggaagtaccgcccctgcaggccgtacagcgtgtcgtaatgggtgggtgtccacaaaaggcacccggccacggccagcaggcagcagagcgccgccgccgcgcagcaccagccgcgcgccttaccggcgggcttcatcaccgcgccctgcacgggcagcgccgcgtaggccagcagcaggtacagcaccgcgacccagccccaggccagatcaacggtgtagtagctcaggctgccgcccaccagcgtgcggatgtaatggtcgccgttttccacggcgctgcgcacaaacagcagcaccgtatccacgggatggcgcaggatgtagcccggcgtgtaggtggctttgtcggcctcgtccgccgtgctctgggtgctgcgggtcgcgcgggcggcctcgacctcctgcgccagcaccgtgcggtccagcgggatgcggtcatccatcgtgccgacgtccacacccagcgcggcgaagctctcgacacagctggtcaggttgaacagctgcttgtaggcctgtaccgcgccgccctcggcaaaatagggcaggtaggcgtccgcgttgccgtcggtcacatcggtgcccagcagcgcataggaggccatcgtgtaaaatgcctggccgtcggtgtagccgttggccctgtcgggcgaaaagaggaaactctgccccagcaccgccgggctgacgtcgccctcctgcatggcctgcacccagaatgcgacctcgcgggccgcggggctgcggttgtcgtccacgtaataatacagccgcttgacgtagttttccagcgtactctcgccgcagatctcggcctcgtaggcttcgtccggctctgcggggcggctcttgaccgtgcggtctgcgtcctccgccgccgtggtctgcactgcggtctgcccgctgcgcagcgtatcggtcagaaggcccgtattcagcagcagcgccagcgccagacaggcggccagataggcgcacttcttcgccctggcgtggtgccccagccgcgcggcgggcaccagcagcagcagtgccgccagcggcagatagacgagcttgcccggggccagcagcacgccgcagaacagcagcgccgtcagccgggcgggggagagcgcctttttctgattcgggccgaacgccgcgtccatcagcagcgccgtgaacacaaagcacagccccagcagcggcgcgtcccggctgaagctggccgccaggtgcagcgtcatgggcagcagcgcggccacggtaaagacccgcttgccgaacggcgcggtcttgaccgccagcgccgccagcgccgcaaagagcagcagatttgcaagccgccccaaaaacagcgcgggcgcaaagccaaaatgcagcacataggccagaaataccgccgccgcactgacgacgtacagaagcgggttctggtcggtctgcaattcattatattcctgatggctgtcaaagggctgatctgtggtggtgaacagctgggaggtgaacgcctcccacgtaaagaccgtcgtgttctcgttttgcaggtcggcgtcctcgtcaccgacgcggcggaagctcgtcgtcgtgggcaccttacccatccgccactcgtcgtgggacaggtcgttggcccagcggcaggccagcgtaaagctctggttgatgtggtatttctcgtcgggcgcggcataaggcggcagcacaaagctgtacagcagtccaaagccgagcaccagcacaaaaacaagacggtgcagtgccagttttttgctaagcaccgcccacacggccagcgcggccagcacggcggccagcccgcccacaagcaggaagaaccgcgtcaggtagccgccgatgcgctggtaggtgatctgcatcgccatcgtgccgtcgatcacacggtcatccacggccatctgctccttccagagcgcgacaccgtcgctgtggccgatggccaaaatcgcgtccgtcgcgtagtgcggcgtgacggccagcttgtagcggcggccctcctgcccggtcacggcggggtccatccccagggtcgtgtactggtcgggcacgatgtagtccatcgtaccgacggagcgggacagctcctcgccggtgtcggcgtcgtagagcacaacgtccagcgcaccgcagggctggtcacccggcaggtaaaattcaagacctatcgtcaaaatatccttgtcgtaggtaaagacctgcgttgcggtctggccgtcctgcaaaagctcggcccgcaggaagtcggtgacgatctcactgcggcccttgcccacatcgggccggaccttcgccagccagatcagcaccacgcccgccagcagcacgacaagcgttgccagtgccgccagcaggggggtatgttttttgtttttcatgaaatctccttccgttaggccgtaggggcggatgcccgcatccgcccgcgggtcgatacaagcatcgacccttacagccgcccgcaagtttagcgttacaattccacctgaaacgcctttttcacagcgtcgttccagcgtccgtccccgcgcaggatcttctccaccgctccgcggacggcaccctcgccgccgcgctgggggcagatatagtcggcgcgcgcccgcacctccggcgcggcatccgccgggcaggccacaaagccgcacagcgccatggccgccagatcgttcaggtcatcgccacagtaggcgacatcgtcccgcgcgtagccgttttcagccataaaatcccgcagaaacgcggcttttttgccaacattctggtagatgtcggtgattttcaaatctgcggcgcggcggcgcacggcctcgcactcgcgcccggtgcagatcatcacgcggatgcccgccgtgcgcgccagcaccagcccggcaccgtccttgatggcaaatttcttcagctcattgccggtggcgtcgtagtagacgccgccgtcggtcatcgtgccgtccacgtccagcaccagcagtcgtatcatcgtcagaccctctcgtactcgctgggggtgataaattccacgggcaggcccgccgcgcggatggcccccgccatctgggcattgtaggccgcaccgcgcccggtgtgggtgtgcaggccctcgtccgcgtaggcggcagtgcccggcctgtagccgtcggcaccggccagcagcacccgcgccgcgccgcactggcgcagcagacgcagcagcatcagcacgctgttgccgccctgcgcgtcggtggcggacagccggtcatagttgaccaccgtcgcgtccttatcggcgcgcaggttgctggtcaggatcagcgggcaggggtaggcggcatccacgtcaaatcgttttgcgttcgtgaaaaacgcatagtcgggcgtcacaaaatccggcacaaagttggccgagactgtcacgtcggcctgcgcggctgctacagcggcacgtccagcctcggcagccagactgccgccgggggccagcaccagcacggtcttgcccgcaaaggccctctgcagggcggccagtgcgcctgcgtcgtcgatgcggcggttcttgtactcggtgtagagcgtgtcggcgtaggcggcatcaaacacagtctttttattcggcgcgatggccgccagaatatggttgatgtcgcggttcgtcagatcgcccttgccaaggtaatgctcggcatagttgcggtgcagattgaacttggccgacaggaagtatgccggggtgtagccccacgcgcagttgcccttgatgggcgcaatgtggtcctgaatggcatccatgaggtcgtcaatgttgtagtggccgccgaagtactcgttcatatagtcggcgatcagctcaatcggcaggttgccggggatgcggcccatgcccatcaggctgccgtccacagccaggtcgcggcgcagatgcttgtcgagaaattcctgcgccaggcagaagctcagcgccatgttctcatgcaggtgcagcgccaggcggatgtccggggctaaattatggtcagccatgctgacgatgcgctccagatcgcggcggcgcatgctgccgaaggtatccacaatggagaactgccacggatgaatttcgttgacctgctcaaagatccagagcaggtccttgtcgctgtagcccatgatgttgatggggttgatggagaccttgtagcccaattctttgatgcggcgggcaaagtccatgccgtccttaatgtcgtaatcatgggcggtgatacggatgatttcaatgccgtggccgtcgtagggggacagcttggcaatgtcgtagttggagcgcatcgccatgccggagtacatcgtgtggccgcgctggccctcgtcgggcagcaggcggttcagctcctcaatcgtgttgcagaccgtcacgtcggggtcgtagccgtccacattgcgcagaaagccgacctcgacgatgtccacgcccgcgcgggtcagcgtctggatgatgcggcgcgccgagccgaagccccactgccagttgttcacatagccgccgtcgcgcagggtgcagtccagcagtttaatatcagccatgctgcttctccttcaaaatttcattgaccagcgccagatccttcggcgtgtccacgctgactgtcttgtacgggctgacgatggcgtgtaccttatggccattctcgataaagcgcatcatgtcgttttcctcggccttttcaaggatggatttcggcgtatcatggtagaatttcagtgcctgcttgctgtacagctgaatgccggtgaccttctcgtactcgaaatccagcgtgcccttcgggtaggggatggggctgcgggagatcagcaggatctcccgcgcggcattcgtcacgaccttttggttcgagaagtcgatgacgtcggcggggtgctccataacgttcgtcagcaccgcgacgtaataggggtcatcgggcagcgtgtcaggcaggatcaggtcgaacgccgcggggttgacgagcggctcgtcgcccatgagctgcaggtagaggtcggcgtcctcgacggtgctgacctcccagatgcgcccggtgggggtgtcgtggtcggggctggtcataatataccgcatatcgtaggttttgcaggcgtcggcaatgcgctcgtcgtcggtggcgatgagcacatcgtccagcttcgggcaggccctggcggccttgtagacccagtagatcatcggtttgcccagcacatcggccagcggcttgcccggcatccgggtactggcgtagcgcgccgggatcacagcgattgttttcatgagtgtacctcgcttacacggcggcctgaacagccgcctctatcgtttggcatacgccgtcaaagcggcggtctatgtccaaattggtgaaccgcagaaccctgatatggttctgtgcgaaaaactctgtgcgcagactgtcggtctgctgttgctcgggcgtgtaatgctgtgccccgtccagctcgatgacaagccttgtttttgcgcagtagaaatcagcgatatagccgccgatgggcttttggcgctggaagcgcggggtgaaggtgcggaggaagcaataccacaatttacgctcccatggggtcatatctctgcgaagctgctttgccagcggtacgttttttcgattgtagtaaagcattgcacatatcctttcacgggtgcctttgggaaggttctctccctccggcgctccgcgccacctccctcacagagggaggcaaggcgccttagccccctctgtgagggggctccgcccgcaggcggtgggggagagaacctcccggccagatgccgttttccccgcgcatcagaccagtttcctcgcctcctccagcgtcagcagaatcttctcgtctgccgcggtgaagccacgcaggacgaagctctgcacggtgacggcacgggcgaaatggaaggggaggcagaagttcagcacctcgctgggcatcgtgcgctccaaaatgactgcatcggggaacagggcggcgtaatccgtcgtgtcccgcgggtgggtcttgataaaaagcggcccaacggcgtatttttccgccaccgctttgaacatcgcgtcctgctccgcttgggtcatcagcccgtcggccacaaagctgcgtggcagcaaaagcgtcgcaccgtctgccttctcgggcaggggctgcgtcaaaaatacgcggcgcaccatcgctttttcgtcgtcggtcaggctctctaacagtttggccttgctgtccgtcaccatgcgttccgccgaaaacagcgtacaccgcgcggcgtcctcactctcgacgcggacgcaccacgggctgtcgccccagtacaggtagccttttccgcgctgcttcgcggcaaaatccgccgcggcgcgctggtcggtcacaagatgctggtcagggccgagcgtgctgccgaacgtgtcctcgcacaaagtatacccggcgcggcaatcctgcaaatagcggcccagcacactccaatcgttgtggatatagacattttcaaacgctgcacggttcaatttccagccgcacagcttctcaaaggcgcgggccgcgcgccggtgggcaagcagccccgtcacggtcccgggccagcgcgtctcgtccacaaggacagtcttgaccacgcccgtcgcgtccagacgtgccgccagcgcggcggtgtcgggcacggaggcggagagcaccatcgtgtggggcttgccggcgcagcgcccggcccgcagcagatcgaccaagacctgatacgcggtgtggcagatgtacaaattcggtttcatgcgttactcctgcacgagcttgacgggcgggaagtggatgcggccccatccggacgcccactcgggcatcgtcaggtcgctgttcgtcacctcaaaggcgaactcggtcacgggcttatccaggcagaccgcgtgggccagcgcgccgtcaaaaatgtcgagatagaagaaatactgtccctcgcccagcagactcgggtcaaattcaaacacagaggtgtagattttgcccggctcggcggggccgaggtcgacgggatgggtgatgccgacgggcgtcgaatcccgcgcgtggaggttcatcttcatgtggatgcccgcgaacggctccgaaacgcgccaggtgattttcacccgcatcttttcggtatcggcaaacacgctcgactccttgccgacgaaatccagcgtttccagccggaaccgcttgcccgcgctgcccgtcatgcgggcgacgtcggccaggtcgtagtggacaacgttgacgtcggtggtgtccatgtagaccgcgatggcctgctccacgtcgccgtcaaagatgaccctgcccttgtccagcacgacgcagcgggtgcaaagctgacgaatggtcgacatattatggctgacatacagcaccgtgcgcccgtcctgattggcgacgtcgctcattttccctaagcatttctgctggaatttcatatcgccgacggccagaacttcatccatgaccatgatctcgctgtcgagatgcgcggccacggcgaaggccagcttgacgaacatgccgctggaatagcgcttgacgggtgtgtcgatgaagtcgccgcactcggaaaattcaatgatctgcggcagctttgcgtcgatctcggcgcgggtcatgcccagaatcgcaccgttcatataaatgttctcgcggcccgtcatctcgttgttgaagccggtgccgacctcgagcatcgaggccacgcggccacgaattttgatttcgccctcggtgggggcggtgatgcgggagagcagcttgagcagcgtggatttgcccgcgccgttgcggccaatgatgcccagtgcctcaccctgatagacggtcaggtcaacgccgttcaacgccataaacgtctggccgaacagccgctggtcggtgccgatgacggtgttcgggtcctccttgccgcgcacacgggcccaccagctttgcaggtcgtgggtcagcgtgccgccgccgatctggccgagcttgtattgctttttcagccccgtgacctcgatgacagggcgtttttcatttgcagacatagttacgcgcccctttcttacacggtatccatgaaggtcttttcaatgcggctgaacagcacgacgcccaaaaccagcgccgcagcggtaaaaatcaggctgtacacgatgccgaacgtcgtgaccgtgccggtgcccaaggtagccatgcggaaaatttcaatcggcgacgtcatggggttcagctggacgagcacccgcaggcgcggggagttgtccagcatcgacagcggatagacgacgggggaggcgtacatccagagctgcacgccgaagccgacggcaatcgccagatcgcggtacttcgtcgttaaggacgacacgatgatgccgacgccgaggcccagcagcatgacctccagcacgacgaacggcacagccagcacccacagcgtaaaggtgacgccgctgcccgtggcaaagaagtacacccagaagatcaggtacatgaccgcctgaatgccgaagttgattaggcttgtcagcacctggctgaccggcatcgtcaggcgcgggaagtacaccttgccaaaaatctgtgagtttgtcacaaacgtattggctgtattgttgacgcagttggcaaagaaggtccacaccgtattgccggccatgtagaacaaaaagccgggcacgccgtcggtgggcatgttggccatgccgccgaacacaacgttgaaaatcacggtggtgatgagcgggttcagaatgatccacgcggggcccaggatcgtctgcttgtacagcacagtaaagttgcgcttgacgaacattataattaagtcgcggtagcgccagagctcctgcaggtcgatgtcgaaccagccggtcttgggccggatgaccgtagtccagccctcgtcagccgggcgggtggtttgcagattttcagccataaaaatacctgttccttatgtgtaaaatcgtggttgcatagttatccatagtaatagtgctattttaccacattttgcgcaaagaatcaacttgccggggcgtatataatagcagcagaatatcatgcgcggtgaaagcgtaggggcggattccatatccgcccgggggcgtttccgcaggcaaaaaagcnnnnnnnnnntctgccgaaaatccatcggcagaccgctttctatacaaatttacagcacctttgacaaaaatgccttcaagcgctcattttcggggttggcgaagaactccttcggcggcttatcgaccttgacaatgccctcatcaatgaagatgatgcggtttgcgacctcgcgggcaaagcccatctcgtgggtgacgcagaccatcgtcatgccgccgcgggccagctctttcatcagctccaaaacctctccgaccatctcggggtcaagggcggaggtcggctcgtcaaacagcagcacgtcggggttcatggccagcgcgcgcacaatcgcaatgcgctgcttctgcccgccggacagcatgttggggtaggtgtcggccttgtcggccagaccgatgcgctccagcagctccatggctttcttgtcggcctcgggctgcttcatcaggcccagacgcacaggggccagcgtgatgttcttcttcactgtcaggtgggggaacaggttgaaatgctggaacaccatgcccatcttctggcgcacatggtcaatgtcgtggtcggtgacttccttgccgttgaagatgacatggccgccgtccggctcctccagacggttcaggcagcgcaggaacgtggattttccgcagcccgaggggccgaccagcacaacgcagtcgcccttgttgatggtcaggtccacg

SEQ ID NO: 459 - DNA, 5631 bp, unidentified
  source 1..5631: mol_type = unassigned DNA
gtcgcggacgttctccccgcggccgtacacgggcagcggccttcggtggcggatattgttgatgaacagcgggatgagcttctccgggaattggtagggcccgtagttgttcgaacagttggtcaccagcgtcggcatcccgtacgtgtcgtggtaagctcgcacgaagtggtcggacgaggctttcgaagccgagtaggggctgtgcggcgcgtacttcgtctcttcggtgaagaactcctcgccgaagggcccgccgccgctctccccgcccgcagcatctccctcgggacgggtcagctccagcgccccgtacacctcgtcggtggagatgtggtagaacaatttgccctcccacttgccgtcccagtattcccgtgccgcctcgagcagcgagagcgtgcccaggacgttcgtccgcgcgaaggtgaacggatccctgatcgagcggtcgacatggctttcggccgcaaggtggatgaccccgtcgatgtcatactgcccgaacagcgcccgcagcatatccaggtcgcagatgtcacccttctcgaacacgtagttcggggaatcctcgatgtcccgcaggttggcaaggttccccgcataggtcagtttgtccaggttcacgatccggtaatccgggtatttcgtcacgaacaggcgtactacgtgcgagccgataaagcccgcgccgcccgtaatcaggatggtgcgttttggtgccattatctcgtatcttatatttgattttctcgttcggaataagtttccaccatttcagcaaaccgggaagaccaggccggccagctcaatttttctttatataatctccttgcattttcagacaatccggaaaattcctgcttgcatatgcactcctttatcttgttggcaaaatcggctcccgtacctgtcaggggaagcctgtatccgttcacgccgttcacgacataattagctattccgccggtatcggtcgtgaaaacggggattccgtaagccgcagcctcgcaatacacgatggcagagcattccgcgcgtgtcggcaacaacagaatatcggcttgctgccaaagttgcacatactggtgatattgttcgggaatattcttattcaaaaagccgatgtttttaacatgcggattatcccggtgtttttgaggcaggtctttaatacctgcgacatacagcgtcgcacggataccggcggcattaagctgcatgaccgtatctacagcaatctcgccgcctttccgctcccagtcgaccccggaaaacagtatgcggagcaaataccccccccctgcaaactcctgtttaacaggagtttgtatcttattttcatcgatattggcaccaaactctatcacattcagtttagacgccggaatgtggtaataatcccgggccgagttactcgcccattcagaagaatgaataattaccgaagccttatccaaagcccgctgttcgatggagtttccatatctgacgctgcatgcggcgaggttcggccaataatagtcgaccatcagttcaaaggtggcatcgctgaggtagaataccggtttatccgtttcgatccgggacagcacctgggagcctccgctgaaaaacagcatgtcgcatcctgcaatcagttttttatcgatgctgtgcgcttccatccgggcaatcagcgggatgtgggagtagacgatattctttcccgtaagttttgcatacaaatggtacagtcccaggataaacttggaaaaaaacggggtggtataggggatccatcgcaccgtatatccggcctgttcgatcgactcccggatcttgaaaattgtgccgctccatgccttccggtcgatgaaggggtttgccttactgacatagccaaaagttattttcgccatatctattgtcgttgaagtcgtttcatgcagtagatcaaggcctccctccagtgcgggatatccatttggaaggtctccttgaagcgggtcttgtccagcaccgagtaggccgggcgggtggccttcgtggggtattccgacgtgtggcaggggatgatacggcacgtgtcatggcccgcggccgcggcgatttccaccgcgaagtcgtaccacgagcacacgccctcgtcggtgaagtggtacaccccctcgttgcccgtgtagcgccccgcctcgatcagggagaagatcgcaagcgccaggtctccggcgtaggtcggagtgcccacctggtcgaagaccacgcgcagcgtctcacgctccgaggtcagccgcagcatcgtcttcagaaagttgttcccgtactccgaatagagccacgccgtgcgcaggatcaggtagcggcaccccgaggccttcacggcctcctcgcccgccagcttcgtacgcccgtaggcccccagcggcgaggtcgccatatcctccgtgtagggcctgtgccccgtgccgtcgaagacgtagtccgtcgagacgtggatcagcgtcgcacccgtctccttggccgctgccgcgaggtatgccgcggccttgtggttgagcaggtcggctgtcggttcatcctcctcggcacgctccacgttcgtgtaggccgcacagttgacgatcacgtcgatacgctgttccttgaccgtttgaagcaccgccccggcgtcggtgatgtccagctccgcgacgtcggtggccaggtagttgttgggcgacacgctcccaagctgccgcagcgagctccccaactgtccgttggcgcccgtaatcaggatattaagcatagtagtccgtattatagtcgaacagttccgcggcctcttccagccgcgggtggcaactgtccttgggcgagaggacgacatcccccggtgccaggtgccagtcgatacccagcgcggggtcgtcccacgcgatggcgccctccgattcgggggcatagaggttgtcgcacttgtattggaatacagcctcgtcgctcagcaccgagaagccgtgcgcgaagccccgcggcacgaagaactgccgtttgttgtcccccgagagctccacggagacgtgccgcccgaacgtgggcgagccccggcggatgtccacagcgacgtccagcacgcggccccggacaacgcgcaccagtttcgactgtgcatgcgccccccgctggaagtgaagcccgcgaagaacgccgtacttcgacatcgactcgttgtcctgcacgaaccgcacggggcgtacgagcctgccgaaggactgctcagaatagctctcgaagaaataaccccgagcgtccccgaacacctcgggttcgaggaggacaactccttctatttcggtagggatgactttcatggctttagcgtcggttttcgtcggtgagtttcaacaggtactgcccgtactggttcctgagcatcggctgcgccaactcccggagcttagcggccgtgatccagccgttatggtaggcgatgccctccaggcaggcgatcttgaggccctggcgtttctcgatgacctccacgaagatcgaggcctcggccagagagtcgtgcgtacccgtgtccagccacgcgaagccgcgctgaagcgtctgcaccttcagctctccgcgctgcaggaacgactggttcacgctcgtgatctcaagctccccgcgcgccgagggccggatacccttggccacatccacgaccttgttcggatagaagtacaggcccacgaccgcgtagttcgatttcgggtgttccggtttctcctcgatcgacaggcagttgcccgccgcatcgaactccgccacgccgtaacgctggggatcgtcgacccagtagccgaagaccgtagccttgccatcctcctcggccgtgcggactgcctcgcgaagaaggcccgtgaagcccgagccgtggaagatgttgtcgcccagaaccagacacacggagtcattgccgatgaaatccgcgccgatcaggaaagcctgggcaagaccgtccggggacggctgctcggcatacgtgatacgaaccccgtagtcggagccgtcgcccagcaaacggcggaaaccgcccagatcctctggcgtagagatcaggaggatgtcgcggatgccagccagcagcaaggccgataaggggtagtagaccatcggcttgtcgtaaacaggcaacagctgcttgctgacgcccttcgtgatcgggtacaaacgcgttccgctgccgcctgccaagatgatgcctttcataggtttctgaaattaatatgcgttctcatcctgccgcagggcattccataccgtcatgaagatgatgcggatgtcgagcagcagcgaccagttttccaggtaccagatgtcgcggcgtacgcggccttccatctggctcagggagtgggtctcgccgcggtatcccgtcacctgggcccatcccgtgatgccgggtttgatcaggtggcgaaccatatatttattgatgagtttcgagtattgctcggtgtgctggagcatgtgcggccgcggccccacgatggacatgtcgcccctgagcacgttgatgaactggggcagctcgtcgatgctcgaccggcgcaggaaatccccgaaccgggtcttgcgcgggtcgtccctggtcgcctgcaccctgtcggcatcggcgttgacgcgcatcgaacggaatttaatgcacctgaacgtctggccgttctccccgctgcgctcctgcaggaagagcaccgggccccgcgaggtcagtttggtgcctatggccacgaaaatatagatgaaggggaacagcgtgcagaggaacaggctcgatacggtgacgtcgaatgcccgtttgataaaccggttcgacgcctgccgcaacggctcctcgcggatgtagaggatcggtacgttgcccagcagttcgaggttcatcgtgcgcttcatgtagttgcgcaggttgggcacgtagaagaagcggacgaagttgttttcgcagaaatccatgatcgggaatatctcttccgcgtaacgatccgtcgagaggcagcagtacacttcgtttaccgggtgtgcctccagccacggcagcgcctcgtccacgctacccaggcagggggtgttgtccggcagggtgtggtcgtcgtggttgctgaaatagccgagcacgcggtaacccgtgctggtgttgtcgaccatttcgtggtatacctccaccgcattgtccttgcttccgacgatgatcacgcggcgggcgttgcggccgtgtccgcgcgtgaccttgaccacgatgcggcaggtgtagcgccacagcatcagcagaatggtgagcacgatgtagaacgtccccatcaggtgcaccggcagcagcccgtagctccatacggtctggatgagcacgaagaaccccaggtggcagagtacgacgtagaatacgcggcggatgatctcctcgtaggggacgatccgcgaggagaggatcacgccgaaccacgagaggcccgggatgaagcagatgttgagacaggcgaatatctccagcgagcgggcgatacaggccggttgcggatacagcgtgagcgccagtatccaggacaggttcagtaagaataggtctccgatgatgacgggaagctttatgagcaaagactcccgcatgacttgtttcat

SEQ ID NO: 460 - DNA, 7692 bp, unidentified
  source 1..7692: mol_type = unassigned DNA
ttatatttttccccataatttttccagcatctcatctactgctgcttcaactcgctcatctgcatcatctctcaatgacaatgctagagaaagttcatctaccttatcttcttttgataataaatgtggattatatctccacatttcaactgccatttgattttctgaatcaaataaattatttgtcataacatccttccaacgcgaaatactatctattgcaaaacatttgatttgtggaacatttagcattgtataatgagctaatgcgaaatatccgctttctaacaattcagaagtcacacaagttttaggtatatatacagttttttttactggattaagtaatttctgctgagttctctcaaataactctttgggtgagctatcagaatgtataattttctgcttacctgttttcatagtctgtattaatcctaatttttcaagctgacgagaagcccttgaaatagatgtaggtgtgaatccaagttcttttgctacctgactcgttgttatttcaacagtcccattatatataaagtacaacaacagaacctgagctgaaggaagtatttcctcattaggaaatgtttctgcattgcaacgttcctgtaaatataacgccataaaaggcagatatatctgtttattatttacaacaaatggaatcttctcccgaagcaaatattccttctgacgatatgtgatttcgtccagaatcataacaacaggtaaattcactatgctttttatctttgaaatatgtttttttaatgtttcaatctgctctagttccgttttaggatatataaaaacagctttttgtctatctaatagtacattacgcagaacatatcttgttccaataaaattgggtatatgtttaatgtcatcatttatataggtcagtttcaatcctagaactttttggagatattccatatatatgcctccattcataacttattttatgtattataacttaaataaagttataatacaatatttgagttataattttaaatgtttaaaaaaattattactgatattggggattttacaatatagatgtgaacagcgtaaggttttagatttccttattgaaccagtaacagatgataaaccacagttgcatgatgtatatttagttaaatctggatcaactgtaggaaaggtagcaattgttgaaaccacagaaagattcaatatatggtcgccattaaacacctaatactgaaactattttcacattttctttatctattagtgacaatattgaataactatttgaaataagctatttgtcgatttatgcctgtatctcaccatcaaatatcatattccagctcatacggatatcatacatcagccttgtaagtgcaatactatcttccggtgtataaatagcactggcactatttcctgatgctatacatctgcctgcttcacgaatctcatattcaaatccatttatatcaaccgggcactcgattgtttccggttctttaccatccacctcaagtatcaaggtctttgcgtgttggaaatccggcaaaaatatacttccctttgttccctcaattctggcattacgttttaattcctctcctattgtctggactgattctgcaatacatccatcattatatgtcagtttgagacaactgtaatcatctgttccattctcattaatatgtacttttgtagtttctacattctgcggatcacaccctgtaacaatacgtaaaaatcccagattgtaaattcctatatccaacagagcacctccaccaagtgcagagttaaatttacgctcttttctggcacccgttgcaacaaatccatactgacaggaaatatgtttaatttctcctattgttccctgaagcaggatattacgcagacgattatacaatggcagaaaccatatccataatccctccataataaaaagatgcttatcctttgccagcctgtacagttcctgtgcctgtttctcatttattgtaaatggtttttcacaaagtacatgcttaccatgctcaagacaaagtctgcaattctcataatgcaaactattcggtgttgctacataaacagcctcaacatcaggatcatttaccaatgcttcataagaatcataatatcgtggaatgtcatgctccctggcaaaagcttttgcactatccatgtgccgtgagcctactgctgcaagctgttcattttccttactcatctgatttatagttgatgcaaattttcttgcaatattacctgtagccagaattccccacttcatatcattttcctcctaataatataattgcatttcacattcatatcttgttaataattatacactattttaccgcatacaccaacacaaaatagcaagtcaaatttcatattatttactgtcacaactatcgtacgcttcattattgttatataaaattcttatattaatcaaaatttttcaacacaatctaaaaaaagctgccacacatcattcttagtgcggcagcccctttgtggtaatagggtaattaataatttatatttcacatgctacatcatatgctgatttaatagcatgatcaatattacttggacgttctccagcacaatcaccaatatagtgaagtggaagaggacaatcagaaagctctggaaggttctttcttgcaccaacagccattacaacaaagtctgaagcaatttcttctgttgatgtattgtcgtctattgttttttcaacaactacagaatcatctttgatttctgataattttgcagatgttactatttgaacattataatgctctaattccctcattagagtaggtaaaatagtgttactttcttcttttgcaatctgatccatcatttcaataattgtaaccttacatccgcgtgaagccagatattcagcggtttcaacacctacaagaccaccaccgattacagaaacattaccgaatacgatttctttcttggcaagtacatcccatgcacttgctacagttggaagatctttgccaggaacagggattattgcattgtttgctcctgttgccacaattacttcatcgaatgaattataatcctgtgatgtgaattcctgaccaagcctgaaagtaacatccaattcaggaagtacatttgtataataattaatgcttctcatcatttcttcttttcttggaggtacactagcaataagtaactgaccaccaatctgaagtgatttctcaaatatagttacatgatgtcctcttaatgcggaaacacgtgcagcttcaagtccagcaataccagcaccaataattgctatattctttgttgatgctgcaggagtaatctgacgggatccttcgtaaccattttcagcattaagtacacaacttaagaaagcacgattctgaatattatctgtacatcctttattacacatcatacatgttctgacattacagcaatgtccatctgcacatttgtttgcaaagtcagggtctgtgagaagagaacgacctaatccaataatatcagcagaaccatttgtaataactgcttcagcagcttctggtgtaacgatacggcctactacagatacaggaatagatacaaactctttgatttttttagaataagaaaccataaatccgtatggctgtgttcccatggcagggattgtatcacccatatttccagtatggttagcctgtgcaacatgtaatgtgtcaacaccgcaagcttctaattctttagcaaaaatgcaagcttcatcaagtggaagaccaccttttcctctaaaactattttctccaagaggagtaactataggaagcttgtagtcgataaccatgtcaggtacgattgtttttaatctttttacgagtgttaatgcaaaacgtgtacgattagccaggtcaccgccatattcatcagttctatgatttaaaataggagagcaaagagaaccaacaagacggtctccatgtacttcaatacaatcaacaccagcttcgtgtgctaagatagcacagttttccatatgctttattatttcatcaagctcttctgcagtaacttcatttacaaagtgctgcatatcatggtgaagtttagctcttgcctcctgcattttgccctgatggaacaagtcgtttaaagctttaacattgtagtcaggatggaataactgaattccaagttttgcgccattttcatgacatgcgtcagcaagtcttttgaagctttgaacctgttcagatgaataaagctttggtgtaggagagaatgttggaagtggtgcaacatctccaattactatatatccgacaccgccttttgcgagacgctcgtaaaaacgaaaactttgttctccaattgaaccatctttttcctcatatcctgttgtaagtggtgggaacataatacggtttttaaactcaatatttccaacttttataggctctaataatttcattgttcatacttcctttcaaattgagtatactatttaagtggtgttaaaaactctaacattaatttgtctaattctgctcttgcaaaagcactggcaaaattgtgattagcgccttcaattgttttataattgcattttccattgtaaagtgactcatatctatggcatgttgcatcatctaccaaatcatctgcagttcctcttataaggaggactggtccgttgtatccttctgctgacgagaatggctcataattaaataaatcatgattaaaagatgttgggaaagtgagtccttcaatatcggccttggtgatccccttagcttccatggcttcagcacgatccttacatccaaaccacattccagcacctggacacataagtatgagagcataaggattaacaataggagcggcagtagcagctgcgtatcctcccatactctgaccagataagataatcttatctggattggcaaaatcttgtgttttagtccagtttataatatcctcgatatcgtgtaggatacctgtaaaggtcatgtcctcgaattcaccatcactttcaccatttccgtataaatcaaaacggacactggcaaatccatgttcagctaataatctggctgtgtgcgtataaatacttttgtaaccgcttttattccctgtaaagccatgtacatttacaatagcaggaaatcttgtgccatcttctggaatgttaactattccgcgtaagatgtgtccatcacggtttgtgatttctacttgttttgtcaatttaaaatacctccatttctaattttattctgcagttgtagcatttcgcttgtcagctaaatcctgtaacatttcagctgttttctcttttgtaagagggtagataaattttaataccagaacagctaataaatatcctacaacatataaacctgtatatgttttccaaagatgtcctgagaatgcttcattctggacagcttcattaacctggaatccagcaattgcaagtgcaaaactactcatacttcctgatacagcattagcaagtttacggaagaatgtatatgccgaatatacaattccttcattacgttttcctgtctgaagttcttgataatcaattgcatcatttacaagtgcccaaactaatacttggaaaccacttactccaagatagcagattccgttgatgataataaagagaataggattttcaattgggaagaagaataaaatagcataaacaacaactgagaaagttgcactgtacataatccattctttctttccaaatttcttagcaacaaattttgtgcctacgaatgcaataagtgaccagagtacacttaacatacctgaaactgccatgatggcaacatttccaaaataatcgcggaataaataagtatttaatccgttaaccatacctgctccaacaataccgataaagcttgataacataactccgagtaatgctttgtttttagtaatatctttaattacctggaagtagttaagcttttcttttttctcaacaactggctctgtaataatacgctctttacaccaatgagatgtaaacataagacagattaatccaataactgcacagattgctgacataataaggaaatggctaggtactggctggttatctttatataagaataatggtccagcaataacgataactgtcataaaaattgtaccgccaagacttctgaaacgagaaaggtcagtacgttggttaacatcatcagtcattacacttgaaagactaccaaatggaacgttgacacatgtgtacataatttcgtaaacaatatatgtaatgaacatataagcaatacgtgcaccataagcgaaattgtatacgttaacaaatcctaatatacagagtactgcagttggaaaagcaaagaatttaatccaaggaataaattttccttttcctttgtttttgtggctatcaacaagtgcaccaattaaagggtcatttatagcatcccaaaactttgtaacaagcataaggattcctacgtgtactggattaacttttaataccagtgtataaaaaatagcaagatacatggcacggaactgctcagtacagcaacatcccaaatcgccaagagtgtaaccaattttgtccttcatggaaaaaggtcttgtttctttcatgataatttacctccaaacatttatattgttttagtagctacaatcttattatattgtggttatgctgatatccatatacaaatattgcttgcaaactacgaaaaattgatatattgtatattttgacgaaatgaacaaaaaatataataggaaagtgtacaaaatagacatatgaaaaagcaaggctacaaaatggaatatttgaaaatattggatagtgcccagcgaagctttgggcaaaaggagagctatacaattgtatttatagctggtgggatagggtatatgcaccaggaggacgataatattgtatgtactatggaggatttgatatttattaagccaggtaataaagtaaagcttgaatatcgtaaaaataagtatcctcttgaagtttatgttctttatataggtggagaacttttaaggaaattgtcagatgaagaaacaagacttgatgaagcgtttgattttgttccgtatcaagttaagattgttcattctgagactgaatcggctatgcttataaagaatatatcaaaaaagctctattcgatgaataatgagccgcctaaatttgcccactcattatacgagaaaagcctattaactatgattcttgtacttgcacttcgctcatctgttcaggaggatgtacagattaagacgaataagaaaaaacacgttgtaatggatgatatttttatttatatcagagaacatttgacagaagatatctcgttggagcgcttggaaaatgaattttatataagccgttatcatatagtaagagagtttaaaaaattgacaggtgagacacctcattcatacattgtaaagagcaaacttgatttatgccgccattatatagagcaggggaaaagtattcatgaggtatatgagcttggtggatttggagggtataatcatttttttagagcatttaagaaagaatatggtgttactccaatgcaatattacaaagatttaaagattgacaggaatgaaaagtaa

SEQ ID NO: 461 - DNA, 5851 bp, unidentified
  source 1..5851: mol_type = unassigned DNA
atggacgtattaaatagagtaccggttcgcgagcaggaaccacaggttcgtgcggctaactttgaagaggtatgtttaggatataacgaggaagaggcaaaagctgaggcagcacgctgcttaaactgtaaaaatgcgcagtgtatgaagggctgtccggtatctatcaatatcccggcatttatcgcacaggtaaaggaaggaaactttgaggaggcatatcacattatcagtcagtcttccgcacttccggcagtctgcggacgtgtctgcccacaggagagccagtgtgaaggaaaatgtatccgcggaatcaagggtgaaccggttgcaatcggtaaattagagcgttttgttgccgactgggcaagagaaaatgatattaaaccgaaaaaagcagagaaattaaacggacataaggttgcagtcatcggttctggccctgcaggtttaacctgtgccggagatctggcaaaacttggctatgatgtgacaatctttgaggcacttcatgaggcaggcggcgtactgatttacggtatcccggagttccgtcttccgaaacagaaggttgttgctgctgaggtggaaaatgtaaaagcactcggtgttaagatcgagacaaacgttgttatcggaaaatctgttacaatcgatgaattaatggaaaacgagggatttgaggccgtatttatcggttccggtgccggacttccaagatttatgggtattcctggcgagcaggcaatgggtgtattttctgcaaatgagttcctgactagaaacaacctgatgaaggcatttaaagatgagtatgatacaccgatcaaagcaggcaagaaagttatcgttgtcggcggcggtaacgttgctatggatgctgcgagaactgcaaagagacttggcgcggaggtacatatcgtataccgccgtggcgaggaagagcttccggcgcgtgtggaggaagtacatcatgcaaaagaagagggcgtgatctttgatctgctccagaacccgacagaaattcttgtagatgagaatggctgggtaaaaggcgcgaaagtcattaagatggaactcggtgaaccagatgcatccggaagaagaagcccggtagagattccgggatctgagtatgagatcgaggcagataccgtgatcatgtcacttggaacttccccgaacccgctgatctcttccactacaaagggacttgagatcaaccgcagaaaatgtatcatcgcagaggaagaaaacggtgctacctcaaaagccggtgtatttgccggtggtgatgccgtaaccggagctgcaactgtaattcttgccatgggtgcaggaaaagctgccgcaaagggaatcgatgaatatctgagcaataaataatagaccagtgatggtaaaaatgccggagtcagtggaaactgctgatgtccggcattttttcttaaaaacttttttttataaaaatttcttaacacatctaaaatattccttaaatcttatccaaaacctactttttttcaaaaatattggttatacttgtaagcaaagttatgatgaattgtaaatgagtcagagtgacagtgatgaatactaagaggtatagctatatggaggaaaatgtgaaccagacagagaaagaaatggcagaaaacgaaaaacagaatcagacgggaaaagaagtggcagaaaacgaaaaacagaatcagacgggaaaaggagtggcagaaaatgcagaccgggaacagacagaaacgatccgggaacagacagaaacgatccggggactgaccgcacagcaggtggcagagcggaaagaaaagggtctctggaataaaaaagcggagtcggcgacaaagacgacgaaagagatcgtaaaatcaaacgtatttacatattttaacctgatatttttagtgatcgcgttattgttaatcggcgttggtgctttccgggatctgacatttcttccaatcattgttgcaaatacgctgatcggaatcgtgcaggagatccgctcgaaaaaggttctggatgatctgtctatcttaaacagtccgaaaacacgggtaatccgggagggcagtaaaaaagaaataccggcagaagaactggtgatggatgatattgtggaactttctgcgggcgggcagataccggcggatgcagttgtgttagaagggcagttaaatgtgaatgaatcgcttcttaccggagagtcagatgagatcgtaaagaaaagcggggacgaacttctgtctggcagttttgtggtgtcaggaagctgtcttgcacgactgacaaaggttggagaagagtcttatatatcaaaacttacccaccgtgcaacacagacgaaagagggagaacagtcagagatgatccgctctttgaaccggctggtgcaggcagtcggtattgtgatcattcccattggtgtggttctttttatacagcagtttgtatatgcgggaacccctttgcgggacagtgtgacaagtatggtcgcagcgatcattggaatgataccggagggactttatctgttagcgagcgttgccatggcggtaagtgccatgcgtctggcaaagcagcaggttttgatccatgatatgaaatgtattgaaacgttagcccgcgtagatgtactttgtgtggacaagacaggaacaattacagtgccggagatggaagtggatcagtttattcttgcagaagacctgacgaaaagagtttatgagaaagacggtgatacgaaagtatatgtcgatgtaaagtgcggtgaggaacaggaacaaaaacatgcgcagataaagggcatgatcggtgagtttgcggcagacatggatgccgataatgcaacaatggaggcattaaagacatattttaagccggatactttaacaaagataaagaaagcagaaaaggtatttgcattttcatcaaagacaaagtacagtggaatcatttcagagggaaaaagttatgtgatcggggcacctgaatttgtgcttcgggaggattatgcagagtacaaagaccgaatagaagcgtatagtgagaaagggtatcgtgtccttgtgtatggcagatatgagggaattttagacggacagcagcttacggaaaaagtattaccgatcgcgtttatcatgctgacaaatgcgatacgggaaggagcaaaggaaaccttttcctattttacagagcgtggtgtggagatcaaggttatctccggggataatcctaagactgttgctgaaattgcggaaaaagcgggaatctgtggcgcagataactatgtggatgcatccacgttgacaacagatgagagtatcgcacaggctgtagcaaaatatcagatttttggcagggtgacacctgatcagaagttaaagtttgtggaagcgctgaaagcacagggaagaacggttgccatgacgggtgacggtgtcaatgatgtgctggcattaaaagatgcggactgcagtatcgcaatggcatcgggaagcgaggctgcatcgcaggtggcacagcttgttcttttggacaatgatttttcaaggatgccctctgtagtgatggaagggcggagagtggtaaataatatccagcgctcggcaagcttatacctggttaaaaatattttttccatgctgcttgcagtattttccatgatctctatgatcaattatccactggaaccgtcacagatttcgctgatcagtatgtttacgattggaattccgtcttttgtgcttgcattagagccaaacaaagaccgcatacagggacattttatgacaaatgtgttgttgaaggcattgcctgccggacttaccgatttctttgctgtcagcagtctggtattgttttgtcaggtatttggtgtgaacgaagaggacatttcgacatcctgtacgatacttgttgctattgttggatttatgatcttatatcagatcgcaaaaccgatgacggccggacaccgggtactgatggttggaatggtcgccggctggctgttctgcatgatatttgtcagccacttatttgcaatcagggatatctcagggcagtgtatgatgctgactgcggtatttacggttgcagcggagtccattctgcggtatctgtcgaaatttgtggagtggatgcgggaaagtcttttagtgttaaaaaagaaaatacatcaggcaacagcatgaaagaggacaggtattcggtaaggataaaaaccggataaaaaaacagccgctccgtttttaaagcagagcggctgtttagcaatcaatttttgtgaaaatgaaatgttgcagttattccagattaaggtgttttttgatgataaccatgcacacaatatagaaaataacacattcgatgatcgaaaagagcgatccggaaaacagcatagaggaaacagttgtgctgaatgtaacgttttcagtggcattataagttacaacattgacgttgttcatgacaccaaaatatccggtaagtaccaggatgatcgaggatacaatctgacctgacatgtaaaagacgattccggcaccgatggaagctcctactttatgttttgtaaagagctgaccgatagaaccgcttgcaaataccatcaaaaggtactgtaggcaggataagatcatggcaaaaatcatataaatgctaaacgtatggagagacatgccaaacagattctggaaatctaccatgagcatatcaaaatctgcatcaaaggaaaatcctctgtttgccgcacagcccagggcgaagatcgatacaaacataatgatcagggagagcatcagccagcatagggaaacgagcagttttacattaaaaattgacatctggccaaccggcagtgtgtgtgtcagataaccctgatcggaatacatggttttataaaaatgtacacacatatacacataacttactacaaagagtgcgaatacgccgagtacataaaataccatagctgctgtaaagaagatctcctgtaactggttttctgtgccggcaggatcactgtcaccgtacatggcaatacagccaaggatggtaacaaacgccataacgccatagatgatgaacattaacttgtatgtgtttttaaattcgtatttaaataattttcctaacatctgaatacctcccggaacagtgcatcgacggatttcccctcctcggcgcggatatcgtccacagaggatgagagacggatctgtccgttctgaataaaaataacctggtctaaaatgttttcgatatctgcaatcaggtgcgttgaaatcaggatggaagcggacggatcgtaattggttaagatcacgtctaaaatgtaatctctcgcagcgggatcgacacctgcgatcggctcatctaaaatatataattctgctttgcggctcatgacgaggataagctgcactttttctttcgttccctttgacatgctttttagagaatcatttggattgatatttagtttttgcagcatatcataggcgcgttcgctgtcgaaatcttcataaaagtcctgaaagaaggcgatgatctctttcacacgctggttcatattcagataactatgatccggcagataggaaatgtggcgtttgctctcgacaccgatcggattttctttgtaataaagggtgccggaggtcggggttaaaagtccgttgatcattttgatcagtgttgtctttccgctgccgtttggaccgagcagaccaatgatatgtccgctctcaatcgaaagatcaatgtggtcgatcgctgtttttccactgaaacttttggtgagatctttgcattcaagtaatgtgcccatcat

SEQ ID NO: 462 - DNA, 7981 bp, unidentified
  source 1..7981: mol_type = unassigned DNA
atgatcagagtaggaatcatcggagcaaccggttatgccggaggagaactggtaaggatcctgttaaaccacaaggatgccaaaatcgtatggtacggttcccgaagctatatagataagaagtattatcaggtataccagaacatgttccagctggtggaggatatctgcaaggatgacaatctggaagaactggcgaagcaggtagatgtgatctttaccgcaacccctcagggatttctggcgggccttttgacagaggagatcctctctcaggtgaagatcgtggatctgtctgctgattaccggatcaaggatgtggccacctatgaaaaatggtacggcatcgagcacaaatctcctcagttcattgaggaagcagtatacggactctgcgagatcaatcgtgataagatcacggagaagaccagattggtagccaaccccggctgctacaccacctgttcgatcctgacggcctatcccatggtcaaggaaggcatgatcgatgtgaacaccctgatcgtggatgccaagtccggtacctccggtgcaggaagaggcgccaaggtgcccaacctgttctgcgaagtgaacgagaacatgaaagcctacggcgtggcaagccacagacatacccccgagatcgaggagcagttaggctatgcgggcaactgccaggtgaccattaattttaccccgcacctcgtacccatgaacagaggaattctggcaaccgagtatgcaacactgaagagaaaaccggacggtacacttcctacctatgaggaagtaaaagctgtctatgataaatattatgcaaacgagaaattcgtccgtgtgctggataagggcagctgccccgagaccaagtgggtggaaggcagcaactacgtggacatcaattttgtcattgatgagcgtaccggccgtatcattatgatgggtgcactggataacctcgtaaagggtgccgcgggacaggcggtacagaacatgaacctgctgttcgggcttcctgagagcgaaggcctggagctggttccctgcttcccttaaagcagatacggaaaggattagaaaggataaaacacatacatgaataaacagtttacgatcaaacccatgaccatagaagattatgacggtctgcatgccctctggatgaccattcacggcttcggtatccggagcatcgatgattccagagaaggtgtggaacgttttatcaaccggaatcccggcaccagtgtggtagccatcggggaggatggagccgtagtgggcggcatcctctgcggccatgacggacgacgaggctgtctgtaccatgtatgtgtcagagaagattaccgaagacttggcattggcaaagccatggtcgtccactgcatgaatgctctgaaagcggaacatatcaacaaggtcagcctgattgcttttacccagaatgacatcggaaacgctttctggaaatgcattggatggacaaagcgggaagacttgaactactacgactttactttgaatgaagagaacattacggcgtttaataaatagatgccaggattgtggaagtgcgtagcacgaagcaatccgtaggcatcaaagtcgggggcttttgaccccgacatcataaataaaacggaagcgaaaggagattattccaacatgaaacagatccagggcggtgtgaccgcagcaaaaggctttgaggcagcaggtgtggaggctgccattaaatatcagaatcgtaaggatatggcactgatcgtgagtaaggcaccttgtaccgtagccggtacttttacctccaatgtggtaaaggcggctcctgtactgtgggataagcagatcgtggaacattctgcatttgcacaggcagtggtagtcaattcgggaatcgccaatgcctgcaccggcaaacagggactggactgctgtgaagcagaagcgaaatgtgccggagaactgttgggcgtgcccaccgatgccgtactggttgcatccaccggtgtcatcggtatgcagattcccgtagacaagatcaccgccggcatcgagaaactggtggcagccaaggcagatactctggaggctggctccgatgcagcccatgccatcatgaccaccgataccatttccaaggagatcgccatcgagacacagatcggtggcaagactgtgactctgggcggtatgtgcaagggttccggtatgatccatccgaatatgtgcacgatgttaggttttgtaaccacagatgtgaaaatttccaaggagatgctgcagaagtgcgtcagcgcagatgtagtggattccttcaacatgatctccgtggatggcgatacttccaccaatgatacactgctggtgctggccaacggcatggctggcaacgaggagattaccgcagagggcgaggattacgacaacttctgcaaggcactgcatgagatcaccacattcctggcaaagaaaatggcaggagatggcgaaggcgccacagcactgttcgagaccaaagtaataaatgcagtcagcaaggaagatgccagaactctggcaaaatccgtgatctgttcttctctgaccaaggcagctatcttcggacatgatgccaactggggacgtatcctctgtgcactgggttattccggagccaaattcgacccggaaaatgtggatctgtattttgagagcaagagcggcaagattcatatcttcggtaatggtgtggcatgtgattacagcgaggaagaggccacgaagatcctctccgatccggaagtcaccgcactggtggatatgcatatgggtgaggcagaagctgccgcatggggctgtgatttaagctatgattatgtgaagatcaatgcggactatcgttcctaaaaaaagaacgaccggaaagataaatgacaggcggatcacggtatctgcggaaatgaggataaaaatggaaaaagatatggaacaggtaatgaaaaaagcagaggtgctgatcgaggcgcttccttacatacagaaattcaaccgtaagatcatcgtggtaaaatacggcggcagcgccatgagcaatgaggaactgcagaaaaacgtcatcaaggacgtaacgctgttgaaactggtaggtttcaagcccatcatcgttcacggcggcggtaaggagatcagccgctgggtcggcaaggtcggaaaagaggcaaagttcgtcaacggtctgcgtgtcaccgatgaggagacgatggagatcgcggaaatggtactgaacaaggtaaataagagccttgtgaccatggtggaagagctgggcgtgaaagcagtaggtgtcagcggtaaagacggcggcctgcttcaggtaaagaaaaaatattccaacggtcaggacatcggttatgtgggtgagatcaccggcgtgaatccggatattctctttgacatgctggagaaggattacctgcccatcatcgctcccattggactggacaaggattatcacacctacaatatcaatgcggatgatgcggcctgcgctatcgcaaaagcagtacatgcggagaaactggcatttctgacggatatcgagggattgtacaaggacatcaatgacaagtccacatttatttccagactgacagcttccgaggcagagggactgatccacgatggttacatcggcggtggtatgctgccgaagctgaacaactgtacttctgcgatccgcaacggtgtaaaccgtgtgcatattctggatggacgtctggcacactgcctgttgctggagatcttcaccaatcagggtatcggaactgcgatcgtatccgatgaggagtgaaaaaagtgtgcagaataagcctggcagcttattccgcacccggctatttgtgccgcaggcgtcacaaagtagccattatcgcaaaaccaaattagaaatttggtttgcgtttccttgacgaaaagaacgtctgcggaatggagaggaaaaatgagcgacaccatgaaagaatatattgcagaggcggaaaaagacctgctgcatacctataaccgttatcagatcgttctggataagggcgaaggcgtacatctgtatgacaccgatgggaaaaaatatctggatttcgtagcgggaatcgctgtatttgccctgggctatcagaacaaggcatacaacgatgcgctgaaagcgcagatcgacaaggtgatccacacctccaattattattacaacgtgcctgccatcgaggcggctcgtaagatcaaaaaagtatccggcatggatcgtgtctttttcaccaattccggtgcggaagcagtggaaggtgccattaaggctgccagaaaatatgcgtatctgaaggatggctgtaccgaccatgagatcattgccatgaatcactccttccacggcagaaccatgggagctttgtcagtaacgggcaatcccaagtatcgtgaggcgttccagcccatgatcggacatatcaaatttgcagaactgaatgatttccagagtgtgcgggatcaggtgacagacaagacctgtgccatcattatggagactgtacagggcgagggcggactgcgtcccgctaatgaagagttcttaaaacaggttcgtgatctgtgcgatgagcgggatatcctgctgattctggatgagatccagtgcggcatgggacgtaccggttacatgtatgcatggcagcgtttcggcgtgaagccggacatcatgacttctgccaaggcactgggctgcggtgtaccggtaggtgcatttatgatgacggagaaagtagcacagcattctctgacagcgggagatcacggaaccacctacggcggtaaccccttagcctgcgcagcagtggaaaaagtgcttgatttattcgaagaggaccatataatagaacatgtgagagaggtggctccctatctggaacagcgtctgaacgaactggcagacaagtatgactgtatcaaagaacgccgtggtgtgggactgatgcagggactggtatttgaccatccggtaggagacattattaacagagcattggagaagggattaattctgatcaatgccggtgcggacattatccgcttcgtaccgcctctcgtgattacccgggaaaatgtggacgaaatgattgctattttggacacctgtatcgaataagaggtttaggtgaatttatgtttttgaaaaaaagaattatcgctacagcagctgtgatcgccatggctgctgcagctgtttacggaagtacgcaggagatgagtcagacacaggagagcggaagcggactgcagctgtttcgaggaaaggagacaatctattgctggtattccgatgaggcattgtccggttatatcaatgcggcagcagtatccttcggagaacagaacagtggagtccgtgtgattcccgtacttacttctgacagtgaatatctggaagctatcaatcaggagaccctgcattccgatcagataccggatatctatctgttgagcagtgactctctggaaaaggcttatctggcaggactggcatcgaaagtgcctgacactgtgggaatctgcaatacagaccatttttcccaggcggctctgtctgcggtaacctatgatcagaagctgatcggttacccggtttattttgataccagtgcgttggtatataatgaagattatcttcgaacctgggcaacccagcaggcggagaaggaactggcgggaagcagtgagaatgatgaacccataggggaaggagaagagatcatcgaggaagattctcttccggaagaccagaccacggaacaggtgacagcggatgaggcagcggtaaatgcgctggcagagcagtattttgcggaagcacttcccttcacagtggatgatctgctgaatattgcagatacctttgatgcaccggaaggtgtggagggtgtcatgaaatgggacgtgaacaatattttctacaactactggatcgtaggcaactacatgattgtaggcggtgatcccggggatgacagaaatgatattgatatcaataatccggagaccattcagtgtctggaagtgtacaaggcactgaaccagttcttctttattgaatccgatacggtgacttatgattctgtgatccaggactttatcgatggcaagaccatgttcaccatcggaaccacggatgtggtcaaacggctggaagaggcaaaagcggacggcagccttgcatttaattacggaattgcccgtatgccggatgtcagcgccgaactgcagagcagatctttgtctgttacgggagcggcagtcatcaacggctattcggaacacaaggaactggcggactgcttcgcagcgtatctggcagaaggatatgcggacggcctgtatgaacgctccggcaaaatgccggcaagtcttcaggcggcagagaatgcagacaacggtgcgcttatgatctttgccgatgagtatgcggacagtgtgtcattgccgaagatgctagagacgggaaatttctggatgcagctggaagtactgttttccaaggtatggaacggtgacgacgtgactactctggtacagcagctggacgagaccatagccggacaggtaggtggtacagagaactaaaactgttacaataaaatatgaatgaacgaaccggtcacaggatagactactactaaaaagaaaaggtggtagaatcctatgatcggttttttgattgctttagtttccggtgcgctgatgagcatccagggagtgttcaacacccaggtgacgaaatccaccggcatctggaccgccagtgcatttgtgcagtttacagcattgctggtatgtctgggggcatggctgtgtacggagcggacttcattcttgaagatagcgcaggtggagcccagatatatgcttttgggaggggctatcggagcctttatcacctacactgtgatccgcagtatggatgccctgggaccggccaaagcggtaatgcttattgtggtcgctcagcttgctgtagcatatattatcgaactgttcggatggttcggtgtggagaagcagccctgggagtggcggaaagccatcggcatggccgtggcgattgtgggtattgtgattttcaagtggaaatgatccagagttatcctcgtagcggcaattttgcgaatgggttctgaatcgttaccacaaatgcgaaaacggcttgtaaattccgtgcgattccagtacaatgaaagttaacagcatagagaggcaatcccctgaaattttgtgaaggaatcaggaaaatggaaaggggactatgatgttttcgataaggttttttaaaacaaaatatgcaggtttgatcggaatgtttttcagtctggtgatgttcataaccggctgtcagaggaaggatgaggccattgtgctgattccatccggagaagatgtggcggaatttccctcactggaagcggtggaacaggcagcggagcctgcaggcagcagcgtgacagtgcaggaaccggcaaaggctgaaccgcagatgatatatgtctatgtctgcggcgcagtgcgggatcccggagtcgtggaagtgccggagggcagcagagcggaggaagccctgcgactggtcggaggtatgacagcggaggcggatcctttttatgtgaatctggcagaaacggtgacggatggtcagaagctgtattttccaacgttggaggaagcggagactctggaagccgaggtaaaagcgacggcggagggacttgtgaatatcaacacggcatctgcggaggaattgtgtgcgctgccggggatcggagcttcccgggcggcagatattgtgcgctaccgggagcaaaacggagcctttcagacgaaggaagacattatgaaggtatccgggatcaaacagaacgcgtatgacaaattgtgtgataagatcacggtacaatga

SEQ ID NO: 463 - DNA, 39771 bp, unidentified
  source 1..39771: mol_type = unassigned DNA
  misc_difference 24164: note = a, c, g, or t
  misc_difference 24165: note = a, c, g, or t
  misc_difference 24166: note = a, c, g, or t
  misc_difference 24167: note = a, c, g, or t
  misc_difference 24168: note = a, c, g, or t
  misc_difference 24169: note = a, c, g, or t
  misc_difference 24170: note = a, c, g, or t
  misc_difference 24171: note = a, c, g, or t
  misc_difference 24172: note = a, c, g, or t
  misc_difference 24173: note = a, c, g, or t
  misc_difference 26285: note = a, c, g, or t
  misc_difference 26286: note = a, c, g, or t
  misc_difference 26287: note = a, c, g, or t
  misc_difference 26288: note = a, c, g, or t
  misc_difference 26289: note = a, c, g, or t
  misc_difference 26290: note = a, c, g, or t
  misc_difference 26291: note = a, c, g, or t
  misc_difference 26292: note = a, c, g, or t
  misc_difference 26293: note = a, c, g, or t
  misc_difference 26294: note = a, c, g, or t
atgatgatgttattgtcggcagttcccgcatttgctgccgtaagtcctcagccgaatacattcaaatataaggttgaagttattccgacagagggcggtaacggtgattataagttcacaacaggtattgacgaaaacggcgaacagcatgtttacattgagccgcttccatatgacggctatacttttgaccactgggaaatttcgggcggtccttttagaaccgacagcaagtatacagatgctaaaatgaatattattatttcaggtgaccttgtttgtactccttattaccgtaaggcaagcagtggcggcacaacaggtcctgttgctacagctacggcaaagaaagatgattcagcaacttcaccaaagacaggcgcaagcgatgttgtaccgtatgcaattttggttctttctcttgcggcttgcggtgcggctgtatttaagcttgtaaagagcaaataatccaaccttaactaaaaatcaagagacttctcataaggaagtctcttttttattcattagatgtttgaatattaggttttgtattgcagatgcagtagtttgtaaattgtaataaaattttactaacaagtaatgattaattgacatactgacacataaatgatacaatataaccgattgggagtttttgatatgagcagaaaaagaaacaaatttcttatagctttgattattttgcttgttgctgcaattatcggcacacttgcgtacatagtcgttaaaaacttaaatgaaaataacgaacgaaaaagtcttgatagcatcgcaggctcgtatgcgtcaggcattgaaaacggtacaacctctgcaacagaagtgacttcaccgtcaatcaatgtgaaaaaggtcgaaaatccgattgatttcaagtcgcttcaacagcagaacagcgacatttattcgtggatttacattccgaatacaaatgtaaattatcctgttttgcaaagtcatcttgacgataacttatatcttgaccacgatatttataagaattacagcttttcgggcagtatctattcgcagatgtgcaacaagcgtgattattccgacagagtgactgtgctttacggtcataatatggcaaacggctcaatgtttgcaacgctccatcgcttttatgacgccgatttctttaacaagaacagatacatctatgtttacactcccgacagaaagcttacatacgaaattgtgtcagcttttgaatatgataaccgacacattatgaattcgtttgatttttccgatgataatgtattttcggattatctcaatatgattaaaaatccacattctgtttctgtgaacaagagaaatacggagcttactaccgatgataaaattcttgttttaagcacatgcttaaacagcggtgacggaagatatcttgtgcagggagtgctgaagaaagatgaaccgacaaaatgaaagttcggctgaggcaacaactgaaaatatagaaaacaagcttgatccgaatacaccggaaattcttgaatcaaaaagagaaaagaacagtaaggagcatgtaagcaatctttcaaggctggatatagaaggttatattttcaaggacagcaagttaataaagaaaaagaaaaaagtatatacagatgtgtatggagttgattccgacagcattgtcgtgaatagtaacaccacaaatcactataataagcatagatcaaagtcgcatcatcaccattcaaagcatcgaaagatgaaaacctggaaaaaggtgcttttgtcaatcggctgtacattacttggtttaattatactcaccgtaggcacggttgcgtatttgatttaccagggcggaaacgagctgtttaatacggatattcatgttaccgccccacagggcattgaaaccgaggaaaacggtaagtatgtcgtatacaacggtgaaacatatcagttcaacgaaaaggtgacgaatgttctgtgtatcggtgttgacaagcgcaaccttgacgaaaataataacagcaaagtcaaggcgagcggaggtcaggcggatgtgcttatgcttgtgtcaatcgacacttcaaacggtaaaataacactcttcaacatttcgagagattcgatgattgatgtcacaatgtattcagcaggcggtgcgtatgccggcacggaaaaacagcagatttgtctttcgtattcatacggtgacggtaaggaatcaagctgtgaaaatacggtaaattcagttcagaggctgttctataacattccgattaatacatacttctcgcttgaccttgacggcatttccgctctcaacgacagcgttggcggtgttgatgttgtgtcacccgaaacaatcggggagtttgttgagggagaaagctatcaccttgtcggacagcaggctgaaagctttgtcagaacccgtgatacaagcaagaccgattcaaacaatatgcgtatgcaaagacagaaggtttacattcagtcttttatgaatacggttcttcagcagacaaaggaagatttaaccacgccaatcgatttgttcaatgcgtccgctccgtattcatgtacaaatcttaacccgtcaaaggtgtcatatcttgctcagcaggctgtgcttggcggtatgaacggaattgatatggtttcagtccccggtcaggttacaatgggttcaaagtacgcagaattcaatgtcagcgaggcagaattttatcagctgtttttgagtatttattatacgaaaatagaataataatcaaacaaataaaatgcatcagattccaagtaaggttctgatgcatttttgttttatgcgcaatgcggttgttatattacagcggaattttcatcatatcaaaacatatttattgaacaaaaaaattcattagagcaggcggataatatccgcccttacggctcggtttgtagaaaaaactgcaaatgctacgctcgggcataatatgttttgtatttaaacaaactgtcttcacgaccgcaattttccattttacattttcaatttttcatttaattaacctgtcttcacgaatagggaacggcggctcgccgtaaaaaacagacagccgataattggctgtctgcattttgttcaatattcaatttgatgcggaggttgtttcttttgaagaagtaccgcctgtgaacaattcttcaaaaacgaagcttgcaaacttctttctctgttcttcaaggtctgaaattttgattgttgatgtgattgcaccgttccatgtttcggttttatcatcatagtaccaaagaccttcttcaggaacataatactgttctacatcataggaaagatatgtgagagcgtgagaaacaagtgctgtgatttcgtccttcttgaggtttgttgttacaaggggaccgacagagcttacaattgaaacaatctgaccgaggtctgcacttttcatacttgtgaacaaagtttcaagaagctttctctgtcttgaggttctgtcccagtcgtcaccgtcaagaccgatttcgttgccgtcctcgccctttttaagacctctgtttcgagcataccaaagagcttcctgaccgttgagatgaacagtacccggtgcgtctgtgatagttgttcttgtgtcagcctgattgttcttgtacatctgatagttgatatagtcaatttcgtcctgagtaacttccatatcaataccgccgagggtgtcgataatcttcttaaagctgtcaaagtcaacaaccgcataacggtcaaccttgatgccgaagtttgcctcaattgtctgaattgaaagctttgctccgccgtagttataagatgcgttgagcttgtcatatccgtaaccggggatataaacatatgtgtcacgctggaatgatgtcagtttaagctttttgtggttgttatcaatggtcatcatgatcattgtatcacttctgccgtgtttatcgccgtttgaattgtcttcgccaaagagcataacattaagctccttggagttctgcagaagctctccctctgaaagcgaaaggtttgttgcgtcgccctcaagcggtgcaaccgatgagttggtagctgccgtgttgttgttgtttgtgtcatcaagctctttgaagttgagagtgtcaagaaatgaatagtagtagagcattccgccgccgcccaacaggaagattattgaaaacacaaggcagagaattcttttaagtctgccttttttattatataattttttgacctgcttatttgagcttatgtcaataaaatcgcttttctgactgcttttttcgtaatttggcatattactcctccaatcgggtaaaaagcacacaatacataagtacagtttattataccatatgagaatttcttttaatgctaaattagaattaaaatctgccttttcgtaaagttttagcgaaaaatctgactgaaaatattgatttttttgtcggtaactgtcaatcctgttcatcaagtgacaaatagaaggacggaaggaactctttttcaaacacctcgttttcgggcatattcatattgtgaattgatttttcggttgcctcttttgcctttgaaaactcgctgttgcccatttttatttcttcaatacattttatgagtgcggaaaacttgtccgccgcttttacatattttttaagttcatcgtcacctgcaccgttcattttgatgatttgatccatatcgtccttaaaatcatccggaagcatcgacacaagcctgttgcctgccgttgcttcaatttccttgtaggcatttttgatttcggggttgaagtattttacgggagtcggcatatcgcccgttatgatttcggttgcatcgtgaaaaagtgcgagcaatgcggctctttcggcattgagattaccgccgaaacgcttgttgtgaatcaaaacaaggcaatgtgcaatcactgcaacatcaagactgtgttcgctgaggttttcacagcgtgtgttgttcataagtccccaacggttgatgtacctcattcttgaaagcattgcgtaaaaatgtgaaatattcataggtagtttctcctgttttttgctaaaaattagtgcaatttgtatcgcattatgttataatgtaatctaaatgcgagtgtcctctgttctctgcaagcaaagcagagcgttgctccgaattgaatatgtaggtgtcttttgaataaatgacggtgaaggacatttatattactgattatactattcataatttaaaagtaaagaaattatcgaaaaaaagattttttcagactttttgctccgtggagggttttatgccgagcagaattttgcaaaaatatccaacacaaaaactatttgggttgcgtgtgtttcttatatcaattataactgcaacagcactttttctaccgtttatcataatggggggcggtgttttctattattacggtgatttcaatgttcaggaaattccgttttatcagcttgtgcatgacgccgtaagaaacggtgatatgggttggatgcacaatgttgacctcggaacggatatgctctcaagcttcagcttttatcttcttggcagtccgttcttttggctgacaattccgttcccgagtgaggctgtaccgtatcttatcggaccgttgctgattttaaaattcggctgtgcgtcactttccgcatatctctatttgaaaagatatgtggctgacaggaatttcgctcttgtaggcggattgctgtatgcattttcgggattttcaatctacaatgtgttctttttccactttcatgaaccgatgataatgtttccgctgttgcttgcggcacttgacgcattcatctatgacggaaaaagaatagtgttcacacttgcggtattctccgcctgtgttgtgaactactacttctttgtgggacaggttctgttcgtaatcatctattttcttatgattacgcttaccaaaacctacaaatttaaagtcaaaaattttctcttgcttgcgcttgaggttatcataggattccttgcaacggcattcatactgctgccgtcagtgctcggattactggggaacccaaggcttgccgagcttccgaacggctgggattcgcttgtctacagtcaaccgcaaaaatactggctgataattttaagcctgtttttccccgcagatatgcctgcgttccctgtgttcacacccggctcaaattgcagatgggcgtctgttgcggcatggttgccgcttgtcggaatgacgggagttatcgcatattttcaggtttgccgaaaaagctggctcaaaaagcttcttgccgtgcttgctgtgtttgcgtgtgtgcctgttttgaacagtatgttccagcttatgaacagctcaatttattacgcaagatggttctatatgggcgtgcttatgcttgttcttgcaacaatcaaggcgtttgaaaacagaaaaaccgattggaacagggcgattcgttggtcggcaggaattacggtaggcgcaactctgttgataggtcttatgcctgtgagctatacggatgaggagagcggcgatattcaaaatacggttatcggcactcaggcaacatttgaacgctattggctctatgttcttatggctttgttaagtctgcttgcgttcgttctcatcatcaaaaagttcagacgaaacaaaaagagatttacggttatgctcactgttggtatcctgagcatttcgcttttcacctcatattttataatcgccacaggctatttctcaagcagcagtacaaatgccatcaaagaagatatcataaacaggcgtgacggcatcacaattgccgatattgacaatgttcgcagtgatttttacgaatgtgttgacaacacggcaatgttctggcagattcagagcattaactgctttcagagttctgtttcaacatctataatgcagttttacgatgcactcggaattacaagggatgttgcgtcaagacctgacctcgatgtatacggacttcgcccgtttttgagttgtaagtatctttttgattaccgtggcgacggaaaatcgggaagtctgaattcattcgttgacgaaaacggcaacacaagaatgccgggttggaaatatctcagaacgcagaaccgttttgatatttaccgcaacgaatactacattcctatgggatacacttttgataagttcattgccgaagaagaatttgaccttgtgacgaacgcacacaagtccgaggctttgctctatgcaatggttcttccccgtgaccttatgaagaagtattccgatattacgggctacagcgatgaaaagtacaagcttttgtacggcaaacatccggaggattatgacagcattacggaaaagtttgattacagtaattcagattacaaaaaggtttgtaatctcagggccttgaacagttgtacttcatttgaatatacagataacggctttaaggctgtttacaataataaaaagggtgacgataacctgttgtttttcagcgttccttacagcgatggttttaccgcaactgtaaacggcaaggcggcagatgttgaaaaggttgactacggctttatggctgttaagattccaaagggggaaaagtgtgacattgtgttcacctatgaaacacccggattttcaacaggtgtcaaaatcagcctttgcgcattcggagcatttttaatctattgtgcggttattgtgaccgttaaaacagttaaaaaaagaaaaaataagaactgataaagatataatcagcatttaagtacggaggtatttattatgtttggaaacaaaatacttgacttcaaagacgaacttttaaaggatcttaacacacttctttcttttgaatcggttgacggtgaaaagaatgacgagtgcgataatgccttgaattttattcttaaaagagcagaagatttcggactgacaggggagagaacaaccgataagagcggtcatataacccttggcgacagcggaaagctttgcggtgtgcttactcaccttgatgttgttcctgcgggaaacagctggagcgttccgccgtatgcgcttaccgaaaaggacggcagactttacggcagaggaattgcagacgacaagggtgcggctcttgttactctctattgtttgaaagcaatcaaggacagcggtgtaaagggcgtgaacactctgcgtgctatttacggcacgggtgaagaaacgggtatggaggatatggaaaattatttcaagaaaaatccacttcccgacatggcgttcactcccgacagcgactacggcatttgctttgccgaaaagggtattcttcagcttgaagtcagcacacttttaaataatgcaacaatactcagccagttccatgcaggcagagcagttaatgcagttcccgacagagcgtatgtaatgcttgattcatcagactatgacgagcagactctcatgcgccttgcagacgcaagtgacggtgattttgaatttaattacactattgacggtcttatgataatcagccgtggcaaagcggctcatgcgtgtgaaccggacaagggctacaatgccgcagcggcacttgttgaccttatctcaaatgtttacacaacaaaggaaacaggttcaatctgttcatttattgactacgcaattaacaaggaaacaaacggcagatcactcggtcttaaaatgagcgacgctgtttcgggctcgctcaccgtaaacctcagcagcgtgaatattgagggacagaccgcaaaggctgtgtttgatatccgttatcccgttaccgtgagcggaaacagagttctcaaacagttcaaaaaggttgcaaaaatcagcgacctcaaggttactgttctcaatcacgaagaaccgctttatgccgataaggacagcaagcttgtaaagcttctctctgacgcttatgaaagcgtaacaggtgaaaaggctgagctttattcaacaggcggcggaacatacgcaagaatgctcggaggtcacggtgttgcattcggtcctgcattcaaaaatgacgatgttcgtatgcacaatgcagacgaaagtatggataaggagaacttttttaaacacgctcagatttgccttgaggcaatgtacagaatgtttactgacggagaataatgcgtttcgttatgaacaaattcagatgaaaagggaatgctaatgaatacggaaaaaactgttagaaaacaggcaaaaaaggttcttgagggaaaccggtcggtaattatctcagagataatggtcactgtgcttgcatttttgacagggctgtttgcgttcagccttgcaatgtctgtggcaggactttatgatgtaaaaaatccgaatcagactcagcagatgcttacaatgattttcgggcttgtattttttgcttttgttgttgtgtgtctgccgctcataaacggagtttacagaagtgtgtgtaatgtagtcaggggcagagagtgcagtcctcttgatgttttttactattataaaaagccgaaattattttttaagtctgttattcttgatgtaatttcagtcggcttgttttttatcataagcggtctgctcaatgtgttcaattatcttagtgcggtttcggataaaataattgaaaattcaccctcactcacggcggttgtagctgtattgcttgttttggcgtttatcgtcagcactgcggttgttgtggtgtgttacattatttttgttcattatacatttttggcttacggttttaacgaacatctgccgctcggaatttatcttccgagaatgatggctttttcaataaagaacttcatctccacaataaagctgtttatcggttttatcggctgggcggctttgtgcttttttgttgttccggcattttatgccgtaccttattttctgacaacctctgcaatgtctgcaaaatggttgttcgagcttgaagggagcagagatattatatgttagtttcactttgtatgatagcctataacgaatcgaatgctttgagcggacttttcagggatattgcacttcaggactatccgcatgataaaattgaggtggtatttgttgacagtatgtcaaccgatgatactaaagaaaaaatggaaaaattccgtgataccgactacggcttttggaatgtgtccgttgttcaatgcgtaaagcgtaatcaggcaacatcatggaatgccgctctgatgaccgcaaagggcgatgttatcataagagttgacgctcacgcaagaattccgagaaactttgtttcacgaaatgtttataacataaagcagggcgaaaatgttgtaggcggcggcagaccgaatatcacttcaaatgtttcaagctggaagcttaccttgcttgcggctgaggattctctgttcggcagttcggttgcttcatacagacggccgcttgcgcaaaaggaatatcttgacagcctttttcatgcggcttaccgcagagaggttattgccaaggtcggcggatttaacgaaaatctcggcagaaccgaggataatgaatttcactaccgcattagaatggcgggctacaagatgtgctgttgccccgatattatttcgtatcagcattcacgaaacgaccttcacggaatgataaggcagaagtattcaaacggacggtggataggacttacactctcggaatgtcccggttgtctttcatactttcactttgcaccgtttctttttgtaatggcacttctcggctgttccgtgcttgcatttctcggacttccgctttttttgtacattcttttgataatctacggaatgtttgatattgtaaacgctgtcggatgttgcacaatgaaaaatgttcagcctcagtttgtgtttttgccgttcattttcccgttgctccatgttgcctacggaataggcacaattgttggtttgattcagattccgtcatggcggaagaaaatcaaaaacagcggtgcgaaagaacacattgaaaaggtaaaaagaaaaatcagggaaaacacacttcccggtcattcatacaaataattttttgggcggataatctccgcccgtatttgatatttacggagatacttatgactgaaaaagtagaacttacccccgaacttttgcgtgaattacagcttaaacagcttgatatgctcgtgtatttcagggacttttgcgaaaagaacaatctcacattctatctcatcggcggtgcgttaatcggtgcgctcagaaacggcggattcgttccgtgggatgatgatgttgatgttatgctgccacgagaggactacgaaaagctgtacaagctttggcatgaacagggtgcagacggaagatttcgacttctaaaaaccgacagcgatatgttcacgggcaatatttttatgaccgtaaccgacacaaattacactatggtcaagacaaatcagaccgaggttgatattccgcacggacttgtgctggatgtctttccgcttgatgtttgtcccgacagccgttttgcacgcaaaatgcagtatgtgtggacaatgctttattcgctgtttttggctcaggttgttcccgaaaagcacggcggaattgtgggggcaggcagtaaggctttgctttcaattttcagagggaaaaagctccgagaaaagatttggagaactgccgaaaagcatatgattaagtacaggcttgataaaaacaagtgtgtaactgagctttgttcgggccctcattggatgaaaattgagtatccgaaacacatttattcgggcgttgattatgtcacatttgagggcataaaaatgccgtgtatgtctggctatgacgagtatctcagaatggttttcggtgattatatgcagctcccgccggttgaggacagagtgccacaccacgatattgcatatcttgacctgaactcaccgtgtgaaatttatgacagcaaaagaaagaataagtaaaaataacggtgcattatggagcttataagagataattggactaaaaatgactatgatgattttgtagaggaacttcgttcatatgccgatgaaaagtacagatgctttcattcctcattgattcccgacaatgacaaggacttttttatcggagtaagaatgcctgttatgcgaaagctcggcaaggaaatttctaagggcaacggacgcagttttttagagcagacaaccgataattcttatgaagaaaaaacaatacgtggtattgtaatcggtttgctcaaaaccgaaagctatgaagaatttttgatgtacagcgatgattttgtacagcgtatagacagctgggcggtttgcgacggcttttgtgcaaatctcaaagaaaccaaaaagtacaaatcagaattttttcctcatgtttgtgaatacaccaaaagcgacaatccgtggataattcgtgcaggtcttgtgctgatgctcgactattatcttgaagatgagtacatagacacggtgcttgaatgttgtgacaatgcgaaaaatccgcattattatgtgagtatggcaagggcatggcttgttgcaactgcacttgcaaagtgcagagaacagactatgcggtacataaagtcaaattcgcttgataatgcaacctttaataaaatgattcggaaatgcgttgaaagtttcagaattgacgatgaaacgaaaaaatatctcaaaacactgaagagatattgacaaatccgaaaatcggcatataatataatcaacagttgtcttcggggcggagtgaaattctccaccggtggttaaagtccacgaacaggtgaaagcctgccgagtctgtgaaattcagacaccgacggtcatagtccggatacgagaagatgcggcagaacaggcggttcgtctgttttattttggtacgcaatcccgttacatttgtagcgggatttttcttttcccgacaactcgaaataattttcaggagtggtcgtaatgacaaaatcaaaagcaaaaacaatcaattcagacaacacggcaaagacaacaaagcttgccgtaaccgcaatgcttgcggcgctttcggcagttcttatgttctttgaatttcctctcggattcatcgcaccttcattctatgagttcgatttttccgaagttcccgttcttgtcggaacattcagcatggggccgattgccggtgcagtaattgaatttgtaaaaattctcgttaagtttcttatcaaaggtacaagcacaggcggagtaggggagcttgcaaactttctcatcggctgttcgtttatcctgccggcaggtttcatctacaagtacaaaaaaacaagagtcggtgcgattgtcggaatgcttacgggtacggttgcaatggcggctatcggtgtggttctcaacacattcgtgcttgttccgctctactcgtcatttatgccgcttacagaaattatcaaaatgggacaggcaattttccctgcaattgacggcacatttacattctgtctgtactgcgtaggtccgttcaacatcattaagggactcatcatttcggtagttgttttcataatctacaagccgctttcaagacttatcaacagcctcgatgcccttcttacaaagaagaaaaaagcaacggttcagtaaacccgaaattaatttttggttgacaaacagcaaattcaggcgtataatagtatacggtgtcggaaggcatctatcacagagtagaaatttgtgcgtgaagtgttttgcggacggggagttgccgcaagaacgaaaggtttatcctgcggtacagatttcgcatcccgctgttactttgggacatataattcagcgggcagagcaatctgtccgcttttttcttcctgaagcaacaacagagattcaggaggtaaaaaatatgtcacaactcaaaaaaattcaaagctctttgcttgaaatgaagagtatctacgctcttgcggcaattgcaatgctgcttgcacttcgtattgttctcggattttttgcaaacagcacacttccgtttttcggaaacaatgtaaagctcagcgcagcgtttttgccgattgccgtaacaggtgtaatgttcggaccgattcctgccgcaattgtcggcgctttgggagatattctttcatttatcattgctccgacaggcgcatattttcccggctttacaatcaacggttttattactggttttatctacggtatgtttctttataagaacaatgtaactccgctcagagttgttcttgcatggtttacaaatatgctctgcgttgaaacattccttatagctttctggctttacacactctacggcggcggttcaacaccgtacacagtttatcttacagcaagatttatcagtgttgccgttaagtgcattcccgagattattcttgtgtttgctcttggtaagcttgcaggtaaaattcgtgttccgcacgcaataaagagaacctgatgaaaagctaatgcaaaattttaaggttggaaatcgactgctccccgcagtagtttccaaccttttttgtttttgtgaaaaataattttttgtaaacataaattcacctaattcgggcattggaattgtttttctatcaaactatctgctcgaattgggaacggcggctcgccgtgcgggcggataatatccgcccctacgagattgctatttcaaataaaataaaagtcggaaagcaaatttgaaatctgctttccgactgaattttttgttataaaatttgactgcacgattaagcccacttgagggtatcgttgtagagattgatgtagtcctgagcagaacgctcccaactgttgtcgctcatcatagcacgccacataagctgatgccaaccctggtcgtcctgaatgccccacaatgctcgtcttacggcaagctgcatatctgcacattcatagtttttgaatgtaaatccattaccgtagttgtcggcactgtcgaaaacagagtctttaagaccgccaacctcacgaacaacaggaattgtgccgtaacggagtgcaatcatctgtgcaagaccgcaaggctcctgagcagacggcataaggaaaatatctgcgcctgagtaaatctttcttgcaagttcgggaacaaagccgtgacagaagcaaagtctgcccggatacttcgcctgcatatagttgaagtagtcctcgtactccttgtcacctgaaccgagaattacaaactgcatattttctgtgtccataagctcctcaaggcccattcttacaaggtcaagtcccttgtgtgcaacaagtcttgttaccataccgaccagcggaacatcccagcgctgttcaagacacaaacgctcctgcaaagcacgcttacattcgcccttgccgctcatatcgtcctttgaatagttgcgataaagctgatagtctgtttcgggattgtagctttctgtgtcaataccgttcttgataccgcaaagcttgtaatgacgaagattgagttcgtcatgaagtccccaactgaaccacgggtctttaatttcagccgcatagcttggagaaaccgttgaaacacgggtagctgtttcgatagcacccttcatcatattgagtttgccgttcatttcaagaatctttgtttcggatgcaggaatgccgacgcactctgtgttaacttcccagccgtattcaccctgatactggatgttgtgaattgtgaacagactcttaatgttatagtaccatggtctgtgtgaatagaacagatagtagtaaacaggaacaagagccgtctgccagtcattacaatgaatgatgtcgggatggaaatcaatgtaaggaagcatttcaagaattgcacgggagaagaaagcgaatctttcagcatcgtcataatgaccgtagagagtgcctctcttgaaataatattcgttatcaataaaatagtatgtacagtcattccatcttgcccagaacaaaccgcaatactgatgacgccatgcaaccggcacggtaaagtttgtgatgaagttcatggagttcttaagttcctgcggaattgtgccgtaaagcggaacaacaattctgcaatcctgaccttttctgcaaagtgtgtgcggaagacttcctgctacatcagcaagtccgccactgccgcagaaaggattagcctctgaagcacagtataaaattctcattgtaagattacctcctgtttaaacaactttatacaacagattttttagcaatataaatggggtacgaatcatatcccataagtgatcgaccatccttgatggtaacatccttatctatgataacatagttgaggttggtattgcaacctatttttgtgtcctgcattacaatacagttagaaagctttgcgccttcgccgacataaacaccctttgaaataacgcagttctcaacctcaccgttgataacacaaccctgtgcaatgattgaatttttcacattgcttgtaagtccgtagcgtgacggagcgtcatctcttacctttgtatagataggtctttgcggattgaaaagctcatcccttacttcttttttcataagatccatattgaactcaaagtaatcgttgattgagctgattgccgcacagtaacccttattttcataagcataaatactgtatttgcccagactgctctgaagaagtcgctttacatcaagctgattaacgctgatggcgtttcggatttcactcataagaatgtctttcttgatgagaatagagccgtatgcgtggttgaatacctctttgtcaacaacacctggctttacaaaaatctgatttaccttgccgtcattgtctacgtcaagggtaatcggtctgtcatagccctgcggaattgcatgattcttatatataagtgtaatgtctgccttcttctttgagtggaaatcaaaaacatctgtgtaatcaatgttagtaattacattgccctgtgaaataagcacatactcctcacggcaatgctcaatgtagccgtgcatattgtagattgtttcaacaaagcttgaaaaagccttgccgtcatatggtgggagaattgaaagattgctccttctctttgaaaggtcatatgcactgcccgaacccacatgatccataagtgactgaaagttgctttttgcaactatgcctacattgctgatacctgagtttgacatatttgaaaggtcaaagtcgataattctgtattttccgccgatcggaacgcttgcagttgttcttgaagatgcaagctcggggattttgtcgtcaagtgttgccgcaaagatgaaaccgagtacattattacttctcattgccgtccacctccgtgtcgctgtctatcatggtttttgctttgataacggtgttttctttgataacggtatttgcaccgacaacagtaattccccagtcgtcaatattttccgtttcttcggggttttgtccgacttttgcatttttgcctacaacggtgttttcggcaatgatagcaaactgaacctcggcgccgtcctcaattaccgcaccgggcatgataattgaagaattaatcgtagcatttttaccgattgtaacacctgcaaagagaattgagaactcaaggttgccgtaaacattgcatccgtcggcaacgagtgaattttggattgacgcctcgtttgaaacatagtgcggaggcatcatcgggtttcttgagtagatatccttgaggtctaaagtaacctttggatcgagaagatccatattagcctcccaaagactgtcgattgttcccacatctttccaatagccttcaaaaggatatgcaaacatacgctcacctgcgtcaagcatggcagggaggacatccttaccaaaatcgtggcttgaaccctctttgaattcatcctccgtaagatactttttaagttccttccaactgaaaatatagatgcccattgaagcgttagtgcttttcggatgagcaggcttttcttcaaattcgtagattgagccgtcctcatttgtgttgagaataccgaatcttgaggcttcttcaagcggaacatcaattaccgcaattgtacaagcggcattcttttccttatgatattcaagcatcttgttgtagtccattttgtagatatggtcgcccgaaaggatgaccacatattcaggattataacgctcaatgtagttgatattctgataaattgcattggctgttcccgaataccagtctgcaccgtcaacagcctgataagggctgagacagtttacacccgagtgcatactgtcaagatcccacggctgtccgtttcctatgtattcgttaaggacaagaggctgatactgtgtgagaatacctacagcgtcaatgcctgaatttacacagttagataacgggaaatcaataatacgatatttgccgccaaacggtacggcaggctttgcaagctttttggtaagcacgccaagacgagagccttgaccgccggcaagcagcatagccactacttccttttttggaaacatattaaaatacctccgatatttattatattatctttattaaacttattaattacagtcttgtgactgaaaatatcaattttctttctgagcttcatcgggttcaagttcttttgcacacctcagatagattacgctgagaggggggagagtgagtgaaagtccctgatcaaaaccgtgaattttcattacctcggttttgatattattaccgtttacaacaccgcttccgccgaaacgctcttcatcagagttgaaaacctcgtcataaagaccgtatttaggaacaccgatgcagtattcgtcacgcctgatgggctgaaaattacataccgaaacaatttcatcaccgtttttgtcggtgcgtttgaatgcaataacgctgtttgtgtaatcgtcatggtgaatccagtcaaagcctttccagaccgtgtcaagttcgtagagcggcttgcagtcaagataaaatctgttgagctccttaaaaaatgttctgagttttttatgcttttcaaattcaagcaaatcccattgaattgcctcttcgtgattccactcgtcaaactgtccgatttcagttcccatgaacacgagtttcttgcccggatgagcgtacatatatgttatgaatgctctcacgcctgcaaactgctcgtcatactttccgggcatctgctttatgagtgagcctttgccgtgagaaacttcgtcgtgtgaaatcggcagaaggaatttttctgaaaaagcataataaaagctgaaagttagactgtcatgattgaacggccgccacatcggattgagtgacatatagtgcagcatatcgttcatccagcccatgttccacttgaagtcgaaaccaagaccgccgtcctctattttatgagtaagctttggccacgatgtgttttcctcagcaaacatcataacatcggggtggtacatatgaacagccgtgttgagcctttttacaaaatcaacggcgtcaagattttcttttccgccgaatttgttcggttcccattcaccctcggttttaccgtaatcaaggtagagcatagaggagagtgcgccgattctcaagccgtcaatatgatatttgtcgagccagaacattgcgcatgaaacaagaaaacttgtaacctcgaatcttgcgtagttaaaaaggcaggttccccatgagtcacgcttgcttgtttttggatcgttgctttcataaagaggcgaaccgtcaaaccttgcaagtccgaaatcgtccgtcggaaaatttgacggaacccagtcaagaatcacaccaatgccttcaccgtgaagcttgtcaacaaaagccataaaatcagacggtgtgccatagcgtgaagtcggggcatagtagccggttgtctgaaaaccccagctgccgtcatagggatactccataatcggcataagctgaacatgggtatagtgcatctcctttaggtaggggataagctcatcggcaagcttttgatagttaaaaaagttgccgtcaggatattttctccatgagcctgcatgtatttcataaatattcatcggtgacgatgaaatgttgttttctttgcgtttattaaaccattcgctgtcattccacgaatagctttctatatcatatacaacagaggcctggcctgggcgggtttgagcatgaaaagcatacggatctgctttcataagcctgtcgccgtattcgctctcaatgcagtatttgtatgtacaaaactgttttacaccctcgacaaacacttcccacacaccgtaaccgatgttatacatatagtttgcctcgttgttccaattattaaaatcgcctgcaaccgaaacgctccttgcggttggtgcccacacacggaacactactccgtttttgtcgttacggttcacgaggtgtgcgcccaaaaaatcatatgcacgcactgaatcgccggtgtgaaaaacttcaagagccggtcttgcctcgttaaagctgtaattcataagaattgctccttgtttaatatctgttgtttgttgattgtttgctcacacttatataataccaaaattatatgtcaatttcaagcaaattcaaaaaatttaaaactaatttttcgtgtatattttataaactgcgactaaatgttacattttaaagcataattttacgaataaagaaaaataagaataaatatcttccgaaaaggaaaacaaaaaagggctgtccaaaaaggacagcccaaagaataatctgtaaattcagattagccaagctcagcgaaatacttaattgttcttaccatctggcttgtgtatgagttctcgttgtcgtaccaagaaacaacctgaacctcataaagatcatcagcaatctttgataccattgtctgtgtagaatcgaagagtgaaccgaatctcataccgattacatctgaagaaacgatcggatcttcgttgtaaccgaatgactcagaagcagcagccttcatagcagcgttgataccttcaactgttacatcagaacccttaacaacagctgtaagaattgttgttgaacctgtcggaacaggaacacgctgtgcagaaccgatgagcttaccgttgagctcaggaattacaagaccgatagcctttgcagcacctgttgagttaggaacgatgttagcagcacctgctcttgctcttctcttgtcgccctttctgtgaggaccgtcaagaatcatctgatcgcctgtgtaagcgtggattgttgacatgataccgctctggatttctgcatacttgttaagtgtgtcagccataggagcgaggcagtttgttgtacatgaagcagctgaaatgattgtatcgtcagctgtaagagtcttttcgtttacgctgtaaacgattgtcttgaggtcgttgcctgcaggagcagaaataacaaccttcttagcgccggcatcaatgtgagcctggctctttgcctttgatgtatagaaacctgtgcactcgagaactacatcaacaccgagttcgccccaaggaagctcagcagcgtttggcttagcgtagattgtgatctctttgccgtcaacgatgattgagccttcgccggcctcaactgtgtgaaggttttcaccgatcttaccgcagtagccgccctgtgctgtatcgtacttgagaaggtttgcgagcatagcaggatctgtaagatcgttgatagctactacttcgtaaccctcagcaccgaacatctgtctgaaagcaagacgaccgatacggccgaaaccgttaattgcaacttttactgacataaaaaaattcctcctaaaattctaaggtgcttctattatattacatttttttcatttcttcaatagcttgacaaaaatttaacgaaaaatttttgagctttttacaaatacggtaaaaaacacggtcacattttgcttttttaaggcaaatttaagctgtaaccgtcaaaaagctgtaatcttttttatttccgtaataattatctgcaaaattcccgtgcttattcttgacaatttggttattttattataaaattgtatagtccgctgatgcggattttggcaaaagtacagtttttgacttttgcgacttttttaatcagactctttaaaagagccgttatatatagatattttttataatttttatgattatgacgtttcgccttttgaaacgctctgtgcaacctgtacggtgttttgcggttgcgtatgtatatataatgtattaaaaatatttacaaagtaaaaatgaaaattgaatatctttttaacggcacctttaaagtctaattgattgggaactgtgaaatattaaaaaatcaaactaaggaggtgtccagattgccattgtggataagtattatctgcattgtcgccgcagttgttatcggtgccggtgcaggtattttccttggaattgccatccgcaaaaacacagccgagaaagaaatcggaagtgctgaggaggaggcaaagaagattgtggctgatgcaatcaaaacagccgaagcaaggaaaaaagaagtagtccttgagggtaaagacgaggttcatcgtttcagaaacgagagcgagaaagaaatttccgatcgacgcaaggaagttcagcgtcaggagagaagaatccagcaaaaggaagaaactcttgacaaaaagcttgacaatatggaacgcaaggaagaaaaggtcaacaaaaagcttcgtgatgcagatgcaaaactcgaagaagttgaaactctgaaaaagagccagtttgaaatgcttgaaaaaatttcgggttacacggcagaacaggctaaaagctatttgctttcacagcttgaaaatgagcttgctcacgagaagtcggttaagattatggaatataccgaacagctcaaagaggaagcagacgacaaggcaagaaacattatttcgcttgcaattcagcgacttgcagccgagcaggtttcagaggcaacaatttcggttgttcctctgcctaacgacgagatgaagggcagaatcatcggtagggaaggccgtaacatcagagccatcgaaactcttacgggtgttgatcttattattgatgatacgccggaggctatcacgctctcatgctttgagcctgtaagaagagaaattgcaagaattgcacttgaaaagcttattgcagacggcagaatccatcccgcaagaattgaggagatggttgaaaaggcaagaagagaggttgaatccgaaatcaagcgtacaggtgagagagccgtgcttgacgcaggtgttcataacattcatccggagcttgtcaagcttctcggcagacttcgttaccgtacaagctacggtcagaatgtacttgatcactctcttgaagtttcatacattgcaggtatgatggcgagcgagcttggtcttgatcctacaattgctaagcgtgcgggtcttttgcacgatatcggtaaatccattgaccatgaggttgagggaacacatattcagattggtgtcgatcttgccaaaaagtataaggaaagcgacgctgttattcacgctattcacgctcaccacggtgatgttgaggcgagaacaattgttgcctgtcttgtacaggcggcagatgctatttcagccgcaagaccgggtgcaagaagagaaaatgttgaaaactacattaagcgactccagaagcttgaagaggttgcgtcttcttttgacggtgttgagcgtacctttgcaattcaggcaggccgtgaggttagagttatggttaagcctgaaattgtaaatgatgagcgtatgattccgcttgcaagagatatctgtaaaaaaatcgaagaagagcttgaatatcccggacagattaaggttaatattatccgtgaaagcagagcgtccgattttgcaaaataaaatatcttgattttaactacggttgacaggactatgttgaccgtagtttttattttgtagggacgatattatccgccggtacggcgagccgccgtacctgattcgtgcagataggttcattaaatgaaaaattgcgttcgggaagatggtttgcaatataaaaaacatattatgcccgagcgtagtatagtagctgnnnnnnnnnntttgcacaatttaatgtagcggcgaacgaggttcgccgctacaaacactacaaagaatatgctgtaatcaaaaaaacaatttgcaagaaaattaaataaacttgcaaaaattaaatttgtgccgtagcttagatttttgacctgttattgtaaactgtaatttaaaaaacagcaaaaaactttaaaaaatattcaaaaaagtattgacaatcggttaacaaggctttataattcaagacagtaaggcaaaggccttacgaagttttcggaaaactgaatataaaaaggacaaggaagttcactttggtttcttctgattttgcaacaaattttttaaaacttgcaaaatcggataaaaacattgtgagctttatttttttgcttcggcaaaaacggtttatgtggaggttaaaaatggattcaggaaatataggctttgtgctgctttgtgcagctttcgtatttgtaatgactccgggtcttgcaatgttctacggcggtcttgtacgaaagaaaaatgttgtaaatacaatgatgacatcaatttttattatcggtgtcggaattgttatgtgggtgcttttcggttattcgctttcgttcgctccctcgggaaatgcttttatcggtgatttccgttggctcggtcttgagggtgtttcactcacggagggctacacggatgatgcgtcaattccgaatatggtattctctgcgttccagatgatgtttgccgtaatcacccctgctcttatcacgggtgcggttgcaggcagaatgaagtttaagtcaattttcgttttcacaattttctggtcgcttatcgtttattatccgctcgctcacatggtgtggggacagggaggacttttaggtgcagacggtatcggcgctctcgactttgcaggcggcgatgttgtacatatcagttcgggtgtttcggcacttgtgctttgcatactcctcggcaagcgtcacgattatgaacattcaatttacagaattcacaatatcccgacagttgtactcggtgcgtcgctccttatgttcggttggttcggctttaatgcgggttctgcacttgccgccgacggtcttgcggctcacgcatttatgacaacgggtgtttcagccgcagccgcaatgctctcgtggatgctctgcgatgttatcaagaacaaaaagcctacgcttatcggtgcaagcacgggtatggttgcaggtcttgtaggtatcacgcccggtgccggctttgttccgatgtgggcggcagttattatcggtttgacaacaagcccagtttgctatattatgatttcatacggcaagaaaaaattcggctttgacgatgcgcttgacgcattcagctgtcatggtacaggcggtatctggggcggacttctcacaggtgtgttctcatgcacggcaatcaacagcagtgcaggtaacggtcttgtgtacggtgagtttgcacagttcagtgctcaggcggcaggtatcggtatcacaattgtaattgcggttgtcggaacactcatctgctacggcatcacaagacttcttacaggcaaaatcagggttgacctcagagatgagcttatgggacttgatgtttcacagcacggtgaatctgcttatccgtcatttaacggtcttgacaactaacggaggttttaaagtatggaaaacaataacgatattcagcttataaaaatagaggccgttgttcgtgaagaaatgtttgtagatgtcaaaaaggctctcacggatatcggcgtaaacggaattacagcgtatcaggttgtaggctgcggaattcagcgaggtatgtcggagtatgtaagaggacagaaggttgatgttcaggtcttgccgaaaatcaagtttgaaattgttgtttcttccgaagaatgggagagaaaaacaattgaggcaatcagaaaaacagcctttacgggcaacccgggtgacggtaaaatatttacctactatcttaaacaggcggttaaaatccgtacgggagaaacaggctacgatgcaattcagactcccaactttgatgactgatattttcctatatcaaaaaagtgcgtaccaaaatttggtacgcannnnnnnnnncgcactttttgcttgtaaaattgtttatcttcttattgtaatatcttccgtatcgacaatgttgtcacgaagtcgattgtaataatcgggatttgaatgctttatgcttatcggttttagctcgggagttgcaaaacagtgtgttgttctgcctgttgcagaaagttctccgtttttattgttgaagattttatagtcaaaaatcattcttgaacccgtaaaaaatacaaggcttacttcaacggaaaactcatcgccgaatttaagcggctttttgtaacgggcatatgcgtcaacatttgggatatacaatccttttgactgcatttcggcaacatcacaaccgatgtcgtgcatatactgaattcttgcatcttcaaaatatctgatataatttgagtgatgaacaatgttcatacagtctgtttcatagtatgaaacctttgctttgtataatttctcggtcatattttctccattacatatatacggaaaatccgtaattattttttaagcaacaaaccgtttttaaggtcctctgctgcctgtttttttattacaaaatgctgtttcttgcctgttgcagtctgcggaagttcattgacaaagcggtaatatctcggagcctgatattttgaaatattcggtgagccgtcgcagaaattgataagctctgcaaccgtaagactttcgtcggccttgattacatatgccgcaacgcactcgcctcttgttgaatcgggaacacctgttacgatacattcctgaaccttcgggtgtgagttgagaatttcctcaattcttgcaggataaatattttcgcccttgctgataatcatatcatcttttctgcctgcaattgtaacaaactgctcgctgttccaagtgccgatgtcgcctgtgtacatccaacccttgtagaacttgtcttttgtagccttttcgttatttacatagcagtaggtagttttgttcggacatttgatgatgatttctccctctgttttgttatcgcaggggactgtgtcatcgggctctgcttttctgtcgtcataaacatttacaagtcttacctcatcatctgtgcatgatctgcctgccgaacctgccatttcaggaaggtcatacggacgaagaaatgtattccagaaagattccgttgtgccgtagccgttaaaaatgttgggggagagaagttcctgatagcgaatgcaagcggctttttcaagcggactgcccatggtaataatgcccttgagcgaagaaaggtctttcggatgcttttcctgtcgggctgcaagcatttcaagagttgacggaacacctgtgatgaatgtaattccgtatctttcgataaactccatacaactcctcgggttgaaggttctcataatcacaagacacgcacctgcataaagggtaggtgtaggaccgcccgaatgaataccgccacggtgaaaccacggcgtcatattcatcgtaatgtcaacgggtgagagcggaaagtgcataattacatcgtgagccgaaagaacttcgttgattgcgttaagcggaacgccctttggagtgcctgttgtacccgaggtctgaagtcttaaaacctcgtcataaatatgcggtgcatagtcaacaggcggattttcgtaactgctgtccttgatgtaatcgtcaaagaaaatgtgtccttcgggaagagttacttcctttttggaattattaacgcagagaatcaattttggcttatgctcgcagatttcaagagcctgtacggctgtttgcataatgtctgcatcgtaaacataaacaacaggcttgttgtgtcccataatttctgcggtttcgcccggtgataggttaaagttagcgggatttgagattgcaccgagtttctgcggcgcaatgtaaccgagcaaaaactgcggtgagttgtaaagctgcataaacacgatgtcgtttttcttgacaccgtcttttttcatagcgtttgcaaatctgtttgcatcggcattaagctctttgtagctccatgttctgccgctctgaggatcaattgcggcaggtttatccgaaaagcgtcttacatttctcataaagccgttaagccatgtaaattcactttcaaatgtttctctgaacatctgtgaatcatatgttaaattcataatatccccctgtcctattatgtatgggtgtacattattttatacacacatatgtgtgttgcttgtatgttgttttgtcggcagattatttgccgtatttgcctacgataatacttgagttctgaccgccgaatccgaatgcgtttgacatggcaaagttgatttcggctttttttgcaatatttgcaacaaagtcaatgccggcacattcggggtcaacctcgttgagattgattgtaggcggaactgtgcctgtttcaatagccttgacacaggtaattgtttctgtaataccgcctgcgcccatcatatgacctgttgcgccctttgttgagcttacataggggagagtgttgccgaaaaccttcttgattgaagatgtttcaactgtgtcacccttgtttgttgcagtaccgtgagcattgatgtagccgatgtcggaaggattgattcctgcctctgcaattgcctgtttcatacaagcgattgcacctcgtccttcgggatgcggagcagttacatggtaagcgtcatctgtgttgccgcaacctctgatttctgcataaatcttcgcacctcttgcaagagcgtgttcctctgtttcaagaacgagcgcaccgccgccttcacctattacaaaaccgtcacgggtaacatcaaacggacggcttgcagtgcttggcgaatcgtttcttcttgaaagagcttttgcgttggcaagcgaataaattacaagaggacagagaacggactctgctcctactgcgagcataatatcagccttgccgctctgcatacacatacaagctgtgttgattgcatcaccgcctgacgaacaagctgtgcttaccgtaaagctcggtccctgaatattgtagtcgattgcgatatttgcggcagcaatgtttccgagaattttgggaataaaacgaggacctacctttttgtgtgatgcgcctgtgagtgcctcctgagtatatgcgattgttgcaatacctgccattgcagtacccataacaatacccgttctttcgggttcaatcttgattccgctctgtttcatggcttcctcagccgcaatataagcgtattgcataaacggatctgtttttctgattaaatcctttggaagatagtcggacggattaaagttctttacttcgccggcaatctgaacagcgagttcagacggatcaaaagtcttaattgtgtcaatgcccgatgcacctgccgtgatattattccagtagttttcaacaccgatgccgacaggtgttaccgcacccataccggttacaactattttcttcattcgttaagctccttgttttaaaataagttatttacattttgcatattattatgctatacttgaattgtaccaaatatggaaaaattattcaataccgttgattatgcaaaaatgacgatttggcagtcttaaatttacagttttgcataatattgaaaaaaaccgacaaaatactgtgggaaattgtcaaaacggaggttattatggatataaatcagctcaattgctttataactgtggctcagacgctcaacttttcagaggcggcaaggcggaactatgtttctcagtcaaccgtcagcagatatgtaagcgaccttgaaaaggagtttggggttcagctttttacacgctctcaccgtgatgttatcataacaagcgagggcaaggcacttttgccctatgcgattgaaattgttgaaactttaaagaaagcaaaaaccgttatcaagcagatgcatgacggaggtcagggtaaaattacgctcggctgtgatgttacctcgctttcgttcccgacaaaatgtattgccgactttgcggaaaaatatccgggaatcacaattgatgtgcgacagcttgacgaggctgaccgcacacttgcaatcacaggcggtgaatacgacttctgctttatgccgagagatatggttccagaaagttcaggtattgaatcaatcattacacataatgaaactttgtccgttgtaacagcgaaaaactcaaaattcagcggaagaaaaagcgttaagctttccgaattggctgacgaaagtattctggtactttcggaatcggttgcaccgattgtgtatatggaaattatggatttgttccgtacatttcacataaccccgaaaattgaaaattcatttgacgatcttgtttccatatatgtgtcatcgtcatcgggaatcggcgtgtctgtcataccaacctcggttgccgcatacacttctgacgaatacaccgattcataccttattgatgatgcggacacaagcatagcctatgttatggcatgggaaaagaatatttcaaatcctgctgcaaagctttttatggaggctgttaagaaatatgccaagggcgacgacaacatttacgggctgtaactgagcatatttctgaatataaattccaataaagaattatagtgaaattttcacaaaataaacacacattattttcaaaaaaggtatttactttataaatcttcggtgttataattacggtagtcaaggagaagttgacaaaatatcctttcaggaggtaattataatgtacagatttactttaccgagagatctctatcatggtaaggatgctctctcaagtcttaaaaatttatccggcaaaaaggctgttgtagttgtcggcggcggttcaatgaagcgtttcggctttcttgacaaggctgttgactatcttaaagaagcaggtatggaggttaagcttatcgagggcgtagagcctgacccatctgttgaaacagttatgaagggcgccgctgttatgcgtgaatttgaacccgactggattgttgcaatgggcggcggttctccgattgatgccgcaaaggctatgtgggtattctatgagtatcccgacacaacctttgacgaaattatcactccgttcagtttcccgacacttcgtacaaaggctaaattctgtgctatcccgtcaacgtcgggtactgcaacagaagttacggctttctcagttatcacagactatgcaaagggtatcaaatatccgcttgctgactttaatatcacacctgatgttgctatcgttgatcctgcacttgccgaaacaatgccggctaaacttactgctcacacaggtatggacgctatgactcacgcaattgaagcttatgtttcaactctcaactgtgagtacacagatccgcttgcactccacgcaattgagcttattcacgacaacctcaagaagtcttatgagggcgacatggcttgccgtgacaaaatgcacgatgcacagtgccttgcaggtatggcattctcaaatgctctgctcggtatcgttcactcaatggctcacaagacaggtgcggctttcacaggcggtcacattattcacggctgtgcaaacgctatgtatcttcctaaggttatcaagtataactcaaaagatcctgttgcagctgagcgttatgctaagattgctaagttcatcaacctcaagggcgaaacaacagaagaacttgttgacgcactcatcgctgaactccgttcaatgaacgatcagctcaacattccgcagggcattaagaactacggtccgggcggtgttaaggctgacgagagcattatcgacgaaaaagaattcctcgaaaagctccccgaagttgccaagaacgcaattgccgatgcttgcacaggttctaacccacgccagccaaatcaggaagaaatggaaaaacttctcaaggcttgctactacgatacagaaatcgacttctgattcgtttgacaaatctatttgtacttatcacagctctccgttttcggggagctgtttttttaataaaaaatccgcataaaaatgctcttaaaaggcataaaaatcatatggacaatattgctttgttgtgctaaaattgacttgaaattgatgaatttggtgacataaaatgaaaattgcagtaataaacggtcagaaccataaaggctcaacctatcatattggcaagcaggttgccgataaattaggcggcgaggttacggagttttttcttccgagagatttcggcgatttttgcgtaggttgtacgcagtgttttctaaaatccgaaacactttgtccgcattatgagcgactgaaaaagattaccgaggctatggacgaggctgatgtactcatcttcacaacgcccgtgtatgtttatcattgcacaggctcaatgaaagcatttcttgatcattacggttatcgttggatggttcaccgtcccgaacagaaaatgttcacaaagcaggcggttgtaatttcgacagccgcaggttcgggtacaaaatctgccaacaaggatatcgccgacagtatgttcttttggggcgttccaaaaacttatcgttacggtgtcaatgttcgtgcaacaaattattcaggcgtcaccgatgaactcaaaaagaaaattgacaaaaagactacctcaattgccaataaggtaaagaaaaataacggcaaagttaaggcagggttaaaaacaaaaggctttttctttattatgagaatgattcagaaaagcggctggaatgaagccgataaaaattactgggcagaacgaggttggaacggtaaaaacagaccgtggaaaaatacataaggagatgttttaaatggcaaaaaatactgaaatcagcttgagaaacaaggttatttattcggtttatgtccgcaaccacacaaatgacggcacatttaatgccgttgcagaggatcttgacagaataaagtcactcggtactgacatcatttggtttatgccgattcatccgattggcgtcaagaataaaaaaggctctctcggttgtccttatgcaaacaaggactatcgcacaacaaatcccgaatatggcacaatggacgatttcaagagccttgttgaaaaaattcacgcaaagggcatgaagtgcatcattgatgttgtctataaccacacttcgcccgattcaaatctttcggttgaacatcccgaatttttctacagaaagccggacggcaattttggcaacaaagtcggcgattggagcgacataatcgaccttgattattctaacaaagaattatggcggtatcagattgattcactcgttatgtgggcgagaattgttgacggcttccgttgtgatgttgcatcattcgttcccgttgaattttggaaacaggcgagagaggctgtttcaaaggtaaatcccgactgcatttggcttgccgaaagcgtacacagctctttcaatgtgttctctcgcaagagcggaatttataccgcaagcgactatgagctttttgacgcttttgatatggaatatgactacgatatccgtgaggttttcgacaaatatttgaagggcgaaacctcactttcaaattatatggatatgttcaattatcaggaggcaatttatccgcagaattacgataaaatgcgttgccttgaaaaccacgatcagccccgaatctgccattatgtaaagaacaggagcgaccttgaaaattatacagcttttctgtatttcttgaagggttcaaccctcatctatgcaggccaggagtttggttgtgatgaaactccaagcctttttgacaaggatgttttcccacgcaacacaggcattgatttaagtaaccttcttgcaaagcttgatacaatcaagaaaaccgttcttgatgatgacgattatttcagggctgatgcagacgatgaaaacgatattgcaattcttgagcgtgacaacaacaagagcaaaaaagtcggcattttcagccttaaatcaaagtcggctgatgtaaaagttgacctccccgacggcgactataaaaacgaaatcagcggtgaaacagttgcggtttcaaacggaaaggttcattgcaacggcaaagcaataattatccgcaagtaaaataaaattctatataagaataatacaacctccctgcaaagcatttcagcttacggggaggttgttctttatataaaaatccgtgttgcatggttacaacacggatttcttggttttatttaattgaaccgtcgccacccataagagcggtcatttcttcaacgcgttccaaaggaaacggtggttcgcaaagcagttttttatatgctcacttagctttctttttattactgccgaaaattttagtcggaataatgcttccgaggaatgcggcgagcaaaatccacggaataactcttgcgtcaaagcagagcaaaaggagcattgttacggcaagcggttttttcattgtgacaccgagaagtcctgccgttacgactgccgcacaaaatgccgtgtcaagtccgccgagcattgcaacaccgtagccgatgctcactccgcagaagatgacggggaagaagtgaccgcctttccaacccgactttatgcagatgtttgtgagaataagtttcagcacaccgctgataatgagaatccacggtgcaaattcggcaaagctttccttgacaacggtaatgctttcttcgcccgaaaacattgtgagggggaggtatgtacccataacaccgaggataattccgccgagagttgtgctgataataatgccgagcttgccctgaatgagtgcgaaaaattttccgaaaatttttgaagatatgataaacagaaaaccgcatacagcgcccaaaagtgcgagaggaattccccacaaacgctcaaaatttgtaatgttataaccaccaagtcgtggaagtcccatacttccgccgaaaatcgagttaagcaaaaacagagttcccgccgcaaaaagtacggcaatgatgtttgaaataagctttgttgaacggatatcggtaggcttttcttcgctgtcaagcctttcttcattgaccgatgcaagaccgaaaagcggtgcgtagaataccgcactcagggttgcgcttatgccgatttgcattagttcgggaattttacttttagcgtctttcatatgacttcccgcccagtagcaaagtccgacgataacgcctgtcaagcctgcctcggggccaagacttccgccgaaaacaaggggcaaaagtgccgaaatgcagagcaaaagcaccttgttatacgggtaaaatttatctttttttacctttttcataacctcgtcaagttcatcgggaacggcatttgtcagcttttgccatattccgagaataagtccgcccgccgtacagacgataatcggataaaatttgaaatcaaaatttgacggaattgtatcccacacaagaccgattcccaaacccataagttttagaaacagccatactatcagcgaagtaaccgcaccgctgaatccgcaaaaaatgtagtataaaaaattgttggcaacagtccgtttagtcattgtcgcacctccgtgtgtttataattggattataacataaaacacagcaaaaaaacaattattccgcacaaaaagtacgaaataattgctttttattatttttttaattttagagcctcttctaaacaaaaacagctgacaccaatgccgatgtcagccataaaaacctatttgattttaaatttcaaaagcggcgcttacctttttgaattctctttttctgatgatgaagtaggcaatcaaaacggatgtgcctgtgataagccatgaaacggggtaaaccataaggagcatatcataggtgtggaatgccttgaataccgtgaagagccagatgattctgaacacaacagaaccgaagattgtgaggattgcagggaggagtgaatgtccgattcctctgagcgcaccgccgctgatttcgtatgaacctgtcataagctcaaggagcataacaatcgccattctgatgattgcgtacttgataacggtggggtcggttgtgaagaaggtgatgaaaaatccgcttccgagcatgaatataacgctcacacagcctgtgaaaatacagctgaaaagcatacaaagtctaaacacctttttgcatctgtcaaactgaagtgcgccgtagttctgacttgtgaatgtaacggctgtctggctgaacgcacatactatatagtatgtaatgtactcaaagttgagttcagccgatgagcctgcaaccgcctgtgaaccgaagccgtttatggctgtctgaatgaatacatttgaaattgagaaaaccataccctgaatacctgcaggagcaccgattttcaaaatcataatgagatgttctttcttgaatgaaagtttttttggattgactctgattgactcgtcttcgtttctgatgaggaacatcataacaagtccggcgcttatgccgtcggcaattactgttgcaatgccgactcctgcaacgctcatatcgaagacgattacaaagaagaggttcaaaagaacatttacaatacctgaaattacaagacagtagagcggacggcttgtgtcgccgacacttctcaaaattgccgaaccaaagttgtagagcattacaaacggcatgcccataaagtaaattctcaggtatgttgccgcaaggtcaattacatcatccggtgtgttcatcagccttaacagcggtgttgcaataacctgaccgagtatcagaagaagaaatccgcatataagtgaaagtgttattaccgtgtgaacagcttccgaaacctttttacggtcattttgaccgatatatcgtgcaatcaaaacatttgcgccgaccgaaagtcccgtgaataacagcacaagcatattgatgagcggagcgttgcttccgactgcggcaagtgcctgactgcttgaaaatctgccaaccaccgcaacatcggttgagttgaaaagctgttgaagaatactggatcctgcaagcggaagtgtgaaaagaagaatttttttcccgagcggaccttccagcatatttatctggtgtgagcgccgtcgcttttcttttacagtattctgacctttgtttcttctaaacagacttgcaaacgcaagtgagagcatttttttgacttttcccattaatttctaacctcttcaatcacataaccgttgtaaacgatactattcttttccgttttccacaattattgtaatcctgttgcccaaaataaacaagtaaaataccttataaacataaagtttactttgctcacaattttagttacaataactacctcgtcaaaattcttctttttatgcctttataatatggtaaaaactgcttttctgcatattttcagaccgatttttctcaataagcaaggctttgaatttgtatgcaatttgtgccttttcaataaaagtaaaattgctgtcttgtaagcattgacgaaaaattttttaacctacaaataaatgattttaaaattgttgtatatgccgattaaattataatgatacaattgtgatacaagcttaatataatatatttttaaagggataagcgaaaaggggtgaatgttatgaagaaaaagattgctgtaattgtggttgcagttgttttatgcgttgccgccgcagtatttgccgtgccgaaaatcagtttctatgcgtgtgagcctaccgtgtattttgatgttgagtaatgcgacaaggttgacgctaagatgtctgccgaagatgccgaaaccgtgaagaaaatgtttgagggcaaatccgcatattttgattcaccgtcttgtggtttttccgaaaaggcatcaataagaataggctgtaatacatatatgcctgcgtgtgacggtgatgaaattgttaagcacggatttatgtattttagtctttcaaaaagcgaaaataacgaacttcgcaagattatgaaaaagtacggagcagatacgagaaaagctatctaaaaccgttgacagacgcatttccgtgtgttaaacttttctcgaaaaatatacggaggtgtttttatgaaaaactacaactgggcaacactcggttgcggagttatcgcaaatgagcttgcagccgcactcaaaagcagaggacagacactttattccgttgcaaaccgtacccatgaaaaggcggttgcgtttgccgaaaagtacggcattgaaaaggtttacaacgatattgatgagctgtttaaagacgaaactgttgacataatttacatttccacaccgcacaacacgcatataaaatatcttcgcaaggctcttgcggcaggaaagcatgttttgtgcgaaaagtcgataacgctcaattcagatgaacttgacgaggcaatctctcttgcagagaaaaaccatgttgtgcttgcagaggcaatgacaattttccatatgccgatttacaaggcacttcttgaaaaggtaaattcaggtgatcttggcgagcttaggcttattcagatgaatttcggcagttacaaagagtataatatgaacaaccgatttttcaaccgcaatcttgcaggcggtgcaatgcttgacatcggcgtgtatgcgctttcgtttgttcgtatgtttatgagctcatgcccaaacgatgtgttgtcgcaggttaaatatgccgaaacaggcgttgacgaacaagcgagtattcttttaaagaataaagaggaggaaatggcaactgtcattctttcgcttcacgcaaaacagccaaagcgtggcacaatctcgtttgacaagggttatgttgaaatctttgaatatcccagaggcatggaggcaaagattacgtacacggctgacggccattgtgaaacaatctcggcaggtcatacaaaggacgctttgctttatgaggttgaagatatggaaaaggcggtagagggcgacacggctcttatgcaccttgactacacaaaggatgttatgaaaatcatgaccgacatccgcaaaagctggggcatgaaatatcccgaagaagagtaagttttttgaatttaatttgatactaaacacaaaactccaccgtgaaatgcggtggagtttcctttatatatttgattaaatcagaattagtagttttctgcgtggatttcaaaatagctctgtgggtggttgcagacggggcaaacctcgggagcctctttgcctacaacaatgtgaccgcagttacggcattcccaaaccttgatttcgctccttttgaaaacttctgcagtttcaacattgcggagtaatgcacggtatctttcttcgtgatgcttttcaattgcggcaacaaggcggaacttgtgtgcaagctctgtaaagccttcttcctcggcagttttagcgaaatcttcgtacatatctgtccactcgtagttttc

SEQ ID NO: 464 - DNA, 64871 bp, unidentified
  source 1..64871: mol_type = unassigned DNA
acttcaaccttgctctcttcgtactgtctgccactctgacgggcaacagtaagagtaaccttatctccggccttgtagctctttaacgctgactgcagctctgtcatagaagaaatctttgtgctgtcaacagcggtgatgatatctccctcctgtaagcctgcatttgcggcacctgaaccagctgaaacagatgaaacatacacaccctgtgggaagccataggctaccatctcagatgaaacatcgccacccttgataccaaggtatgcctgattctcattagtatattttccatcctggataaggctctcaataataggctttgcaaccgacataggaattgcataaccgataccctcaacctcagttgaagaatattttacagagtttataccgataacctcgccattttcatttaagagtgctccaccactgtttccagggtttatggctgcatccgtctggataagcttgttgttggtaacagtctcacctgtctgtgaatcctgtgtagttacggttctgttaagcgcacttactatacctgttgtgacagactgtccgtatccaagtgcattaccgatagcaattgcaggacttccaacagctacactttcagaatctccgattgtagcaatcttgatatttgagtaagtatcttttccaaggtctgctttctttacacgtacaactgctagatcgtcatccggatctgttcctctgatttctgcctttaccactgaatcatcatcaaactgtactgtgagctcctctgaatctgccacaacatggttgtttgtagcaatgtagagataatcatcatcctcactcacaatgatacctgagccgcagctctgagactgctgtgactgctttccgaaaaagctgttgtaggtgactgttcctgtatttgtgatagcaacgatgctaggcattacctcatcgacaactgatgatacatctgtcagatcctttgcattccctgaggatgtctgcttagtccctccggatgttgtagtggtaagctttgcacttgcagtagaagaatttgaaatagctctcgtgccaatatagcttactcctgtgaaaacaccgcctccgacgagtccgaagataagagctgccgctactgtctttgctgcaaatggtccaaatgcaccaggctttctaggtgctctctgtttcttaggctttgcagtctgctggtatgcctgaccattcatattcatccggctatatgagttgtctgtcgaaccggctgatgcgctgccatatgcattattatttgtgcctgaattatatgcctgattagaataaggctggtttgcatatgattgatttacatttggctgtcctgctgcagaagcctgcgagtacggattatagctctgtgaatagctttccgctgatgtattattagtctgtgcagccttctgtgactcatccggattgtaaggattacccgacattgtgaaatttacattgtttgtattgttatttgtgttatttgtactgttagtattatttgtatcattcatatttctataattgttatccataataatttctcctttcgtttacaattagaagtatactgtcaatctgtgtttaatttgtgacgggattatttattttttcataaattgtaatccccgtgctattctccgaataaaaataactgctcatcgacagatgcacctctaagtctgcgataaatagaaattgcagaatatcaatacatccctgccaatgaacagttaccataaatcatatattaaatttcaattccgttcttctcaagaagagctctcgctgtttcaactgaatctgtacctgtcgcattctttacaggtgcaaactccttctctctgtctacctcaaatggaaggctattgtccatcatgtataccatatcgaggatgagtgtctcgaacttgtatgcattcggagtctcaggcttgtgctctgtaccgttctcatcaatgtaaggcaccttcttctctactacatggagcggaaggctcttttctgcgatagccatgagcttgtccacgcggaataaatagtttaagataacaccaaagccatactgcaatgaaccattctcgttctttgcctctgccatctcaggagtaagctcgtaatactcaacaatcgaaggcttgccattctcaagacacatagcaccgactctctcatatggatcacattttctgaccaccttagagccgctgacacagccggactcgattgtagcacctacaaatacaggatctgcaatctgctgaagcacattgtccacagcaaatacattgagccactcaacacccttgtccttcaaatccttgtcaagaccggcattgatgagtgacttgaaccatccaccgtttccgtttggtgacatagcaagtgaatcctcagatttcatgagcagatttccatcaaaatcaactgccggaaccatctcctgcacgaaaaacttcacatagtctttgttgtatccaaaatagtcgtgctcttcaaagaactctcttgtcatgctatcatttatctcgcttgtcataacatacagaggcacccatgtaccggtctgatttgtaaccttcatgaggtttgcgacaagctgctcaaagatgtagagttcctttgtctttccgatattgaacatgcccttagccttgtcaaatccaagacgtgtcccctgtccaccggcaagaagaattgcaccgaccttgccattcccaaccgcatcaaggcctgttgcaaggtatttgtccttatttgcctctatctctgaaagctccatagcagcaagcggtgaaaatgtacctctctgctgctccttgttgttaatcatatcaaggtatgaccagtccatgtgctcaagctggctctcaagcttagccggagcttcctctgttaagaatttctttaagtatttctggtttgttgccgtgattttttctttgatttctgttttcataaattctccctaaatgtattcgtatcttttttgaattacattattataacgtccgggaccaatctaatgactggtcccggatattatttttgcaattttcgtaaatataaatcttgttcctgatagctgactttaacatttagtcatctgaatcatcggatgaggattttgttgtcgagtcattttcagattctgactgactcttcttcagggcatcctgagcatctttattttttttcttagccccttcagttccggttgaaccagcagtattattatactttgttgtatcatatatatcggtctttgaatcaacatctgtctttttctgtacagtatcacttatagactgtacagtatctgatactgtgtatgactcgtcctcaaaaagatacttatgcaactgtacaacatctgtagccaaatcaataggaataaccgtatctcctacaccagaaagatcctttgtagcaacattatatggaaatcctgtagtagatgaaatctgatacttagtaacatttttcgccagtgccaagatttctttaaccgtaaaattagtactgatatcgtccatcattgacgaacacatggatgtaagtgttgctatatcttcacccttacacttttcgagtatcgcctgcaatacaattctttgtcttgacgcccttaagaaatcatctcctgatgtatatcgaattctggagtatgacactgcttgtacaccatttaaatgtactcttccttcacccttcaatgcatcacaaggatatcctattgaattagccgtttcagttatatatccgttaacccaatgaacttcttccttagtaagatctagatccaaaccgcctaatgcatcaataacatccacaagcgccttccaatcaacacagacatacttagtaatattcatatccagattggaatttatcattctgacagcattctctgctccaccaatttcaaaagcattattagccttataatacttgccctttccaacagacaaataggtatctctgtataaagaagcaagctttacttcatttgtatcatagtttaagctggcaatcattatacagtctgaattaccactttcatatttaccactcgaacgattatcgagtccgaataaagcaacatttaagtaaccatgcatagtctgcacgctttcttcatcaatatcgtcattaatgccggcttcgctggctgagagatcattcttgaaatcaattttacctattgtactattatataatcctaaaacagccaatactataattaaaactaatatttcaaatacaaataatactatttttttacgacctctttttttctttctcttctttgccatgttatttttccttttttctatgaatgtaaagccacgcgtctgcgtagtcctgacgctccttctctgacatattggtatactttccaaactccagattcgtcagtcgcatctgcggtctgccacacttgaagcattcaacctctttccttcttgaaaccatccgtatccagccacaatccgggcaaatgtatattttcatcatagtccttattcaaactgtccgagaacctcagctgacaaagcatcaagcttagcctgtgaatcttcaagagacactcctttaactccgaaatagaatttaatcttaggctctgtaccagaagggcgtacacagcaccaagcgttatcgttaagttcgtagtaaagtacattggaagaaggaagacctgtcggctcaacctttcctgttgtcatatcttttcttgtgtcattcttgtaatcacggatagcaagcacctgataatcgccaaacttctttggctcagcggcacgtgcctttgtcataatctcatttatctgtgcggcaccatcaataccctttaaggtcagtgtagatatgccctctctgtagtaaccatacttctcgtacatgtcaatcatgccatcccaaagtgtcttaccctgtgacttgtagaaggcagccacctcacacagcatacaaactgctgcaggagcatccttatcccttgcatatgtgccaggcaggcatccgtagctctcctccataccgaatacatagttgttgcagccggtcttttcgaatttgagcatctgctcaccgatatacttaaagcctgtgagcacctcgatatgctttacaccatatgctgccgcaattgccttacccatatctgttgaaacaattgactcaacaaatgcaggcttctcaggcaaagtaccattggcactcttctggcttaaaatgtactcaccgataagcatagctgacatatttcctgtaaatgtcacatactctcctgtctttgtatccttgcaatatacaccgagtctgtcggcatcaggatcagttgctaaaacgatatcagcatccttttcctttgccagctcaagcgcgagcttccatgcatcaggattctcaggatttggataaggacatgtagggaaattgccatcaggtactgcctggcttggctcaatgtatacattctcaaagcccatatccttaagcactctctgtacagggcgaagtcctgtgccgtggagtggtgtgtaaacaatcttgatatcctttgccatagccttgatgatctcaggatggatagaaagcttacgaagctctccgaaatatccctcctcaacctcgtcagagatgacattgtaaaggcctgcctcaatagcagcagctttgtccatagtctttacctgatcaaatgatgtaacctttgccacctcagccatgatgcttgtatcatgaggtggagtaacctgtgcaccatcctcccagtataccttgtatccattgtactcacgaggattgtggcttgctgtgataacaacaccggctattgtaccgagtgtccttactgcgtatgacagctccggaacaggtgcgagctgtgggaatacatatgtcttgattccgttagctgcaagacagagtgctgtggcatctgtgaactcatcatgcatattacgtgagtcatgtgcgattgcaacacctctctttactgcgtcctctccctgtgaaagtatgtaattcgccagtccctgtgtagcctgacggactgtgtatatattcatcctgttggtgccggctcctatgacaccacgaagacctgctgtaccaaactcaagtgtgcgatagaatctgtcctctatctccttatcatcacctgcgatagccttaagctcagcctttgtagcctcatcaaaatatgggtctgtgcaccatttctcgtactcagctctaaaatccatttatattaacctcctgtatcagctagtaaataagcctattaatgttaaccataccgattttaccacattaacgtgcatttgaaaagtttttgttccttaatattttcttacttattgatttttaaacacaaagagcttgctaattatgtaattgagcaccactaccaccacctgggcagccagcttcacccacatgcttgggtacgaaagcatcgttataaaaacaaaaataatagtttcctcaataatcagggtaaaaaatctgccactgaaaaacgcaaacatctgcacaagtgctgctgtttttgtaggtgttgatacgcgaaatacccatcttttgttggtaatatacgaaaaaagcaccgcaaatacccaagcaagggcattcgctattaattcatttattccaagtgcaacattaaacactgcatatgacgctatgctgattataaatgtcatattaccaaataccgtatagagaaccagttcctttaaatcttcttttctctttttcatgtcatatccgtttcatcttataaaatcttcgttaatctgcgattttactataatagcgttatgaatgaaataagtcaatgcctatttttgtatcttaggttcccaataaatggacgcctcataatataacctgcatgttccacttttcatatcctcacgaacagagtttatcatttcttttgtttttttcacacatttattccattttacaatatccccggtacttttctcagagctgacatcatacttattaataatatactttccaagatactctgtcattttttccattccattaatatttaaatgctctgcatcactatagtctgccggtacatctatacccaattccttcgatttatcgtttaaattcaaaatatcatatccatattcggatataatagaaccaattttatctatagcttcaggattttcaaacttacgctgatgtggaaatctgacaaacaataccttttctatattttgagcctgaagataaaccaaaagttctctcagtgcatcttcacagccattatcaaagtcaatattctgcaattctcccatctgagtacctttatcacttccggacaccgtacaaaatccctttaaatagctttgtttattaagggtcataatgcttttttccagtgtatttttagccagactaattggccgtttccaattaacatgagaaaacgccatattaaaataaaactgacctttcccttgccctttaagaagagaatcaactgaatccttacgtccataaatatatggaacattatctatccaacgatgaagctgcaccggattttcaaagtcactgcttccatgcagatatccattcagtgaaattacaatcaatttcggattctgtctctccaagcctttttttatcatatctttatataaatttgccggagcggctcccattgacaaatcatatgacgtatatccatagttttcccaggcaattgcgggggaatagtcagaatacacttcacttgagcctatcattagcacatccaaggaatccttttgctccataaaaaatccctgaacattcatctgcgaagggctgtcattcactgaaaagactatacttatcatctcatataaaacaataagtataacccaaaaaagaattatacttattatatttctttttcttaacatatcatatcttccttatatccatccatacttatatatagtatacctcatttagcgatataatactttaagaaatccttatttaattattaaagtattttacattctttattttctttatcattaagcactgtccttacaatatataacggtctttccttaacctgcataaaaatattgccaacataagttccaactatacctatacacatcataagcagtccactcattaaacaaatagttgcaatgatacttgaccagccgcttgtcacaacacttgtagtaaaataatgaacaacaatttgttaacagtgcctgacccaatgtgatccttttctgaatttaatatttaaatagttttgccatatacatgtttacaatattgtagccataattcttagcagtcgcccaacctcttccatatgggttctcctggattccaagccattctacataatgtgctgttcctcttcttacatgttggaaccgggtatccacgcatggctgattcagaccatcggttgatgcataagcttttaagtgctgtacctgtgcccggattccttcccttacactgccaaaagaatttcccggtgccccattaccggttgctcctaatccagcaaagttatactggttaatctgtacatctaccccatatcgtaaaaatccagtctccagcattgcctgacagaatgctacttctgctttcaaaccttctgcctgacattcttccagatatatccgacaaaatgtttctattgtcggtgcatcggaagatgcatagaattccggataagtattattagcattataatatgcaaccatctgtgcaagattggtactggttgttcccatgatttcatatcttgctgtcacctgataagcggtacaataactttctactgttccatcacttgttcttgattctacatatacccagtaattaccagaatccggataccaggatacccagttgcttccagtccagtctgtcaatgtagaccaactgccagtgctaagatcatatatctgccaacggaatactagtgatgtatcgttgctattataagatacgccaagatttattgctgctttatcattcacactgcagattccattaatcgttatgtatttataattgtaatttcttgctgcataaaagcagattgtataatccttcgtcacaccatctgatgtccgtgctgtaacatgcatccagtaattacctttttttggataccaggatacccagttacttccggtccagtctgctaccagattccacttctgcttatccagattatatgcttcccatttaaatgtcaaattggaatcgtcactatcatatgcaattcccacatcaatccgatcatcataaatattataacacattccattgaggtttaatgagtgatgggaatagtctttctgtgatgcgaaacacataattgtattctgtgtcgcaccatccggagtcattgcctctacatacagccaaaagttgcccttttccggtttccaagttacccagttgcttccagtccagtctgctaccagactccacttatgtttatccagattatatgcctgccatctgaatgtcacatttgatgcattgctgacatatgacacacctacatcaatacccttatctctcatgatataacacattcctttcagatcaagataatagacggtataattatgtgtcgccacataggaaactgtctttgtcgtaccatttccattgctatcaattgctgctacctgtaccgttgcttctcctgccagcattaagactgccagcaaacatgctgttgctctttttaatatcttcttcattttacgacttcttccttactcgtatctataatattccttaaaccatgttacaaattttcctaattcttcatcaatcgaagtacttggtttaaaatcaaaatcatgcatcatattgccattattgtaaatctggattgtttcacctgccataatcttatattcttttattcattaaaactatataattaaagtattttacattctttattttctttatcattaagcactgtccttacaatatataacggtctttccttaacctgcataaaaatattgccaacataagttccaactatacctatacacatcataagcagtccactcattaaacaaatagttgcaatgatacttgaccagccgcttgtcacagcacttgtagtaaaataatgaataattaatccaataataaccaatgccgagcacatagacacaacaaatcccaatccgactgtaagttttattaacttgtccgattgtgatgtaagaatcgatgtagccatcttcattcgcttcttaaaattatatgaagattttccctcatacctttcttcatgatgaacatctaatgtgccaattctaaagcccatccattttacataaataacaaaagctctgtgaagctctctcatcttacaataattatctaccactattcgcttactgatgctaaaattacataaagccgggtcatagttgccatcggaggcccatgaatatatcttgtagaaagcctttgaaaccaatactttcataaaagaatcttttcgttctgcacgtcgtgcaaatactgcatctaattgatcatctattgcttttttataaagatttgggatttcctcgggtctgtcctgtaaatcacaatccatcacaacaacccaatcacctttactataatccaatcctgcagttatcgcctgaatctgtccaaaattacgtgacagttctattccaacaacatgcttatcttttttgcataactgctgtattacctcccacgaattctgtggacaattatcatttacaagaatgatttcatattctttatcaatcgcaacaagtgtatctgttaacctgcgatgtaattcttctaatgctgccctgcaaccataaattggtattactactgatatatccatatattgtcctttcaaattacctatttatccgcatactgagtatattattattccgcctactataaaaaacaatgctataattttctttttattaagtctctcatgaaaaatcttcacaccaaataccgtgacataaatataacttgttgcctctaatattggtcccatagataacggaatccctctatatgcaattattgaaagaaatgtagttccaacaaacattgcatacgcaaaaattaccattggattcaaatactctttcaaatgattctcataatgtttcattgcagctttttttagtaaaacctgtgaaatcgcgctgacaaacacacctaccagaagtacacaagaatagattaatacagttttattcatttacttctccttcatcagccctggcataaattacgacaccaacaatcactaatgctgcaccaatcacttttccaacagtaattgactcatgaaaaaaaacagctccccatattattccccagacaacagttacagctttattggcaaatgccgtagttaacgggagtcgtttgataatctgttgccaacctatagcataaaatcctaggaggaaaataataatagcataaaataaacagaatttaaaactaagaaaaggctgttgtgatgccattttactacatattccactcatagaataaaccatcaacataagatgcaatgcaaaaagtaccttaagtttcgacttgttcattattactcctctccgttatccggtaagtatggatataaacatctcaaatcttttgcttgcataaggcaataaccatatcttgtagagctatcaaccacttcatgatctcctaccggtttaatatccatatcaactatatattcaggatgttcttttttgagtttttctaatatatcaacatctttctgatcaaatacaaatctaacccccgctgccgcatggtctccaaacgccaagtctggttcttctcctaatgatatatcaataaccgccttcacaaaatcaattcctgttgaaagctgcaccaggttgcttccgataaaatcgccacccattctgccaccgatttcaatcaatgcaattgtgccatccttagcaatctttaactctgtatgcgacgctccatatgtgatttccaaactatccagagcatgaaagacaactttttttacctgtttcaattgttcctgtgatattggtgccggttccatatgtccggtctctataaaatgtggtgcccctgtcgtaaacttgtgtgtcattgccagaaaatgatgatctcctttccatgaaacacactcaatactatattcttgacctgtagcaaactcctctactaatgcttctttctcaaatccctgagctttagcttcgtcaattgcctctgccagcccttttacatcatgcaacttcgttattccacgacttccggacctatctataggtttaacaattatcggataattcagttctatttcctttaaatcatctatcgtagataccaaaatacttttaggagatggatcaccgtttttttcaaaagcttctctcattaaatgcttatttgtagatttttctgtacatgccatggaattagctgtaagtcccatattatttgccacataatttactgtaattactgccagatctgatgctatcgtacatattccgtcaataccaatctctctacattttttcaagatttcatccttctctacaatactgataggataaaaataatctgcactcttttctcccacatcacctgccgcccatgcgaacacatgcgtctcgattcccatagattttgctttttctattaatggttcctgtaaatatgaagctccaattattgctaatttcttcatctttttatttcctccaaagctcggcaaaacgattaagtttctgttccttcttataatcctcaagatatcttatatatgaaaactccggtttataacctaaatctttttttgcattttcaatatccatcacaaaacttgtaaaactactcttttcaggtttctcaacaatatttgacatatgctctttaggggaaaacacatctattatcccttcaatctgctcacgtaatgtagttcttattcctgttcctgcattgtaagttccaccatcaacctgtgcaaacagcgctttatacatcatctgacacaaatcttttatatagagaatatccttaaatgcatccggattcccccacatctcaatagtatcacctgctgcagctttatcaatcatatacctataaccaataggttttttgacacaatccacataataatacttttcaggatgatacaaatacacattaggaagcctgaacacgaaatttttcaaaccatattcctgcttgtaatgttccattgtatctacaaccatactttttgtaatagcataaaatgcatgatcaccggtaaacaacagttttcttggatactcaggatgaagaacatcttcttttccccaatatcctgcctgctctgcccatgtctgagtatataaagccctgtctgcattattctttcgggcatattccaaaatgcgaagtgcaccatttatgttggtctccacatatttaaatggatcatattccttcatataagcaggcaaaagtcccgctagattaacaacagcatacaaatcttctgttggcagcctctcaaaatctgatgcattacataaatccacatttatatattcaatccctgctttcttgtaataatctgtatgttttcttcctacagcaataacttcatattgctttttatctatcatattattacagtaatcggtaaaatacgctccaatatttcctgttgaaccaaatataactattttcttcataataatacctattttacttataaaattcctttaccttacttataatgtactgtacttcttcatccttaagaccgtaatacataggaagtctcataagtctttcactctctcttgtcgtatatttgtcttcaccattaaacctaccaaatttttttcctgccggagctgaatgtaatgggatatagtgaaatacagcctgaattccattttccttcaagaaactaatcagagctgttctctcttgcagatcctttgctttaatatagaacatatgagcattatgggtacagccttccggtatatatggaagctcaatcttccctgatttctccaactcgccaaatccgtcataatatgtattccatatattaagtctgtaattattaatcatatctgcctgcagaagctgtgcatacaaatatgccgcattcatgtcactaggtaaatatgatgaaccataatttacccatgtatacttatctatctgacctctaaagaatttacttcggtttgtacccttttctctaaggatttcagcttcttctgccttatccttatcctttattaagatggctccaccttcacccatagaataattttttgtctcatgaaaactataacagccataatcgcctatagtacctaaagcctttccatgataagtactcattattccctgagctgcgtcctcaattactataagattatgacgctttgcaatttccataatcttgtccatatcacaagacacaccggcataatgaaccggtacgatagcttttgtcttttctgtaatagcatcctctataagattagcatctatgttcatagttttcggatcaatatccacaaaaactactgttgcacctcttaatacgaacgcatccgctgtggaaacaaatgtgtatgatggcataattacctcatcgccttctttaatatcgcataaaagggcagccatctcagttgcatgtgtacatgatgttgtgagaagtgctttagctgttttcgtcttttcctcaagccatgcgttacactttttagtaaactctccatctccacaaatttttttattttcaactgcttttttgatataatccatttccgttccgataaacggtggtacgttaaaattaatcatagtattctctcctaaaaaataatataaactatacaatcatcctgcctaaaacataaaaaacaggaataacaacaaccaatgttcttaaccaatatatccatctttccgtttttattgatggtatatttaaaaaccctaatttagctctgggattatttaacaccaggataaatatacttaaaatcaccactaccgtggcaaatatctgcaataatatcgtcaacatatcatttgaaatccaacatgaaatatccattcctaaactaaagttttcttcaacaccacttgttccaaatacaaacttaaaaacatttttgtttacaacacttgaaacaaataaataaagaccactttgtattattaaaattagaaacagcgaaatagaaataattgtttccataattacattaattcgatatttttctttatcaataaccatcaatattgcaataaatgggcataccataacaacacgataatactgaaatgttgaaaatagtaacatagcaagacacgttgcaacaatataatatatcaaatatctatatttttcatcatcattttgaggtgaagttaaatatgccaaaatatatattatcaataacattccaataaataaagaaatagaattattgtacaccaccggaaaagcaccaccgaccatttcttttaaaagaacagaaatcggactaccttgtgaagctgattcactaaccattggacaagcccttgtaacaagccaatatattcctgttggaataatacctaatacgattttatatataatccttaaaactcttttttcaagcaataatataattgcaacatatggaataaagaaaaaatattttacagaaatagccataccagccaaaaaataaaaccatttattccttccatccattaaacaatacacagctgctgttgcaaatgcacatataactatatcattttgtcctccataataaacacctatatatataaatagcgatgaagctaataaaaacattgcccatttagcactatttacatcaccagttatttttttcacaatcttattcacaaaaaacattgtaatacataaacataaaacaagaaataactttccccatatatacacaagcgggttatgcagtacttcaactccaaatattgttttaattatccctataggaatattccatattgcccaaattattaaactatataatgttcctgaaacataattattcggagccatattgggattttcgatagaatacctataaaaatctaatggctttccttttactgtaacatcaaacatgtttagtgtccatttaatcaaattttcagtatcgccatgtataaagaaacacaaaataataaaagaaataatgccaaccattatccattctattatcaaaggtttatcattattatatatttttttaatcccgttaattgctttttttatcattattaaattcctcataggtttcttatatttataagcattgcaatctcatttttcaattatgcaatgcttataatttaatcaacttcaaagataatataccatgtcattaattcaatgttatctatttacgataactccctgtgtcatagaatttacaaccccatccgatgttcttgcttcaacatatatccaatatgttccattttttggataccagtttgtccaattgcttttattccaatcagaaacaagtgaccaatgattatttaccacatcatactgaagccatctaaactgcacatcggaatcattagatgaatatgtaacaccaacctgatataaagatgatttatcaatcatcgcaataccatttaaatcaatataattcttgctaaagtctgttgaaactgcaaaacaaatggtttgctcatcaaatccaccatcaccatttgctgcttcaacatgaagccaataattacccggctgaggtttccatgttgcccagtttccaccattccaatctgctattcggctccacttctttgtatccagattatatgcctgccatttaaatttcacatttttatcatccgatgaatatgcagttccaacatcaatacctgttttctttacagaccatgtcataccatttagtgtcattggtgtttttgacttgtctgtaccaacattaaaacaataagtatattgatcttgtgcaccaccttgtgttattgcttctacatgcacccaataatttccaggtgttggtctccatgtaatccaattaccactgtatctatcagccagagtggtccactttttagtatcaagattataaacttgccacttaaataaaacatcaccaccactgtgattatatccaacacccaaatctattgaatgtggattaatcttccatgttgctccatttattttaacatagctttttgtataatcaatatctgacgaaaatgccgaatcatagcttgccaccgcaccattaggtgcagtaatttccacatgaatataatagctttttgcttccggtttccaggtaacagtagaatctgtggaatcagaagctaaggttacccagatttttttatccaaatcataagcttgaaccttatattttggttcaccaatattggaatcagcattaactgtaatcctgtcataatcattttcttgtgagaaatctacagattttataccaaaataggtttttgataatccataatactgtgcaatacccaatgcatcagcatgccccatcttttgcaaattatcctcatttcccataaatgatgcatctgacttattggtaacaaatgcatgctcaataattattcctggaaaaccattaagtttagatcttcttataaccccataataatccgctaatgatccatccggatatagtgtgttatcttcagaatttctaattaatattccatgattatttaatcctaacgatgtgagattatccaatattttttgtgacaaccctgccccttgcgagccaatattaccattataatttgcatttggataaaatatttttgctccacttgctccactatttcttgatgaatcacaatggaaactgacgtaagcatctgcaccaacactttttgcatactctacccttttagcgttatcatctgtagacgttgttccgggatacggacatgtagacgttgttcgcgtcatatatacctgaactccataatatgattccaattcctgtttacaatactttgctatctttagattaatatccttttctgaaataccatttgctgctgctcctgtatgagtatcatcatgtccgggatctaatacaacaacatactttccatttgatgaccttgcaagatttgaataattttcaagatctgaataattttcaacctgtatttcattttcatcaagataagcatccggcttatccttatcaaatcccatttttttcatgtcaaactttgtagcgatttcattattataaattgacaaatcaatcaattcataatcatctaaacctgaagaaacctcaaataataatcctgatgacgaaatcttgcatgaattaatagaaatattctcacctgttttagtatttttgacatttaattcagctttttccggagtatctcctgtatatccaactacaattgcctggttattttcatctagcatattagaatcatcaagtatcacatgagttattccgaaatccgactgtgcagtttctgcagttctttctgattctgtattttcaatttgtttcacctggtcaacagcttctgctgtttcagatgctgatactgtattgaaactaaatgatgttactatcatagtcgcagccagcactatagttgctgtttttttaaattgcattttattttgcctccttttttaataactgaacaactttatcattaacatgtaaaagtaaatacgaaaatacagctattacaactatacaacaggcaaataacaaataattttgccccatagttatattatctaaattgaatttttccaccattctgtaaataataaaatgatgaactataaaacatgggtaactgtatttacatattaccttgcatatcttttgaattatatcaaactgaagtaactcagaaacatatgccagacagacaaatgaagctatccctacgtatgtacactgcacaacagaaataaaatccggtttgactaatgtattaataacaacaataacaagggaaatcaaagccattttcaaatttggcttttttataaactttataaaatacattccaaaaaggaattccggaagctttacaaacagggaaacatctttagcacctaatacaattgacagaatatataagactgctgtaataatcgccaacaataacggatattcattaacgccctttctcaatatcgggaaaataatatatataataattatataccccaaaaaccactctcccaccagaaaaaaggtctgaactccccaatttgctatatatccatcaattcctaaaatagaaaaaatatatctccattttccaatgcttgtatctatacttccaatcctatagaaattaaatagcatagcaaaaatatatgctatccaaaacataggatatatgttaataaagcgttttttccaaaattttaaaacatccagctcattttcatatacatacatcaaagctgctccggatattattaaaaaaagcgatactccccagcttccaatataaacatttccaacagtcatcgtcaaaatagccttttgtggcattgggatagatgtattatatataaataacgcattataatgcgtaaatataatactaatagttgcaactgcacgtacaaagtccagatagaaaattctctctctcttcacagtttttccttacactccattctttcttttaattctttatattcatccgcaagcttttgatatttattatataattctatcatttcattagagcatttctgccaattcaataaattatattgcgcttcagatttatatttttcaataactcctgttctatcgcgatattgatttgacaacactgacaataaacctgacatttcatcaattacatcagaaaatgacaaaaaggcttcattgtatccaccttgattattttttgtcagactatctgctatctcgtcaaaatgcatatcaaccttctgcttcatgtttttatatacactttttaattgcttttgttctctctcaaaagcacatttaattccatcatgaagcatcgattcatctgaaacatactgctctgataaacccaattgatcatatagatcacgtgttttcttattgtgcacaaaatcaaaacctacaacaggattgccataacaaaatgcagtaatcgcaccatggaaactcacaccaatatataaatcgcaaaaggctaaatatgaaactatttcttccatggttaattgttctgaaggaagaataaaaatctcattactgtctttatataattttttcaaaatatcataatcgtcatttgtaacagctaaaggaaggagtaaaatcttataagttttactcagctccataagttccttcaaagcactttgatatgaattttctcctataaatctattgctatgaaatacaacatatttaccctttacctgtctttttaatttccatttaggaaacacctcttttatattaaatgccgtatccacagatactttcacatttgcattataatttattaatgcatcatatgaaaactggtttctaacgctcataaaagaaacattacctaatactttcccggcaatataattttgatacccatcaaactcaaatgggcatcccggattattccatatcacgggtattccatattttctaccaataatagaaggcactatccatgtttcaaaaataggatattccacatatttttcttcatggtttttttgtttaaaggaataaaaatgaataatctccccaccaccaaccacaattgcatcaaacttattaatcttgtggagcttttccatttctcttatagagtatactttctttgctataccaaatccttgtgtactctcatatggagaaaagaggaacaattcaacatctatttttctttttcttaaactgttttcaaatattataggaaataaatgatctccaaaattatcaatatcgaaaacacctgtaaaagctatttttatctttttcatagaagttcccttttcccaaaaatcacttaactttatattttttcttaaaattcaaattctcaaccagtaacgcatccattttttcaagtgtctcattgtacaattgagtacacttttcattgattttttctaattcttcaactctctccccatatctaggtgattgctcataccaatttctatattttttcaactcattatccaaattagtagcatgagcaagaatagaatcaatataaacctttttatcctgaatctcatttttcaattcctgaatcattgtagattgttgttgaatttgaatttgtaaactattattatcaatttcctgtgcaacaacaccattattgtttctcggtctgctaccatacatataagtcataaaggtatgctttttcttacagacacgtgccacacttacataatgttctatcgttgtcaaaacatcaatcctattttttgtaatttgtgaatcaagccactcttcaaactcttttacaggtgaaatcgacatataggtttctctgtcttctttattttcaatagcaatatctattttttttaatacatcttcgggtattataataaccttatgatctattaattctaccgaaaaattcgcctgatattctgctgaaagaataaacaatatatgctccttttcacaattaagcaattctttcattttgtctccataaataggattgcccatattatctacttcaaaaaaaacatatccatccataataaaatccttcctgcttaattataatttgttttttaacttgttacaaactcgtgttatcttttgaaaaactgtccttgacctgcgacttatcttatgattatctaaatcactgattcttctcactccatgaccttctatcgtcacttttgaaacatgatacttaccacctaacgaaattatcacctgtggatccggaataacaaatacaatatgatttcctaaatctattccatttgttgttacatcttctatagaatattttttctcaatatcattttcacacgtaactgttacaacaacatcattaattgttacattagcattttcacctggatcccaacgaatttcacgaatagcattatccatttttttaatatcaaattcatactcaaacttatcattatcttttgatttatttgatgcatctaccttatatttttcattataaacaccatcattattcaaataaaggctgctattcttaagccctgcctctaatgcattgccacaattgccatatccgaactcactgtgaagtccatttatcacgtcttcaaacttaccggcccccgggccttcatgaaatacaacattattcattgtcctaagcatgtagtttaaatttgtaatctctatatctgcacatttatcagataaagcccatgccggataataaccttcctgttgaacaacataactatatattctttcaattgcatgcaataatgttccatcaattgcatttggttcaggtggaaaatcttcatattcccagtctctgtcaaaaagtaatttcatagcccttggtctaaaccaaaacatagttcctaaaggtgcaataggttctttcttttcatcaataggcactgtaattccaagctcttttgccagattttttgtattttcaaaattcatgccccattctaatcctaatgttatataataatcaccatgattaggtggtggtggcataagcattccaagtctcgggttttcttcaaatgtttctatagcatttaatactacattttttgaccccagcatattctcaaaacatttatacgaaaatccataaccaatagtttcaggctttagctgtgtcaccttcttatcatgcataaaacatacataatcataattcattataaatttctttgtagcaactaaaagagcactaacatccctgcccctgttttgaataactatcacctgaacattattatttaattgtttaaatgcctgttcaactatttctttatttttttcacaaggaacagtaatatatatatctgcactttcaggcatcatagaagcataatgaagacaatactccgttaaatcctcaaaataacaatgcattacaagagcaatttttcttgctttgataattccggcatcaatattcgaagacttacttgaaagtatataatttaattgcatatttttctttatatcagcctgattttccaaccttaaaatgttctgccatatcatatccacatcataatctgtattttggtcgatataattataagcctccagagctgactgtccaaaagtatcacttataatgttatcataactttgcataaatgatctacgcttaaaaaacggacatctttttttctctatcatctctcttgtggcacataaaatagggtgattattatattcctcacccatatctgcatatacatcccacttaaatcccatttcagaaaatcgctttgtaaacattgcctcatgtttacctactgcatcacgataatcatttatctctcccattttattccaataattttgaaattgtttactcttaatcattgagtttcttaccgcaataaaatgagattggatatgttcaggaatatatccaacctttattgttccaaaaggatctccgttttcatatttatgaaattttgtcactccccaaaaatctaaatcttttgcatccatacattcgaacatttcattcaaaggatacaccggtcccattatagtaaagttcatcattatcatttcatcgaactttacaagcttttcccaaccatattgatctattgctgttttgtatgcccatacatcaaagcctttattttctctctcaatgacattatttgtaatggatagcagcttatctttagatttattctcaagtgttccattaacaactgcaactatttccgatgcattttgcctcaatgcatttaacatatatataatatagtcatccacaatgccatctttatcatatataaaataaattataagtcttttcacatcatttttatttaaaaccataaatcctccatctctctaaagatgtgtatacaaatcgcaaacagtatctacatcatcttctatcagcatttttcctttatttataaggacagccctgtcacatattcttctaacctgttcagtgctatgtgatacaagaagtaaggttgttccgctattcagcatatcaccaattctcttttcacattttttttgaaacgcaaaatctccaaccgccaatatctcatctacaattagtatatcaggagtatatatagtagctattgaaaaacctaatctggtagtcataccagatgaaaaattcttaacgggaacatctacaaaatccttcagctccgcgaaatcaataatctcatcaaatctttcttttaacatttcttgtggatatcccaatattgctccattcaaaaaaatattctctcttgctgtaagctctgggtcaaatccagctccaagttcaatcataggagctaccgtaccatttactttgacagtacccattgtcggagtcagaacacccgctatagttttaagcattgtgctttttccacagccattctttccaaccagaccaactgcttcacccttcttcacattaaaactaatatcttttaatgcccaaaaactatcctttgatatttctcttttaacctttttaatgaaatattccttaatactactaacattttcggaataaaggcaaaattctaatgatacatttttcacttcgattgcgtaatcttccataagtcaccctatatttttaaaataaacgtattttgttttttactgaatatcaatgctcctagtaaaagaacaataacactagtcagtaggcacctcaaatttaatgctaaagacggaacctgacagtataatataacatctctgatcatttcaacatatgctgtaagaggattaagatttactatttttgctacccattccggcaacattgacacagggtagaaaataggtgtcaaatacatccacgctactataataaccccatataaatgttgaacatctctaaaagccgtcactaaaacacataaaatcattcccattccatatgcaaacatccatgtgtaaataaccggaactattaccagtaaaaatgtccatgaaacctgagatcttgttatcacaataacaataattaacgcaataaacgatgttaagaggttcacaagactagtacatacacttgacattggtaacaggtatttgggaatataaactttttttattaatgccccattccaaataatagaattcatagctgaattgcttgcttcattataaaaattaaaaactaactgtccgcacatcaaatataccggaaaattttcaattccagccctaaataagtgcgaaaataccacagtcataacaagcatcattccaagcggattcaaaacagaccataatattccaagcacagaacgtctatatttagttttaaaatctctttttacaaattgttgtaataatggaagatatttcttaaaattttccaatgatttgttcatatttctgttctctttatttactcattattttatttatctttgttgcatcaccccatacggccggtgaatcatatggtctatcaggaaatgcaccatattcaagcttaatagaatatccttttttcttaataaagccctctatttcttcacctaatgctaccggcttacccgaacagcagtttattataccatcaatctctttctgacaagccacggctgcaatctggtcagctaatctatcaacggtaataaagtcatatttattctttcctgtagtaaacggaaaagtttttttgccttctgcatctgcttttgctatttttgagaatattgaacttcctctcaaatcatctccataaatatagtatgccctgacccactgccagcatgcgccattagcatctgccaaaagcttggaaatatctctgagggcatttttcgcgataccataatatgagctaggatgtgtaggtgtattttcatctatagcaccttcccaataaccaacctcatgcattgatcccattgtaataatctgtttaaggcctccctccagcatattctttatgaacgcataatgcttaggcagatcgacaatatgtgcctctgaattgtgcacgaacccatctctccatgccatgtgaatacacacatccgggcaaccactttcttcaaagatattcggattgtcaaatattggtgcagttaccttattaacccgctcatccattccttcgaatcttacatctgccgcataaacgtcacagcctttgtttaataaagcctcaacaacatgctttccaatatatccatttgctcccgtaactaatactttcattgttttctccttttatttactatcagtattcgtaatcgagtataaatctctgtaaaacattacaattatatacttatatatctcattttgcaacatttctgtaacaatctaatttattgattatatttttctgcctcaatttcatcaattatatcaaaatgttcatgtgtctcgcgtattctacagtcaccatacattaatgtcaaattcgggttataaaacggatcgccctcatcaagttcttttttccatctatccctgaaccgtgatatttcacgtttaaaccgctcatgcttttcaggtgtttcctccagccccctgctttttgattcataatgatacaattctacacccgggtgaattattacatcatagcctgattttctaacctttaaacacaaatcaatatcattaagcgccaccttaaaaccttcatcaaaaccttcgacctgttcaaataccgaccttttaatcatcagacaggcaccggtaacagcacttacattttgaacagcctgaagttttccaaaatatcccacttcatttctatccgacaaagtaagaatatgccctgcaaagccacctactccgattactacaccacaatgctgtacactatcatccggatacaatagctttgcccctacaattcctgtcttttgtagctgacaatatccaaccattttttccagccatttttccgtaattacctctgtgtcattattaagaaaaagtatatattcaccggttgcatactgcacgccaaaattattcactttcgaataattaaactctccatcaaaatacactacccttactttatctgtctttttttgaatttcattataatattgaaaggtttcaccttcagtgctattattttcgacaattattatctcataattattgtatgtcgatttatttaatatcgaatctatacatttatttaacgtatctttttgatccttattacaaattataatagaaatctttggattattttgaactacaaaatcagttctaaacatgacaaatattcctgtatcctctatctttgcttccaatccaagtcttttataatgttcttctactgcttttcttcctgcagctatagcatatttcttacttgccggatttcccgctgtagagccttcatgagctctccaatgatataaaattttaggcacatgtcctatatattccgtctgttcacagcatcgtaaaattaaatcccagtcctgtgcaccatcaaactccgttctaaaaccgccgaccttatcaagtattgtttttctaacgaggaaaatatgacaaatataatttatactacgtaaaaaatttatattaaaatcaggtttaaatcgtggtgacaaatattttgttccgtttttattagttaaatcctcatctgtatatacaatatccaattttctattcttattgagtaaactcactatttcaaatagagcatctttttccagaacatcatcatgatcagccaacataataaattcacctgatgccatattcaatgctgtattagtatttcctgcaattcccagatttttattcaaacgtttatattttattcttgaatcactcaaataatgttctcttaaatatttttccacatcatctgttttgcttccatcagccagacataactcccatttctgatatgattgtccgactatagaatccatgatatcttttaaaaattctcttttggtattatacagtggaatagttatactaatttcaggttcatattcaaatttataattcgcctgttccaaaattaatttatcagaaactctttgttccaaaaaccatttattataatctgtatccggtgataaatgttttaattttctaataaatcctttaactccatacttatttaaataattaacaccttttttccaattttctttatttaatgctttgctaactataaccgttatattcatttttactcctaaccaaaaaaatcatccccacacagcctgtcccagccgtctcatggtcccggtcttatacatatcgttttccttataaaaccgttgtctcacgcgtctggatttaccttccagtgccgcataccttgctgccaggctatcatcgggcagattatatgtctttgcaaattctctcgcctgaagccgcccaagcctcatgctctcctgtatctgtttcttctgccagacacgacgcacaatatatgaaagcttatttatcccaagtgctcccaaactgttgtctccatgctgtctgtacagtattgtaggctcatctatgaatgctgtttttccaaactgtgcggcaacaagtgctgcccaccagtcatgcattattgtgttgtctatatcagtaatgcgaagcattatatctcttaaagccctgtttaccatcattgtacagcctgtcacagaattctgcaatataaactgattgattgtgcgcttgtggcagtcaagactctggtattcgctcatcgtgtccgctattgtattcagctcactatctaccacgcatagctccgtgtacaccagacatggaagtccggatttaagctctttaccatctgttttttcaatagccagcatcttatcataggtcagctctatcttcttttccagccatacatcgtcctgatcgcaggtcatatagtatggcgcttccacctgactaaacagatagaagaagttgtactttgctccacctgttgatttgccgtctatcagatgtatcttatcagggtatttttccacatagctttctacagcagctatcgtgttgtccgtagagccatcatcgtgtatatatagttcccagtccttgcaggtctgcgacaggatagagtctatctgctgacatatatatttttctccattgtatgtagccatgagaatggctatcttgtctgtgctatgcattattcctcttccactttcttccggccctgttgccaagaaactttgctgcgctgtcaaatatgcagtgcactgctgcccatatcttaaactgctttaagagctgtttttctatgaaaagcaccatcctgataccctcacctgtggtaccatcacactttatctcatccttgtaggtctccataaagaccgctacgtcaaagttgcgcttgtactgctgcttaaatgtatagttgtgtgagtgatacacctgcgctgtggcacaataacctatcttgtatcctgccttaagcgcccttgctgccataagcatatcctcatttgtgagcagcgggctttcaaagcctcctatgtcttcaaagaaatcacgtctgtaggctgagcatacatccgagaagaaatatgcctttatcccaagttttggtatatcagcttcacttctgacaaagctctccgcaggataattaaattttctcactaatacctcgtcaggctttgcatcctttctggggagctgtctggctgatatcatgacgacatcttcgttttcaaagcctctcagcatattttccacatagtgttcatccgaaggcagtgcatcctgtgacagaaacatcactatatcaccctttgacatggctacggcatagtttcttgtgccaccatggtcaaactcactccttttgacctttagtgtcctaaagcctgcctgctctgccatacgcactgtggcatcctcggattctgagtctatcactattatctcatcgggcttacggttctgtctgcccagtatatctatcagaccgggcatatactctgctgcgttgagagtaggtattatgagacttatttttatactatttaaatccagtctcttcatcatatttctcacatatgttctgattattgtgccccatcctttctgattacagagaaaacggttctgaaaagtatctttatatccagccaaagtgagcagtgctccacatagtacatctccatcctctggcgctctccgctctcataggtggcattgtttctggcatatgcctgccagtaacctgtcagtcccggctttacgctcagaagctttgcgatgtcactaccgtatatctcggtttccttctccacgattggacgcggtcccactattgaaagctcacccttaagtatgtttattagctgtggcagctcatcaaggctggtctttcgcagaaagcctcctattttggtgattcgcggatcgttgtctatcttgaattcctttacatactgctcaagctgttcaggtgtcaatatcttttccagatcacctgcgttcgtcttcatgctcctgaacttgtatacagatattttctttcccttatatccaattctggtatgtccatagaacacgctaccaccatcactcagctttacacatattcctaaaactataaaaacaggactcagaacaataagcgcaagagccgataaaacaatatcagccagccttttaagcatcttataaattacaaatgacggtctctcttgtttttctaaaacaaccgacctatatcgtaatggttttctctcattaagtataacatcaagcatcttcatctcatcatgcgccaatgcattagatgaaaactttgcctttggaatagacttgcaaaacggacagataattctaaatacaatccttatatcaagtcccaaagtacagtttagtatatactctctgtcaaattcgctttgttcctcctcacttagcctctcaccattatctgcgtatgcctgccaaaaaccaaaaacacctggttttacactaagactctttctatgatagtcggaataatccaaaaattcaggcaatgaaggagccggatttccaactatactcatatctccccacaagacattccatgtcgatggcaaattttccaatttagtctttttgagaatccatccaaccggagtatatcgaggatccactccttttttcccctccataatccatttatcacatcttgacacagcatccatatacattgttctgaatttatgataataaaaacgtcggccattcttacctacccgtacaatcgtaatgataaccggtcccaaatctcctgtgacgagttttcctataaaagcaaagatccataccgggataataagtaaactgccaaacagtccaaaaatcaggtcaaatcctttttttgctaacagataacgaagtctgtatgttttattcttccatgtgacaacagcatatcttccaagaaaatctaatcttctctccccgattttcatctcatattcgttcacattcaaatataccgtttttcccatatcattgacagcagtcacaaaagctttttgatcgaacacatatccattaggtaaatgcacaaataccgagtcaatctccgctgttgcgagaacctccatcagattatccccatttgcaacaatttcaatcttgtctataatctggccggttctatcacaatcaactatcgcaatattcgagattctgaaatcccagtttctcgtagtctttataatctttattacattttccacctgatcagatgtggtaaccagcattattttttcattagctccggacctatgatattccttcgtaacaagtctcttgaatatctgtctgactataactgtcgcaatcggactaattataaaagtaataagcatttgcacacgagagtaatattcccccatctttgcaaaataaatgcatccggaggtcaatactatgatataagcatacatctttccaacagcatatatttcctgaaacagcttacgattgactatattgtcgtttctgaaagccacaaaatatactactacgtataccgcaaactccagcaaaaacagagtaaggtaatgctctgttctgtttatcagacctgttctaaagaaaccgaatttaatcctattggcaatcagatatgaggtaaacataaccatcacatccaaaaacacttctatatatcttacgatacttttcttcgaattcatatattcatatctcctaatgctaaataacgcaacccgaaatgtattttaccatatttgatatataattgccaaattttaaaaaattataacaaaaatttaataaaagctacagtttatgtgtctccgctcaactgtagcctttaaaaacaaaattaataatttttttaaaatttaaatgtatttttgagtgtctcccacttctgatccttatcactcaggttgattgatgtgccatcctcaagtgtgtatccgcttccgtcagcgcttcccggatactctccgacaagctgtggccactcgatgccgattgcaggatcattccatgcaaggccgctctcatctccaaggtgccagaaatctgttaccttgtagcagaactctgctacatctgagagtactaaaaatccgtgtgcaaagccttccgggataaggaactgcttcttgttctcctctgtgagctctactccgaaccacttgccgtatgtctttgaatcgcttcttaagtctacagccacatcaaatactgagccttttactgcacgcacaagttttgcctgtgggtattccttctggaaatgtagtccgcggagcactccctttgtggagcatgactgattatcctgtacgaacactctgtcaatgccggcttcctgcatatcctttgaattgtatgtctccataaagtatccacggttgtctccatgcactgtaggctcgatgatgcaaagtccttcgattccacctacatttttctgtactttaatctgtcccatgatttctatgtcctttcttgtattacgtgaacatcccaacatctaactcaacctcgctacttcgtagcttctgtgcttcttagttcactaaaattctatctcctgcagatatctgtgcagcgcatcctgccatgtagggagtggcttaaatccattctccacgagcttgctcttgtccagtctgctgttaaacggacgtgctgcctttgacacaccatactctgctgtagtaacaggtactactgtgagtctgtcctcagaatactctgtatgaccaagctccactgcctgcttaaagatttcctttgtaaaatcataccagcttatatatccgccctcgtttgtagcgtgatagtaaccgtatttatcagtctctatcatatctacgagcaatcttgaaaggtcgagtgtatatgtcggtgtaccaatctggtcacttactactgtgagcctgtcatgtgtcttgccgacatttagcattgtcttgatgaagttcttgccgtttacaccaaatacccatgctatacgcactataaagtacttctcaagtgtatttgccactgcaagctctccgtcaagctttgtctgtccatatacattgagtggtgcatagtccttgcagtcaggctgccatggtgtggtgccctgtccgtcaaatacataatctgtgctgatatataccatcttggcatctatcttcttgcaggcatctgcaatattctgtgtgccgtctgcgttgattgcatgcacctttgcttttttatcatcatcctcggccagatctacagctgtccatgctgcacagtgtattacaacatcgggtttaagcgcccctatcacctgctctaccgctgttctgtcagtaatatccagagatacatatggcatgcgtgtcactgctgtaccatcagagataccattatattctgatgcaatatctgttcctattccttcgtaaccgcgcgccgcaagatcattcattatatcatgaccaagctgccccgcaactcctgtaacaaatactttcatttttgtctccttaacgctgttattcgtaaacaggctcaacatatatacgcaatcacatattctttaggcatgcacaaaagcctcaaagagtagcagttatctattcgcatacatcttctcgtagtaattctggtactctccgctgatgattgtctcccaccactcacggttgtcaaggtaccatttgattgtcttcttgatgccgtcctcaaacttggtctctggaagccatccgagctcattgtggatctttgttgggtcgattgcgtaacgcatatcatggcccttacggtctcctacgaatgtgataaggctctccggcttattgagctccttacagataatctttacgatttcaaggtttgtcttctcattgtgtccacctacgttgtaaacctctcctacacgtccgttgtggatgataaggtcgattgccttgcagtgatcctctacatagagccagtcacgcacgttctcgcctgttccgtataccgggagtggcttatcattaagtgcatttgcaatcataagtgggataagcttctccgggaaatggtatggtccgtagttgtttgagcaacggctgattgttacaggaagtccatatgtgcggtggtaggcaagcacgagtaaatctgctgctgcctttgatgatgaatacgggcttgatgtatggattggtgtatcctcatggaagaaaaggtcagggcggtcaagtggcagatctccgtatacctcatctgttgatacctggtgatatcttttaataccatacttgcggcatgcgtccataagtactgatgttccgatgatatttgtatcaaggaatacctgtgggttttcgattgaacggtcaacgtgtgactctgctgcgaagtttacaaccatatcaggatgctcttcctcaaataatttgtatacggcgtcacggtctgtgatgctctcctttacgaaacggaagtttggattgtccattacaggctcaagtgttgagagatttcctgcatatgtgagacagtctaagcatacgatacggtaatccggatatttgttaagcatgtgaaatacgaagttacttccgataaatcctgctccacctgttacgataattgtcattttgatttcctcctgattcccgctttttgcaagcgagatttaaattatttctattaacttaatctactagctaactaacgcaatgtcgattttactataattagtacagttgctcgcggtattttccatcaagtacatcctttaagtactgtccatactggttcttctttacgagctcatatgtctttaatacttcatcctttgtaatccagccgtttaagtaagcgatttcctcaagacatgctatcttgcggtgctgatgtgtctcgactgtcttgacaaagtttgtggcatctacaagactctcatgtgttcctgtgtcaagccatgtgaagccctgtcctaaaagctctacattgagtgcctttttctcgagatagattctgttaaggtctgttatctcaagctctcctctggctgatggcttaaggttctttgcgtactctactacgttgttgtcgtagaaataaagacctgtgacacagtaattactctttggatgctccggcttttcctcgattgaaatagcctttccctctttatcgaactctacgataccgaatctctcagggtcatctacatagtatccgaatactgtggcgcccttaccactctctgcgttttcaactgcggccttgagtctcttgttgagaccgtgtcctgcgaagatgttgtctccgagaaccatggctactgtatcatcaccgataaatttctcaccgataacgaatgcctgtgccagtccgtcagggctaggctgtacctcataggtgaggttgacaccaaactgatgtccgtctcctaagagctccttgaatcttggtgtatcctgtggtgttgaaatgatcaggatatctctgatgcctgcattcataagcactgacattggatagtagatcattggcttgtcataaattggaagtaactgctttgatgtaaccattgtgagtgggtaaagacgtgtgcctgaacctcccgctaatataatacctttcatgttgttctcctttaaactgaaactacgtgctgcacttgatgctttcggtctgtagaatacactgacctgattcatcatttatctgcattataaaaggtgccccaagggcaccttcaagtacttttttatgtttttagcatttttcacaaaatatatgcttataatatcctgtttttgaatcattttcgtgcaataaatacacctgcatcctttgtgatatggaaccctccctctgtcttctttctgacaaatgctgcaaattccttatagcggtccacaatatacctgttctggttgccgtggcacgaaagcacatactctatcacaggctctgctttttctaccacaagctcatcctcgtatccatgccagcttacctcaccaaagtattttccaagtattgcctcaccattttctttaccgaattgctcatacagcctttccgctgacagctctatacggtcatcaaactcctgcaccaggtcgtttatttccttcatatgccgtgagctgtatgtactgcacacaaacgcgccaccgggctttagcacccttaggatttcactgcacacggcatccagattgtcacaatagaacagtacatggtctgctatcacgcagtcatacgatgcatccggcttatacagcctgtgggcatccatcacctcatatgtgaagcgcttgtcatctgcgcctacatttctcgtcgcatcccttaccatgccatacgatatatcagtcagggttatctgcatatctgccggtatcctgtctatgttctgtgtccagagagaggcatcaccacagcccacctcaagcaccttttccccctcaaaaaagctgcactcatcaaatacccagctaaaccagctcaccggattcatcgagaaatccctgtgcagattaattctggctgatatatttgaagcatccctgtactgctgctttagcttttgctccatctcgtttatattaaccagctccagcatatgactccagtccacgcttcgcccctcgtctattacctctgaagcctcctgcagtgctgatttcataagcttcatctgctctatcctctcctccacgagaccaagctgcatgtgaagcgactcagacatgacattgctgtccgtgtttctgagtgtcatctccttgatatcatccagggaaaagcccagatatttgaggaacagtatctgctgtagacgtgcaaagtcatcatcattatagaatctggctccgttttcgtttacgtaggatggttttaaaatattgtgctcgtcatagtacctgacggtcttttttgtaatatgcgctttttttgcaaattctcctgaggagtagtagccgggtagtttcatattctctaattgcctccttgatagcccatatactctatgatataatcattgggtagtcgaaaaaagctcgggtgttaattctgataaatccctctagttttacagaagggggatgatgttactatgaatacaattgaagtacttacattgttactagtagtttttgcagcattgtcgtatatagacaaccacaaaaagaaatagcaccccaaccgcctaaagtgagggtgctaatctttatactaatcaatcactgagggcaaatcggaataacatccgattacctttgagtagattatacaatagagtggttgataaatcaatcactcttttaaaaatctatctaaattaatttggagaatacaatgaaatacgattatttaatagtaggttccggtctctacggagccatcttcgcccacgaggcaaaggccaagggcaaatcagcgcttgtagtggacaaacgtcctaacatagcaggaaatgtttacaccgaaaagcaggagggcatcaatgtacacatgtacggagcccacatattccacaccaatgataagagggtctggaactacatcacacagtttgctgagttcaaccgcttcacaaacagccctgtggcaaactacaagggtgagctttactctatgccatttaacatgtacaccttcaacaagatgtggggtgtggtgacaccggaggaggcggctgcaaagattgaggagcagaaaaaggaaatcaccggtgagccaaaaaatctcgaggagcaggctatatcacttgttggccgtgatatctatgagaagctcgtgaagggctatactgagaagcagtggggtcgtgactgtaaggaacttccggctttcatcataaagcgtcttcctgttagacttacctttgacaacaattacttcaacgctctttatcagggtattccaatcggtggctacaccaagatggttgaaaatctgctcgacggcattgaggtcagattgaataccgactaccttgagcacaaggctgagcttgatgctcttgctgacaaggtggtatacacaggtccgattgacgcatactttggctttaagctaggtactttggaataccgctcagtgcgctttgagaatgagaccctcgatattcctaacttccagggcaatgccgctgtcaactatactgaccgtgagactccatggacacgtatcatcgagcacaagtggttcgagttcggcaaggatgaggatggcaatgatctgccaaagactattatcagccgtgagtactcttctgagtggaaggcaggcgatgagccttactaccctgtaaacgatgagaaaaacggacagctctatgccaagtataaggagcttgccgataatgagaccggtgttatattcggcggtcgtctcggcgagtacaagtactatgatatggatactaccattgcttctgtacttgatatgtgtgagaaggagcttggctaataatttagcttcccacaaaaggctttgtttatgtcatattcaaaagcgccatggcaatttaccatggcgcttttatttacaatttttttccggccagatttatctcagccgcaggaatatgctccctaagacactcatatccatactccttcgaatacgcatatatagccggaagctgtcttgacagaaagagcgccggtgcttctgtcaccgagtatgcgccacagtgcccgaactcaagaacatcaccaagctcaagtttcttgagcttcacctcgcgtaccagcacatctgccactgtacagaggcttccgcatagtgtatagtctgtgtccggcaattgtgttaattcttcctcggttctttcttcattttctgatacttcacaatcattgaatgtgtttcctatcggacctgctgttccttttatttctcccaatttttcaccaaaatatatttcgtcagctctatatatactaatcggtggcacctgcatagccatcctctgcccgaagtaattcaggtggtggattcctccatccagaattgcataattggcatcgcctgtcgatttaaggtcctttacctgtgtgtaatatttaccgcatgaggctgctaggaagcgtcccatctcaatgccaagcggatattcctcggcaaattctctaagcacctctgctgcctcatcaagtgattgtttttccttttcctgccagtcttcctcaaaatactccacacaaagcccagggccatactctacaagctgtggctcaaagctgtatttgtcctttaacatgacaagtgcagactttattttttccaagtccttatttattttgcgcaggctcttctgtgtgccggaatagtagtggatgcctattaccgtgatgcccttaaactcatccggatgcgaaatgatgtattcaatatcatcaagcgacatgccaaactggttgccacttgtcaggcgcagtatgacatgtgctttcgtttcggcaaactcggcttcatacgcaccttcctgtatacattcaagcatcacttccgatatcagtgtcgcatgtcttatgctctcacatgtcagtatcccggcgccgtatgaaacagctcgctctatatcgcatttttccttcatcacgcctgagtagatgatgctctccggcttcacgccaagtgctatacatatctcaagctctcccgggctgcacacctccacatggtctaagccctccggcagcctgtgaagcagaaacggatttgcctttattgaaaaacaaagtggtatcctacgtcctcctttacaatcaagagcagcccttatcatggctgctctttttgcaaactcgtccgtatcaaatacatagtacggtgtctgtctcatatgctttattcctccacaagctctttcacaagcttctcgattgcatcaactgagttgaaattctcaggaaccagatcctttggtctgattgtgatgtcaaactcatcagtcagctccgatacgagtgaaactatatcaaatgactcaagaattttgtcatcgatgagctttgtctccttctcaaaatccacatccggtcttaattcctctaaaatctctaaaattgtgtctctcattttacatttcctccagttttttcatatcatattttccgtttggaagcttaggaagctgctccagtttcttgattttccttggcaccataaagcccgggagttcgtccctcagcgccagcgcaaggcttctcctgtcacagtcacctgtgtagaaaagtatcagcacctcttttgctttattatatataacgcagctttctgcgactccatcgaccacattggcggcatgctccacctcatcaagctccacacggtgtcccatgtgctttatctggcggtccatacgtccacagaaatgaagtatgccggcttcatcgagccttccgtaatccccggtgcggtacatccgctcaggataagccctgttgagtggattgagtgtaaatgccgcagctgtcctctccgaatcattataatagcccaacgccaggattggtccacatacgcatatctcgccctgttctccgacagccggctcatttccatgctcatctatcaggaaaactctgtaattgtcataggcttttcctataggaagcacctcgtcctcttccaccagatgatccacactataatacgtgcacgaagcagttgcctctgtcggcccatactggttcacaaaatgcgcttccggcagattttcctgccattttctgagcaccctgcatggcattactgagcctgagaagcagatttttctgagactcttaagccctacttcctcaaatgccccaagcgatgtgaggatggtaaatgccgaaacactccagccaacactgctgaccttcttatcattcatgtaatcaaacagggcatttggctccataaaatactcttttggaataatcgctgtgctgcagccggtctttagcggcagataaatgtccctgattgccgcaatatagtcaagcggcgactgattgcccagcacatcactttcctctatatgcatcacatcacagtaagcattgatgtatgtcataagtgacagatgtgatgtcatgactccctttggattgccggtggagcctgacgtgtagataatatacaatgggtctgtcatggacatctgcctgcggactgttgcgagcatatcgttctcactatccgtcacagagtctcctgctgattcactgattttacaattactatcagcgcacgccacctgctcgaagctcgatatatcctcagcaataaatatctgcggtctatcgaagccttctgcctttgccagctcatccactatgctctccacatgctcacgactttccctgtccgcaacaatagcccttggacacagattttcaagtattttttcaattctcttgtcaggaagcgatgcatcaatcggcgcatacggtctgcctgcatataccactcccaggaagtatgcaggtgttaccattttccttccggcaaatactgcaacaggggttctgtccactccaagctgttctatcagatatgctcctgtatttcttgctatatcatacacctgcgcaaacgtaatgctgcattcagtatccgaaaatgcaggcttgtcagggtatttttctactgtggcctcaagccactccagtacatttttcatcttagtcctctttcatgcattaataaacgttgccgaaaaaattatagcatataacatccgaaaaaaatgtcatgtgctatcgaattaagaattcttaagaaagccttaatttttttctgtagatttttctatatttgattctcctattaaatatatcggtctgtcctttgcctcgagatatagcttcgacagataaagtcccaaaatgcctatgctaagcagttgtatcccacctataaaaagtatgataacaacggtcgaagcccagccggctaccggatctccgaatacaagtctcctgataatgataaagagcattgcaattattgcgacaataaagctgaacactccggctattgaagccatgtatagcggcgcgttggaaaatgccactattccgtcaaggctatacaaaaagagctgccagaatgaccactttgtctcacctgccactctgtttacattctcaaactcaagccacttcaccttaaagcctacccagccaaacaatccctttgaaaacctgttgtattccttaagcgaaagcagtgcatccacgtatttcctgttcatcagcctgtagtcacgtgccccatcaaccatatttgcctttgatattctgctcatgagcctatagaactttctggcaaaaaaagatctaatcgctggttcacctttgcgtgtcactcgccttgtaccgacagcatcataaccttcttccataagagccttgtacatctcaggcagcatatccggcggatcttgaaggtcagcatccattatcgccacatattcccccacagcatgctgcaagcctgcatacatggctgcctccttgccaaaattgcgtgaaaaggatatgtatttcacaccggaatcatttacagcaagctcctttgcgacatcgagtgtcccgtccatagaaccgtcatccactataatcagttcataggacaatcccgctgtctcactctcttgactcatctgattaaacacctgagttatcttattataaaaaagaggcagagcccctttctcgttaaagcatggtaccacaatgcttatcttatttttttccataccagccaccctgcatataatatcaaataaataaaaaatccgattgctgctcctgccgtatttgtcacaaaatcatcaagctgacaatatcccctgccggtaaccagctgcgtgtactcaattgctgcgcttataagagcaccaacaggtattgtaaaccatctcatccaatttttaaaaaccagtggaaataaaagcccaaatggtataaacaatactatattttctataaaataagcgtgcatctgaagtgtcatgccccaattgctccacagcaccatatcggcaacgccggttctgcttcccggctcccttgaataatacactatcattataagcgtatacatataggccacaaaggtgccgcagaacagcatatgccagattttgcccactatcttttttcttctctcatctgcctgtgatacctctctcattgtgaaaagatatctcagaagacacacaaaaatatacatcgcaatgcagattaaagccaaatataccgctgacggaagatatttgaacttttcctgtatgtctcttattatataatcctttaaactcaatgtccttttttatgctccttgtaggcgcgaatgaactccagctgtcgttcatcgtcctttttctgttcgtcatcagacatatgactcactttaataattatacacaatattatgccaattacaataataccggcacataatataaaaataattaagatttcaggcatagactatttcctccggcagaatttaattcctattctctctacagattaaattatatccacttaatttatcttaattcactcatttatgaaccctgatagcagcaaaagctgcatgatattctcacacagcttttgtatcttacgtgtattatctttggcattaacctttattttaattttgcaacaaccatatccacatatttctgacagatttcctcgctctcagcctcaaccatgacacggataacaggctctgtacccgactcacgcacaagtatacgtcctgtatcgccaagctctgcagtaacctgttcgatggctgcctgaacatcagggtttgcaagtgcctccgccttgtcagctacgcgcacattttgaagcacctgtggatagatattaagcccctcacagagctggctcatcttctgttttttcgccatcatgacctccatcatcttaaggctggtaaggataccatcacctgttgatgcatacttagagaagatgatatgtcctgactgctctccgccgatgcggcagccgttctgctgcatgtactcatatacatatttatcacctactgcagtctttgcgtagccgattccaagctcatcaagggccttatagagtccaaagttggacataactgttgtgacaacagtattgttatcgagctttcctctctctttcatgtactttccatagatgtagaggatatggtctcctgtgattacattgcccagttcatctacacagagacacctgtctgcatctccatcgtatgcgaagcctacatcaagaccattgtccaccacgtacttctgtaagccctcaatatgtgtagatcctgcattattgttgatgtttaaaccgtttggctcattgttgatgacatagcactttgctccgagtgcctcaaaaatagactttgccatgttccatgaacttccgttggcacaatcaagacctaccttcacgcccttgaacgagtagacaccaagcgatatgaggtatcccatgtaacggttacggcctgctacatagtcaactgtgcatccgatagcatccttatgtgcatagggcaattccttccactcctgaccaaacaggcggagcttgccatctatatagtcctcgacaaggagaattgtctcctcatccatcttctctccattgctgttgataagcttgattccattgtcatagtatggattatggcttgccgaaatcatgataccacagtcaaaatcatcggttcttgctacatatgccactgatggagttgtggtaacgtgtaatagatatgcatctgctcccgatgctgtaagtcctgatacaagggaatactcaaacatgtagcttgaacgtcttgtatcctttcctattactatcttcgccggctcgtcgagctgcttctgcttcttaagctctccataataccagcctaaaaatctaccaatctgatatgcatgctctgctgttaaattgacattagcctctccacggaagccgtctgttccaaagtattttcccattattgtccccttgtgaataaatttttcttatattatacacttaacaaatatgtttgtgtagtaaaacagtattatttgttaaattattcgacttcataaaatcaattgtttattaatgtgataaaattgacatattatgtaaatcaaagctacatagatatcttatgacactccatatagtatctcttctcattcgcttctccaattgagaatgtctttctgggcagcaccccgcccgcatttattgcagggaacaatgtgctcttgtctatcgactgaagaaaaattccacatcccttagtctccttaaccagtccgtgaagtgcctcatcaccatggatatagtctatttccacattgccatgtgtctcaagatacttatctaaaataccctggagtatctcaaccgggaggcggtcacctctatttgtgatattaattccggaattctttattgcggtagcgcctgattcaacatactcaaatactatctcatcaccctcagtgctcgcaagtccttgttttgtgatttcagcttcgaaaaacgacagtatgtcctttacatcaacatttgtaagcagtctgtgaataggcttaaactcaagcgcctcactgtgcagattacagatttccacaagagcatgccttgcaggatggtttttcaactgctcctctgtgaattttccggtttttttgatattttcccagcaggtcttcgctgttgcaagggaatggtttccatcacctactgcaaacaaaaagcctccacagctattctgttttgctgcgaatgcctctgtcacctgctttgctgcctcaccctcgacagcatagccgcggatatgtccgcctccctgcatgagctctgtatcgtaaagcttacgaagagtgtccctgatggcatacacatactcgattattccatgctttacagctgctatatttactgcatcttcctgtgtagcaccctggcatccatcaatcttttgtctgtctataggatcatcaacaagcagcataacatgtggcagctcaatagctgcattctctcttatttttactctcggaggtatacgtgagattactgttccctctgttgctctgatgagagtcttctttttcgggtcgaaatcatagtcatccagatcaataagtcctactattccaagacgaacccctgactccgtagtacgctcaactagcacatagccatctgccaccgcttgctttaaggttccatctgtgagatatgtctccatagtggtattaatatatttgattctctcatcatccgtcattgaagcatattttgtttttctgccggtttctttgtcatttttgacaccatcccctgacgaattgcaatcattctcctgtttcgtaattgttcccagatatatttcgggaaataccacattaagcgttgatggtgcatcagccacatgcttttccacagcatcccaataatcagcctgacttgtgaactggtcacaggcaataactgaccatttttccatatctatacaatcgtttggcaaaagaatatttgccggattgaaacaatttgacatatcaacaattctcctttaaatatacaaaatatataacagaaatccgctatactctatagtataacggatttacttttatttgcatatattaaattccttttgttgttagaattcttcccactgcatcatctaatttttctgccggtatctcgccactgttaactgcagacaacactgcattataactgctctcaaagcctgttgaaacataaagcatgctcattcctgccttaacagctgccacagccgcctcatcctgtgtacataccttattaagagatgcatctgataaatcatctgtaatcaaaaggccattaaagcccatggtagttctcatatagtttacggcacctgctgatgtagagcatggcgtggtttcctctcctgtcacactctggcaaatcacatttcccatcatgactgccggaacacctgcttcaattgccttttgatatggcacaaaatcagatgcctcaagatcctcaagcttgtctgtcatccagagcattcctgtcgctgaatctgtagtagcctttccttttcccggaaagctctttgctacagaattgattcctgcaccattatagctgcttacctgtgctgcaacacagtcacctacagtcgctgactcgctgccaaatgcatatgtatcgttatctgcattatcaccatatgctatatccgctgtcggtccaaaattcatattaaggccattggtagccatatatgagcctatctttcctgcactgctgcccgctgcgtcagcatctccaagctgtgatggtgcctgctgtacctcatatccattagctgaagcaagaggaagtctttctccaccttcttcatcaattgcaagaaacaaattcacgcctagtcgctcctgcgaaaatgactgcagactgctcatcatctttataactgcagcctctcctgagaaattctcctgtctgaaaacaaaaccaccaagaggatatgtaccaatagctgcctttgtcttgttaccggcctgagtgaactgtgatacacctgtaatctcctcaggtctcgtaatgaatagctgggctaccttttcctctgttgtcatagaagacagctttgtcttgacagaatctgacggagtaaatgccggtgctgcctgctgtccatcagcttgtacctgctgaattccatccgtctcctgagtaggattctgtgtctcctgctggctttctgttattttcttattcgccttattccccggcatcacaaaatgcactgctccaaataccagcacaactatcagtgcaattacttctattatgatgaggtacttatctccattttgtctgaagttcatatttaatccccaaaatttgtatttgttaaatcgttattaggcccgcttacttttcctgataatgcactgctgtattcgtttacagttgcactaggagtatagcctgtatcaccttcaaggaactgatgcactcctatagccatgtctgcaagtgtagtaggcacctcaacccatgcaccatcaacctttccaccatagaacacctgtggatatgctgtagaatcctctactgtatagtctgcaagatttttaaatactgaaagaatctcatcagtattatagttagtattgacatgtccaatcagatctgataccatcttaatctttgccgctgtattcatctgcttagctgattcaaaaaccttgaacagcactgttctctgtctttcagcacgcttatagtctcctccggctgtataacgtattctggaatacgcaactgcctgagttccatcaagtgtatatgtgccggctgaatcaatatgggatgagcttgttccacgaaccttattgacctcatcaatatatccgtttatcacctttgcctcagatgcatcaatatcctgtacaatgcctcctacctcatctacaatctcaccgactgtattgaaattgactgtaacataattctttatgtctaaatccagatttttgttaagtgtatctactgcaagctccggtccgccaaacgcatgtgcatgtgtcaccttctggtatccatgaccatcaatattcatcatacagtctctgaaaatagataccatgcggattttcttagcatcatgatcaaccctgactaccataattgaatcggaacgtgttcctttatcaagctgatctgagcggctgtcaacaccaaataacgcaaactcctcaatacctgatttgtctgtagtgctgtcatcctcagtctgagtatcggcttttgtcttaactgcctctgtacccggctttatgcctttaacttctttattcttaacattactgctgttaacctttacaagtattatcgctataatagcaataagtacaatcattactgccgtaataattatatttttcttttttttcatctgcacttattctccgtcattcatatgtgtctgcgcctgctacttttcgtcatcgtccctgccatagtaattaccatagtaattaccataatagtttccatagtaatgaccatacttagactcctcaaacctgcacttattgagcacagctccaagaatcttgactcctgagtcctcaagtgtacgctttgtattgatgattgcacggctgcttgtaacattctgggcagcaactattactgctccgtctacattctttccaactacggctgcatcaatcgcagcgcctgtaggaggtgtgtcaacaagcacgtaatcaaaatttttctctccaaactcgataagctctttaaactcttttgtttcaagaagctctgtcggattaggcacctcatgacctgcaaagaggataaacactcctttgatgtttgtcgcatatactactttgtccaaagatacctgacctgaaagataatgtgagagtccgtatatctttccaccgctctccactttcgctctgagtcttcctacaaggactgacttacgcatatcggtatctactataaggactgacttcttagagtccgccatcgaacgggccagatccataactacggttgtctttccctcatttggcacgctgctggtaaaaaggatagacttcacaccctttccactaaagctgatgcttgttttaagagctcgaagagactccttcattgtataactctggtcttttatctgattaataactactgtttccattaaactgccctcttcttattcttgctatcgtctgatttagatgattgagttttcttcttttttcttctctttgtcttggctccatcatactctgtctcatcaacaggaagtgatgcaagcaccttgaggcctgttctggtctccatatcatctgcattagaaattgtatcgtcaagcatatatccaagtacaactatgccggcagcaagaatcagtccgagtacagctcctataactgtattcttaaggatattattattcaccggtgtctttgaagcatatgctgtctggataatctttggctgtgactgttccatattgtcagcgatatactgtgatgaaacctttgcaatctcatctgccactgtttttgaagcttctaaatcagtgtctgtaaccacaatcttgagcacacgtgtatctgtcggattctctattgaaaccctcttgctgagctgctcatatgtctcgtccatatccagattgtcaattacctgtgataaaactgtcctgcctgtgataacgtactcatagtcgtttgtcagactcgagcctacctgaatatcagcaagactggtgatagatgttgacttggtcagtacatacatctctgcagatgcctcatactccggtacaaaagtaatcttggagtataatccaaatactgctgcaagaagcaccattgatgccacaagtgccttccaatgcttcactaattcgtgaaacagcgctaataaatcgatttcaatttcctgatctcttattggttcgttgttttccattttcctaccctttacatattgtaacattatttttcggtttaatcctatgttatattactacacttcatttcttttgtctatttttagaagtcacaaaaaaattattaagaatatgtcatattttgtaaataattatgcaatataatagaaaagtgccgtttccggcacttttctttgttgtattttcatttgctatattttgtttgttcctgttctattgttgctgttctagttctgctgtggctgttctgatggttcagtcggtgccaccggctgtggttgtggttttgaatttactgtaacggttattgaactgcttgcgctattccagcctgccatttcacctgctatagctgtaatctgtacgctaccagccctgtaaatggtcacatttccggcgccatctactgacgcaatcgaaggatcacttgactggtaagaaagcactgctccgtttgaagcacttgctccgagagaaaatggtgcatctccctctgttacagttttattaccgcaacctattgtcacagatggtgtctggtttggctgtggctttgcatttacagtgattctaatcgtcttgctgccggccttgtagcttgttgtagcctcagacttcacagtgattgtagcagctccgacacctgctatcgtcacattaccgttctcatccactctcactacaccattattatcacttgagtatgtgagctttgcattatcctctgctgtcacaccgagattgaatgctccgtcgccctctgtcacattataagagtcagctccgccaagactctgtgctttgccggccaccttgtcaacaccaccatatacaattactttttcatctaatgttacattctcatatagcttctttgcagctgaataaggcatatttatgcagccatggctgccgctgtacaggtagatatttccaccgaaagtacttctccacgaagcatcatggaagccaattccaccattgaatggtataaagaaattaacccatgacttatatccgtctccccttaagtatctatccttatctcttgagaaaatagaatacactccggtaggtgttccgtgtccttttgaaatacatcctgtaacacactgacttgatacaacaagctctccattcttgtatacatataccatctggttggtaagatccacttcacagtaattgccaccatatgtgacatattcacctgtttcttcttcctttgcctcactgtaaactgcttccactgttgcagactttttattgtttattgcctcagcaatcgcctcatacagcttgtttccatctacagtctgtcctgatgatgctacaggcacatttattatacttccgcctgttgtcttaaactgtcctgttttcttctttgacacatcatgctttttggctagctctgtacaatatgtagccatattctcgccatcaagcgaaactgacaatccgtcattgcccactataagccactgggctatctgatcctttcctacagcctctgtagcagcttcacctgttgccggtgtgaaattacatgtcaccgtcacatcaagatatgcattggcttcttttaatgcattctttacctgctcgctgtccgtagccttttctccatcaacatatcctgttgcagatgtaagctctaccttatccttcagctcctttacagcgcttgtcagatttgcagctgcattgtcatatacaggtgcatctcccgatacaccgtcaacaccctcaaattgtcctgcatctgcattgtaggctattgtagcgcgatatggcacaattgatcttatatcaaaggtctgtgtgtctgtcgcagccttcttttgttcgtcatcatttgcatctgtatccttatcactctgagccgcagcatcagactgtgactgcgtttttgcagtgatataagagtctacaagagccgtctccagctcatcagacttgtccattttaaaaagcttcacctgcttttccggtttcttatccttattggccgcatttatcagttcctgaagatctgctttgtcattgtacttgagtcccaaatcctcagctgtcatatcaaatgatgcatcgtcaagcttcactgatatcttatacttgcctactgcagtctttatggctttctttgcctcgtcagcagtcattccacctacatcaactgatgcaagcttgtacttttcagggaatgtcttgtatgctttctttccacagcctgccattcccaatgccataagcacacaggccaaaactaccaggagttttatatttttcttcttcatctttgtcctctttatcttaattttatattattctcacagcaccatattttatcactttcttatatatgcctcaagtgagatttgtcacatatttttatctcaatttaccattttattcatcataatgcagataaaggtctggatttatccagacccttaaatcaattgtttcttaaacttgctataaaaccatgctacgattggaaaagctttaaaatcagtttttctaatgagccatatctgcttcctgctgcatgcctggtacactcccgggtgctcctcacgcaacatctcgtcaaacttcttcatctgctcaacgttccttgcatcattgccctttgccagaaatatctggtactcatcatcgactgcctcggctatgccgcgctcaaggtactgcttcttgtaggtctgcagattgccgtgcacgttgttgtactcaaacagtgcatcaagcaccttaaggtgctggtcatgacgcttgatcatcatctttatgtccacgctctggccactccttccaagtctgtactgatacagcggcagaggtgaaaacgtgatgcttgtgcagtatggtatagggtagagtatatactcctggtcctcgtagaagcagtgctcatccacacgaatatcattcttctgcaatacatcagtacggatggtcatggaatgtatagtgatcagcgggtccatgactgcctcagcaaagccccactccctgttgtagtgataagagttggacactgcctttctgcgctttgtgaccttctttgtcctatcatccaccaggttgaagtcattggatatgacatccgagtgcgtgtgcttcaaaagctgtacaaattgtggcagaaggctcttgtccagccagtcatcaccatccaccaccttgaaatactttcctgttgcacgcggtatcgcatagttgatggtagatccatggcctccgttctccttagagagcaccttgaagctgtatggatatttctgctcgtaggtatgtgccaggctggctgtagaatctgtggaaccatcatccactatgagtatctccagacttctgagcacagacaaatctataaacgagtcaagacagttctttatatacttttcaacattgtaagccggaacgactatggttaaaagcttctccatatatgtttctccatgtatacctgtttccttgtgtactactctccgagtccatccttgatgtactgtataagatgttcaagcgcctcactctcatcctcgccattgcagataagctctatctcatcgcctgactttatgcatgctccaagcactgaaagtacactctttgcattagctacatttttctcgtcatatataaatgttacctttgatttaaatttcattgcctctttgcagagattgccggccggacgtaaatgtaatccggtaggattcttgattattattttttgtgctaccacttttattacctcttttcggttatatatctatcaatgtgatgaactgtcagagccgttatttccggtgtttcctgacgatgtgctgcccgatgacgataaaccgcctgtgccggtatcgcctgttgttgagcccgaggctgttcctgtaccatcagttcccgttgtgccgcctccgtcaccttcccttccgataactatctgaacctttatctcgccccatgtgtacttggtctcatccagatttggctttaccgtcactgtatgtgtacctgtaccaaggcctgtcacatcaattttacccttcagtgtagttcccgaaagtgtatctatatcagacttggtgccgcttactatgacactgctcttatctgttacaaatgtaatcgtatatccctcttccagtccgtcatatgtgatattggagctgttcagagtcatggttgaagtcgcatttgtttcaatctttatatctatactgagctttgccttgtatgagttcactataaaaacgccatccggcagatatcctgtcaggtcaacagatgtacttatatcgtctgttgcgcccgatatatcgattgggcccacatctatagatgtgatattgttcaatgcttctgcattacccttgagcattacagactcctctgatagttctactccgagcacgctctttcctcctgccggtgagcctgtcgtagtacacttgataggcacctccttggtacttaggacatcaactgtcactgctatagactgatactggctgtccacatcaagctttgatatatctatctcatcgccattatcatcaatcagagtgagatcaccgcgatcagttatctgattatctgatattatggtattgtcatcgacctttatatttacattggccgatgctatagttgaaacaatggactcaggacctccgatctttactacctttggatttgcctgtggcttgtttcccagtgctttcgcacctgagagacttccatccaatgatacctttacctcaaactgcttctgcatatatttttcaaccgaaagcgggagcatatgatctccaccgttgaaggtaatcgaatgtctgtacttggtgcatccaatatctacctttacgcttgccttattcgtatcatccttatctactatgatatttgcaaggtcgacatttgcgtaaaaatcggaatcatcaagctcgttcagatagcttctcttgcctgataccgaaaagctgatggtcttttccgaatccttgatggtaggccatagccccttgtcaacaaccgaatcacggcctgtgacggtgactgttgtggtaaatgtctttgtcttgaccgggtcattgagattgtagaccacaagccagagtataaatgcaaatgctatcgcaagtattttaaagcctatattatttgtgaaggtttttagaagcttctttcccattcttaaacctccttttaattaattcaaatttacccggctccctatgtctgttctgcagaagcttaagctgtgtgcgtagatgatcggcatctatatcgtgctcaatctgccccttgtatgctgtagaaactgatcctgtctcctctgaaactatgatagtaagcgaatcacttacctcgctgactccgaccgctgcacggtgtctggttcccaaatccttcgagagtgacaggctgtctgatagcggaaggtaacatgtagctgacaccacacggttgccacgcacgataaccgctccgtcatgaagcggtgtgtttttctcaaaaatattgatgaggagctgacttgtaagtatagcatccacatctattcctgttctgatatactctcccagatttatctcatcctccatgactattagcgctcctgtctttactctgcccatcgcaaagcatgcacgcaccagctcatcaattgtcttgtcggagaatttctcaatttcgcctctgccggtattaaaaaaatcacccaaaaaggtctttccaccaatattctccaaggcatttcgaagctcaggctgaaaaataacaacaagtgccacgagacctatattaaagagtttctcagcaagccaaagtattgtatccatctggaacaatgctgcaacaagcacaaacaacagtatgataataaggcccttgaacagattccatgccctcgtggtctttatccacaaaagtatatgatagaagagcactgaaataataagtatctctataatgtctatcacaccgattttgatgcccggcacatttgtgaatgtaaggaactgatccttgaagcgtatcaatacaccactcacattatccatagcgccctcctttctcttatactatgtaactatttgtcatcctcaaatatattttcgtctatttcgagatcttttgcaatagcctctttgctgatattttcctgattatgtctctgaatcttctttccaaggcttcctgtattgccaaagtgctttacaaccttttcctccttggcaatcatcttctttggaactgccttgacgtaataataatattcatcatcctcaaactgtacattttctgtacgtgcatagtcaagattcataaatataaactgtatgacaacacctgcaaaaatagctgctacagtgctgagcacaagccagattatcttctccggcagtccgagcaccagataagcaacaacaagtgcaaccaactgtacgagtcctcctgctatggtagcaacagtccatgaattgttgattttcaatcgtctgacctgatacaccaccagtgtggtgataacaaagattgccataactataaacatctctttgttgtcaagaagctgtcccattgtcacattgagctttgtagtgctctgcccctttttatctaccacctctgcaagcgctgatgcattctgtctgattccatcaaagaaatagtacagcagtgtgccacatattattgcaacaaccgaataagctcttcttaaaagacctgctgcaaccggcataacagatggtatgtgaagctgaaagcatataggtgtgagtatcacaagcatgccatccttcggtgcaaaacggaaatagacaaaatacagtactaaaaaaagtacaaatgtgatagcaaaaacctctatggacagcgcatacatatctaaaagtatcataatcgaagcaatccagagtattgcattcaccggaagcagtgcacacacaagcgctaaaagcagtgccacaagcatcgagcttattttcgccatatagccgatattcaaatctattgttataaatgcgataaatgcaacggcaaatctcacaaccggaagtataaagtgctcatactcaccgcaaaatttgactgccttatccttaatttccagtaacttgttcataaagcctccctaacgcttaatcttttcctcacgggaatatattctgcccactgccttcaggtgatttgcgtatttgcgcacttctcttctgccggccttatatcttgcagtatacaccacaattgtgacaaaaatgtaaaccgccataaacgcaatatacagtatgcctattgtgacacccattgccttaaaatcaagcttattgattctgtccaaaagctctgctgcattgacagcaacccacatcacaacaagccctgcaaatgcgaatgtacctgtaaagaagctttttaagccctctttccatatatagtcccatccgtaatagcttgcggactgcttctgcacacggctgtcatcgcttttgctgtcacatagagcaatattaaacagttcccttactttttcttcgtttatcataaatcatcctcttacctgttacctgatatatctcatacggtttttgtcatcctgctgccacagctgcctatcctggctctttggtgtgtcaagggcactgcgtagtgtgtttgtgagcttagtcttgcactcatcacaaaatctacctgtacgtatcatcctgccacagttctcgcatggtataccatatgatgaatccggtgaaaacgaaagcctttcctcacgtatccacctatttatctgcttcatggatgtatccgtctccttggccactgtctcaaccggcacatttggattatcctcaacaaatctctttactatatcaaatttctcatccatttttttctggcagttcgggcagtactgctcatctgacagtacattaaatattctgccacagcccttgcaattagatattctcatctgataaaaccctcctaacttccctgtcctatgcaaatacacagcacatatacacggccgggacatttctttgctatctcgtgcccaatcgactccgccgtactgcctgtagtatatatatcatctactattagtatttggtcatattgtacaatactatccgccacttgaaaagccccctctagacaatttctgcgttcaacataccccattgtcttgagtggactggtatttttcactctgcgcacaagcccttttgccatccttatgcctgttttttcagacaatgcctttgcaaaacactctgcctgattgtagcctctctggcgcatctttttacggtgcatcggcaccggaataataacatctatcccacatctctgtatccagtccgaatatctttccactgctgtctgtgcaaaataagccgcatactcacgtctgtttgaatacttgaacctgtacatggtctgctttatgctgcccttgtatgcaaaaagcgccttgccctgcctgtagctgtcatcttcccgcatctgcctgtgatgctctagtgcccgtgcacagtcgtcacaatactctcttcgctcagacaaaaccggcttcccgcagcgcatacactgcggctgctcaaccggaaagagcttttcacagcatctgctgtgtatatatctctcaaccggaccaattataccatcacataccggacagcgcggtggaaataccagattgattacgcctctcccaatatcctttattttgttcactaatccccctgactgtaatatccccatttgtaacattattaacaaaaaagcgacaatacattcctgcaatgcagggacatatcatcgccctcacggctgcctgttataaaacgtatattctagaattcttcatctctcttgcctgcaaggaactctacatactttcctgtaccgatagcaacacatgtcataggctgctctgcagtcattgtattgatgccggtcttttcctcgataagctcctcaagacctctgagcagcgaaccgcctcctgtaagcacgattcctctgtctgcgacatcggctgcaagctccggtggagtcttttcaagcactgagtgcactgcctcaactatctgaagagttgcctcacgaagtgcttcctctgtctcctctgagctgactgtaatagtccttggaagtcctgttacaaggtttcttcctcttacctcaattgtctccggctgtgggagagggtagcatgtaccaatcttgattttgatatcctcagctgttctctctccgatgagaaggttatgcttctttctcatgtatctgacaattgcctcatcaaaatcatctccggctatcttgatagatgtgctgactaccgaaccaccgagtgagataactgctatatctgatgtaccgcctccgatatctactatcatatttccgcatggctttgaaatatcaatacctgcaccgattgcagctgcgattggctcctcgataatcttaacatctctggctcctgctgcaaatgtagcatcctcaacggccttcttctcaacctctgtaacaccacttggcacacatacgctcacgagcggctttctgaagcttttcttaccaagcgccttctggatgaagtgcttgatcatcttctctgtaactgtataatctgagataacaccctgacgcagcggtctgactgcaacgatattacccggtgtccttccgagcatgaggcgtgcttcctctccgattgccttaatcttgttggtgtccctgtcaaaggctactactgaaggctcctttaacacaacaccctttccttttatataaacaagtatacttgctgttcctaaatcgattccgatatctgatccgaccattttaatagcccctttcctgccatatctttaaatttacacatacactctcttattatatacaataaatcccatttttcaaactttttttttgaaaaaggtcatatttaataaaattttaaagtttatccttgtctttttccagatatggtttcaaaaaccggcctgtatatgactgttttacctcgcatatctcctcaggtgtgccctgcgctatgacggttccgccgccgtctccgccctcaggtcccatatctattatatagtcagctgtctttatcacgtcgaggttgtgctcgataacaactacagtattgcctccgtctgagagcctgcgcagtatctccacaagcttgtgtacatctgcaaagtgcagtcctgtggtaggctcatcaagtatatatatggtctttccggtgctctttctgctaagctctgtggcaagcttgatacgctgtgcctcaccacccgaaagctctgtggacggctgtcccagcttcacgtaggatagtccgacatcatagagcgactggattttgttctggatctttggcacatttttgaaaaactcaagtgcctcctccactgtcatatcaagaacatcgtatatgctcttgcccttgtactttacatcgagtgtctccctgttatatcgtttgcctccacagacctcacacggcacatatacatcaggcaggaaatgcatctctatcttaaggattccatcgccgccgcaggcctcacaccgaccgccctttacattgaaactgaaacggccctttttatagccctttgccttggcatcgggtgttgatgcaaacaggtctcttatcatgtcaaacacacctgtatatgtggcaggattagagcggggtgtacggcctatcggtgactggtcgatgtctatgaccttatcaagctgttcaagaccatctataccatcgtggtcacctgcgatacacctggctctgtttaaggatttggccagatgcttgtagagtatctcattggtcaatgagctctttcccgagcccgacacgcctgtaacacaggtcatgataccaagaggtatctgcacatcaatatttttcaggttattctccctggctcctcttatcgtgatatatccgcttggcttgcgcctctcctgtggcaccggtatctttattttaccgctcagatatgctcctgtgagtgattttttgcactttataatgtcctttaatgagcctgctgccactatctccccgccgtgtgaaccggctcccggtcctacatccacgatataatccgctgcacgcatggtatcctcatcatgctccacaactatgagagtattgcccagattcttaagattcataagtgcaccaagcagcttgtcgttgtccctctgatgcagtccgatacttggctcatcaagtatatatgccacacctacaagtcctgagccaatctgcgtggcaagcctgattcgctgggcttcccctcctgaaaggcttgccgtgccacgggtaagggtgagataatcaaggccgacctgctgcaaaaagccaaccctcgcacggatttcctttagtatctggtctcctatatagtgctgctgctctgtaagctctatatcagcaaggaacttcacaagctccttcacagacatggaggtcatctcatatatgttcttgtccgcaaccgtaacggcaagtgacgacggcttaagtctctgccccttacagctcgtacacggagtaatgcgcataaactgctcatactctgcctttgccgtatcagaaaaggtctccttgtatcggcgctcaacattgtccacaaggccgttccatacaaggtcatagacaccttcgcctctctgacccttgtatctgaccttgagcaccctgccatctccaccgtaaaaaagcagttttttcatatctgcagataaatcatcaatcggtgtgtcgagaggaagcccatagccctcatgcagcgcacgaagtgtcgcataggtatagctctttgggtctgtacatgactgccagcccatcacttgtatggcgccctctgatattgaaagcgatgagtcaggcaccataagctgcgggtcaaactccatcttgtagccgagtccgtagcaggtcgggcatgctccgaacggattgttgaaggagaagcttctcggctcaacctcatctatgcttatgccacagtcagggcacgcaaaattctgggaaaaggtcatctgttcgccatccacaatatcaactattgcattgccctctgtcagttcaaatacattttcaagtgaatcagtaagcctcttctctatgcccggctttacaaccaaacggtctacaacaatatcaatattgtgctttatatttttctccatcgggatatcctcggagagctcatacatgctgccatctacaatcacacgcacgtatccgctctttttggctctctcgaacagcttctggtgctcacccttgcggcctctgaccaccggtgcaagaagctggatacgggtgcgctcaggcagcgccataacagtatccaccatctggtctatcgtctgctttgtaatggcacgcccgcacttcggacagtgtggtattccaattctagcataaagcaatctgaagtaatcatatatctctgtgaccgttccgacagttgaacgtgggttcttgttggtggatttctggtcaatggaaatggcaggcggaagtccctctatagactccacattcggcttttccatctgtcctaaaaactgacgcgcatacgatgaaagtgactccatgtacctgcgctgcccctcagcatatatggtatcaaatgccagtgatgacttgccggagcctgaaagccctgtaaaaacaacaaactcatctctcgggatgtcaagactgacgcactttagattgtgttcgctggcacctcgtattttgatgtattttctttctttttttgccataatttgtgttcctccaaattgcttccggatgttataagcttttattttacgtctctcaatgtgtttttaagcataataagcttatccctgtactcagcagccgcctcgaaattgagctctgccgccgcttttttcatctttttctctatatctgcaatatgcttctcaagctcttttttgctcattgactccggatctttgtcaagagcattctcatcggccgctaccttctttgagatagctatgagatcacgcacggatttctgtatagtctgtggcgtgatgccgtgagcctcattgtactcttcctgtacctttctacgacgctttgtctcgtcaattgcgacacgcatggagtctgtaatcttgtcagcgtacatgataacatggccctcactgttacgtgcggcacgtcctatcgtctgtataagtgaggtttctgaacgaaggaagccttccttatccgcatcgagtatggcaacaagtgtaatctccgggatatcaagaccctccctgagcagattgatgccgacgagcacgtcaaatacgtcaagacgcaggtcacgtattatctccgctctctcaagtgtatctatatctgaatgcaggtacttt

SEQ ID NO: 465 - DNA, 17653 bp, unidentified
  source 1..17653: mol_type = unassigned DNA
tacctctttcgtcttcttttgattcatcaaaaagagatacgcgtcatactcggaacggtcaaattcaaatacgacctgaactttctgtttttcttccatacattcactattaaaaggttattcaaacaatactttaatgccacacgaactggctacgtcaagctccagtttggctcccttgctcagttcccagtccttcagcatgtagatatagtcacaagccagcaacagggcaatgtcggcccgcatgtgggctctccaatgagcttcatccggcaatccgttcctgaaagggtttacaggatcatagccttgtgccatcagtttctcctcggcacggctgaaggcttccttgcgctcattcatatcatagtgcgcgatggctccgctgatgtacactttcccggcaccggtcgcttcaccacgttgaaaagccttgtgtcgttcccaccgttccggaaccaccacactgtagttgcacgattggcagcagcagccttcttctttcaccgggaacggattgtatccgtagccctcatactctttgccgcagatgcagcacactttcttttcttctttcttttccatcacttcaaatctttaatgtttatttggcaggacggatgccatacctgaatattccgagcaaacatcacatccctggtttctatcactacgtgtccctttgtcttggccctgcgcagacggaggtcgctttgtatgttacgttctacccaatcgtccaccacggcctccgcttcctgttctttcaggagtatctggtacagcttattctcccattccatcattcaaataatcctccatattatcgtccttcaatgttttggcagcaccttcttcccatatcacgtagggctcaccgggccgctccataaagcggcttttgcaccaggctttgaaacagcttaccatgattttcacatcggcatcatattccaccttgcgggcgcttctacctgccggatgaagcccctcggcatggctgatgaagataaacagtttcttgggatgacgttccttgaactccttgtaggttttgtagttcaagccgctgtattggaagctgtcgataatcacgattccgggactgcctctgcgccgtaaccgttcctccaattgctccatcggttcccggtcaaggataatcagcttctttttcacttcacccatcttgtgccgtttcaggctcatctggaacgacaaaccggtactttcttccaaactgtcataaattacgcgtccgaagctacacaggtacttggccagctgcatcacaaagctgctcttaccgtttccgctggctccccaaataatccacacgccgctcttggccgggttgcctatcgaggtttgccagtccccggaaaactcgaaccggggaatcttcatgttcagcacctcaccgggactgtaggctctcttcagtttcacggttacctcctttcaattcttcaataagagcatcagcatagtccacagcaagtctggcaacttgttttatagacattatacctgatgaattgcttcttactaccggaagcatgcttttggcaatttcatatctgcgctgttcccagtctatctcattcgcttttctcatctcgcgatggataccgataacagcatccatcgcttgcatttctatcttgcttatcatgcctgcatcctccttaatttttcgatttcggtatatacgcgccgcaagccgcctccggtgctatgaacaatcttggcaatgtcggcaccgtccggggcattgatttttgcgacgatggcagcctgtgccttcagaaacttttcgcgttcctgcgcatcgtccggggtcaccttgctgtaggagtcaccgtagcggctcaacatttcggtatagcccaccttcttgccttcgatggcgcggttgatcttctcctttaatccgtcggcacccatcatataccaggcacagcagcgttccgtagcgttccaaagcgcctttaactccaggaaggcttcatactgcaggtccccggcttcatccaggataaccaggggcgtatcaatcgtgcgcaggtaggccaccagatcctcatacacgtcgctatagcgtccgttgctggtcacaccgaattccttggcaatgtagcgtatcagcttcagtttggtcttcacctggctgcagtccacatatacggcgtgcttgtgctgcttcacgtaagctttcgctgtaaaggtcttgccgatattgggcatatcgcacaggatggcactcagcccgcttccctggcacacttccagctgcttgctcacaaacacgtaggtcggggtctgtgctgccagccaaggtatttctgtacgcagttgcacgcctaatcttcgggctatacctacccagttggcatcactgacctgcttttcataattgccccgcttgatggcattgtaaacgctgggggctatgcccagtgccgtggcatggcggttgtcactgggataattttcacggtcggcggctatcgctgccacaatacgttgctttacttcatttgttatttccatttgaatgctgttttaaattcgttctaacgtcgttaattatatcttggctactgcatcatgctcgaaggcactgatgtccatataggctgagtaatcttcttcctcggcttgtgcaggaaggggaacggcttccgcctgtacctctgttatcagctttgcttcctctttggcaaggatgcccacacgcttgatcttgccgtccttcatcatcttgtcgaattgagctacatacttggactgttcggtataggctgccttgtcgtactcggtctgctcggctgtattctcattgtaacgggctacgggcttgcaggtggcgatatatcgtccgttctggtagatatatacctcgttgatggttccgtcggcatcgggcagataataggcatctaccttgtagttcctcggctccagcttttcgatgatttccgggctgggcagtccgtattggttgtacatcaccgtgcagtaggtgttctgccggatggttgtttcggtgtgctgtccgatgaaccggtaaagaacggccttgtcccaaggtgcaaggttcgggttctgatgggcgcaaagcacatcccaacggctcatgcccggatagcgcttttggttggggtgaggctgtgcgttgaaggtctcaatggcgcgtatatcatcggctaccaattcttcataactataggtcttcaccttgtaggtgttgttcttttcgtcatacaccttttcttccttcgggcggttggcctccagcttggcataccatcggccgatacctacctgcgtgcgtttctccacaccgtatttcttttcgcggttcttgtgctcggcacgtttttcacgcgagttcccggggttacaccagcggatcagggggaagacggtaccggcttgcatcaatccgtcggcaaagtcgcttaccaggtggtgttccacttctaactcggcggggatatacatgccgttccggtccagggtctggaacatgtttcgcatgcagtctaaaaataactcggtagtcttgtaccggttgtaggcatatcccaccacagcaccgctcaccacatcgtaggcataataggctttcactcggttgccatccttcattgggcgcggcaggtcgcggtcgtcaagagaaaccttactcaaggaatattcaccgatgctgcgcagatgataaggacggtaggcattgttgaaatcccattggctcatgtgcagcttaccgcgaagggccttgttcttggggttgttcaggtagttggctactgtggccgggctcaataccagcggatttccatccttgtcggtaaagtctgccggattcaacacctcgccggtttcggggtcatatagctccagttctccttgcacaaatagattgtactgttcccacacggtggtattgaagggctgctccggttgggcatcgatgctcagcagcaggcgttcaatgtcataggtcactttccggcggttctggttcatgaacttgcggctgataaggctttcatagccgttggccttgaagtcattcacacgcttcttgaagcggttggaactgacaggcaaggtatgtccgaactctgcttggtagtaactgatggctcctgccagttcgccccagttcaccggcccggccttcatggcctttcgcataaacgtggcatcctccatggcacgcatcactgcctcaattaccgaagcgtttaccgtatattcttggatgtgttccggtggcagtgtatctccgttgtcaaaacggaaccgggtgtaaaattcccgggctttcgcatcgatgtggtaatggctgccgagccagtttcttattacgtcttctttcatatctccgtattttagttttatcctttcctgaaaccgtaggggcatggtggctatttctaccaaaacgtaacctcccagacctcttccggatcgaactacattgattttctcctttgccgctaacttcttgtaattgggtatcgacatgatgggagcaagttcttcttcggaaagagtggaaggatgaactcctttcagcgtgcggcttctgctgtagtctgcctttccgttcaccatcaccggtcggtcatcgtaagtcaggtcattgtaggatatgcacaatatctttccataatactccatttcatttctatttataaggcagatgccatctgttgggtctcgtgctgcagctgcatgaaatccgatacaaattcacattggtaggtttcagtccgttttccgtccacgtacacatccacatcattggtctttctgtggaccacgagttttacacggggaccgaaagtgcaggtcatggtcttctcgcactcctcgaaggtggtttcgcagttcgggatgaagttcccgtcagtcagtttgccgcctcgcttcagggcaagagtgcgtatccggcgcgcctgatcgctgtcacggacaaaattcagtgcttgccacacagcctgacggctgcatccgaatgtcttcatcaagaaggtcttggtctcgttatctgtcaaaatctgctttctcatatcgtcatactttttaatcgttatcgttcgttcaaaggttttcaacggcttccgctatttcctaatcacccgtcagtatttcatgaaggcgtgtccctttctgcagttcttcgaccagcacctgcatcgcttcctcacacacacagctcacattctctatcacccggtaggcatccgagttgcttatctcatcctccgtcatgaattgtccagccagctccatcgcctggtcggcaatattctgcgtatgtgccgtactgcctatcatcgtgcgcaacttctgtttgaacagactctctgctgttctcggattgaaattctttgccataactctaaattttaaaagtttatatcgtggggcgcggggaatcgaaccccgacggctttctacgctttcttatttcgatttaccaactctccggccgtgcctgccgcccctgcccgtctttccgggctgccagttatccggcaatctatttgccttgttcttctatcatcgaaaggacaaccatcctgtcttcatcccaaagcggaagccccaattcaatggtccgtttcaccacttccatctcaccgaccagccctaccgcttctttgcggaaatcggtatcgtcatacgcatgtgccttgccaatcagaaaatcggtcaggttgtcgataacttccttttgacgttcacatttcatttcatagttcagcactcgcacatgaacatcgcggataatccggctgtccccatgtttcttgaaatctttgcagaactcatccttgttcatcgaagtgttcagataaaccgcatggatgtaatcaaaatcctctgctgtaggggttatccccgtccgttccataaattcttgctgtgtcataaactcacttattttattgtattattctgcatcttcaattttgaaagaaaagcacttatccgccaatactctttttacaaagtctaagtcgtatctatcagctgaaaagaaaactgcctgataatctacactgggataagccttgattgctgttgtatctaccatcttcttgaccagtccgtaaagagcttcggcggtctcggctgttgcttgagctataattacttttgctttcattttctttaatccttaaaattcgctaatcacacgccttttttgtatatttggcgcgctgtttacatcttaaacacgctgcaaatatatagaattatttcaatacatcaaactaaatatggaagaaaatcaatataaggatatgaattttatagaaagacttcaatatttcatggagaaaaagggcataaatgacaatcaaatgactgttaatgccggtctttctgttggacttattgggaaagcaaaggtgtctggcaaaggcatgagctcaatgaatattgaaaaaattctattagcctatccggaattatctgccgattggttacttactggtgcaggaagcatgttgaaagatgatttgaacggcattaaaacaatagacgaagcaaattcttcgactctgcctaccacatctatgaacccatccatcggtacaccatactacgatgtggactttatcgggggctttgatgaagtgtttaattcacaggtaaacatacctgccaccaacattgtaataaggggattcgaaaaagccagcctttggtgcaatgtcaccgggcactccatggaacccaaaataaaccatggcgacatcattgccctgcaccaatgcacactcaacgacatccaatatggcgaaatctatgcagtggtgttggataccatccgcaccattaaaatcctccgcaggtcgccggatccggacaagctgcgcttcatccccatcaacaccaatgactacgatgaacaggaattcgacaaatcacgcatcatcaatgtctttgaagtaatcggaagtatcagcaagttcttctaagtggtacacgcatgcctcctacagaaggctaaaaaaggacgcacgcacacacttttgaaggaatttacctgaagcaaactcgtaaatacactgtaaatcaaaggatttattttattataataaggtatatcacacaaacaagtgtcgtttttcctctctgaaaacagagaaaaacggcacttgctttcatttataacatagtttcctatttcgggcgtaccctctgagaactgaaaaagtaacccctaaagtaacccctaacttaaagaagtagtaacccctaacagtaaccccaatagtaacccctaaccaaataaaaccaaccgtaggggcataaaaaaagggagccataagctccccaatcagcattcaaagaaataacgcctacaagcctttctaacggcgctattatatcgttctaaccattcccttactaccacccgagatgagcgtagattgcttaattatagcctttttcgtgcatattgtgccgttaccagacagcccggcatgaagcaggtaattcttggttgcccccacctgatctgccgtcagaaccgtataaacagccgatatactgctgaaataccaatctttctgcttcgtcccgtctattttatgcagcaaatgcacatgaatcacttttgccatattcgtttctattatgctgcaaatataccaaataatacttatttggaagaattttaaggcaacatctttaaaaataggcacaaaaaaacggccacacagccgttcacaccatcatataacaaaatccatcaacccagccataaaacggccacacagccgaaaataaaacccttccaggccgttttagccccatctgcaagcccgatgtaaagcaatcccccgaatatccgaagaaaagcccctcaaacgtaaagcagatgtaagccatgtaaagagaaaaaccgcttcgaaatattcagcccattttcccgatcatgcctaaaccctttggttttcaaaacctttcgcccatttttcccgaccattgaaaaaaccgcttcgttctatgccccatatatgtgatgaaaatacaatcactaaacgtactgctcaaatgcgtgagtttaacactatgcctttagttcgacgttttcaaagagtctttgcagaaagcgatgtgaaaatcggttcgctctcagcactgttgattggcggtgtatattatttgattcttcacaaaaaactttctccttttagtggtatagatgtgaataatcgtgatgggcaggaggaaatccattatgccattgatttttttacggatgtcatattcaataaaacaagagaaagagaaaaaaaagatcatgcagtcgaaattttgcgattgaatggtgtttcagaggatattataaaacaagtcagtttatctttgtcataattagcaatctccatatatggaaaacctattgcggaaaggaggtgtaagagaatgaaagcatctacacaatacaacgactataaaggaacggctgctgccgatatttcagatcacctttttataagggattatttaaaggatcgtggtgttgacattgaaaggtacgagccggttggttttgaactatatacaggatattccaattttgtcagctaccgttttatctgtaaggataattacagcgacgagaatagacttgtgaaaattgggtttgagagcaaagacaacataagtgattttctggatttatttaagaggtttaatgttgtacttacttggaacaagtccgaaatcaattatgcagattgggatgtgagtgatgatactattatgattgatgatagagaggatttttaatagtatgctcattgtttaatatgtaaaagaggctgattcaatactttatgtaaagaatcagcctctttgtatattgaaaaattaaaatattaccatcgatacattaaaattttttacctcctacaatattccagaaagtaccgaaaagaattttcatgtcgaaccaccatgagcgttttttaagatagtataaatcatattccagtcggcaaagcattttttccattgtatcggtatatccattgtaaagagttgcaaaagatgttactcccggacggatctgatatagatagacataacgtgtatcataatccagaatctgatctataaagactttacgctcgggtctgggaccgatgaatgccatatcaccgcagaacacattccaaagttgtgggagttcgtctaaatgatgtgcacgaataaatttacctacttttgtgagacgtgggtcattatcgcctccggaatgacttagctgtggaccaagtttttctgcatccatgcgcatagatcggaatttgtaaatattgaacgggcgaccaaagcgaccaatacgttcttgtttgaagatagcagggcctccatcttcaagtttaatggcaatataacagcagagtgctagcggtgaaaatacaaccattgtaatcaaagccacaatgcaatctgtaatccgcttgaaattcctagcaaaggaagacatgctatctggaataaactcatctttaggcaccaaatcactgaccaatgttttaatttcaacggtctcttgtttcttgccttctgaacagcatgattcaagccagcaaaagaaatccttctcgctaaatgattttttcatatcgagatagaggaagttttcctcttcttgaatgacaggaaggtatgacctgagtctcttcatgccttcccttgttacgattgtataaggaagtgctacattggaagaatagcccctgacatattcaacaccatgagacatcgcaaatagttttaaagaatacgcagaataaccataagcaatccaaatgctgtgttcttcttccaaatgatacaaatagacatgcttattgtcattctttaattcacgctctttgataaattctgaattcataatgaacagtcgtataatttgttgttttaattggcctgtagaaaatactcagaagtcgtcatcaataacgggaactcctttcgaaatataggttgaaacatctacttgagacatatctttatatgttgtaggtttttccaacagcaagaggattcggtctgccattgtttttgcatcgcccgttggtaccaaaaagccattcaggccatcttctataactgccttgtgccctttgttgccggttgctacaacaggcaaatgagcatattgagcctgtataatacccaaaggacatttttctgtcttgctggaagcaacatagatattagaggctgccagcaattctcctgtgtcatttcgcatacctaagaatctgacaaattgctgtacctcaagttgggatgcttgttcttggcattctccgtcaagacagtcctttcctaccaaaagcaggtaaacgtccatgttccgatcacgtaaatccttgacggcttgaatcagcatgtgctggttgttattagagttcatttccgccaaattgattaaaatgattgatctaagaggtatttgcagttcgtttctgtacttttggcatacttgcaggggattgtcgatattcaggctgtcaaaatcgaaataaacagatttttcacccgatacccatacttgttgggtagatttattgtttgtttccataatgaattgtgtttgatatcaattgatactgctgattatttgttctaatgagcatgtttgcagattcaataaatcatgaggaatattattgctgattctttagaacatcacataagcattcgtatatttctgaggcaactttcactgattcatattttgaaacatcctcatttgccattttcttatacaaatctggattctccattagagttgtaatttgatcagccattgatgagtaatcatctatctggactagaattccattttcattattcttaataaccgctagatgtcctctgtttgatgtcgcgactaccggaagatgcgcatattgtgcttcaacaaggtttatagcaagcccttctcttttgctggaagctacataaatatctgaagctgccaacaattcaccgatatcgttacgccatccgaggaattttgcatattcctgtacctgtagttttgcagatagctgctgacatctgccatttaaataatcgggaccaaccaaaagtagatatacatccaaattcttactccgtagattcttcagcgttttgataagcatctgctgatttttgttgttgttaatttctgcaacatatatcagtactttggaacgaattgggatatgcagtttattacggtattcttgccggattttctctggacttttaatatccaagcgattaaaatttgcaccaatgccgtttgtttttctaacaagcatgtgtcggttgaatttctttttaacacgttcataatcctcgtcatttatggttatgaacatgtctgtaaactcagccatcaacttctccattggatagaataacagccaacttaagattgaggcacctttaaagaaatgaaggccatgggcaaagtaaactaccttaagtccatgttttctgaaagggatggatgcaaagcgggcaaccagaccacctacaggagtgtgactataaataatatcatactgatttttcttgagtagctgatagagctccactattcctttcagcgttttaaatgtgaacggtgagcgtttccaactcataccgtatacattgtcagcaaaggggatgtcttcgtcaagagaacaggcaacgtctatatgccaacctttacttttcaagtacttaatagtaggaatatgaaacttgtttacatgcccctttgcaacatttgcaactagcaatacttttatctgtttcattgtgcttatgtggtgtttgactgcttgttatccgccacataaacatggtatgataaaatgttcaaatggggataaagcagtttgatactggcttagcagacagtattattgatgattaagtcaaagaattgacagaaagagaaattgtctgagtgcttgtagattataaaagtaaaaaaggtgcaggcagataaaagaatcgatggtcaagaacaaaccaggcattcataaccagccatgcaaaatttactccaaatacccaagggaggcttttaatgtatttattcaatttatatatatcagaatgttggatatacaattttaaaaggaagaaatatgagatgaaatatccaaggagaagatatcgatttccaactacactgaaactagtcattagataaccaaaggttaggaaaaagagcatatatgcatacagtacactatcaaatgatgatattgaaaacttgttttcattctttcttaaataaataagaaataatacataaaaccctcttataaaatagtttcctactcgttgtaattgaacggtcaatgactgttcaaatgctgctgccgtttcttcggaagcataactggatgctcgactttccatcgcttggttgaaattgccaagattcagattttggataatattgccccaaaaatcaggagtgataaacacagatgatatacaggaaacaatagctgtccaccaaagaatatttacatgcctctttgtaacaaaaaggcgggcaataatgactacacatatattcagtatgaaactgaaatgtatcaaggatgtacttaaaacacctaataatgctgtatttttcttttcgatgagaaatagaaacgcatagtacgaaaatatagtcattgctataaaattcctaatacctcctatggctacgggattgtataatagcacatacaatattgtgattatataggtgcacctattaccatagtgtagttgcatatatttctgtatcttagagagaaacaagtatgcaaacaaacctccaatcaatcctacgataaaaaatacaaccttaatatttgtagtgatgttgctgcaaacaatgaacaacatcccttcgaaaatatcaaatgtgttgcctgataaaaaatcgttccatatatccgttatagttgtagtagacgcaaaggtttcaaatgccaccattttcctgtaacagtcagctctcgggtcagaaaagctatgtgaaaaaccaaacaatgcatagaatatgacaaatacgcatccattcagtttgttccttaaattattcagagacaacaagaatgacaatattggagaaataggcagaattaaaattgagccatcagatagttttctaagcataattattatttgtaaacaaagcgatacatgagatttaatgctgctttggcggctggatagctaattgaggaaatcagtatcaacaatgttttaagattactacatgaatgctttctgagtcgttgcagaggcaattcctttagcaaaaaggctctgtattcttcttttgataatccttttgctcttaatccggtaaaagccaaattgatactacttaaaaataactcttcctcatattcgctgagcgaaaagtgttcatacttccatttattaacttttgctaattggtagaaaattgaagcattgggagtgtttgtataactaccattgtttctggcacggaaataatggtaatatgcacctttgcaatatgtgatggaaaggggatgttggagtaattttagcacaacaagcaagtcttctcccatattgatgccggataaatagctaatctgaaattttctaaaaagatcactccttattaacttattgtttgtactacccataattttttggcacaaaagcccacgaacaagactctcttgctttaaatctatccctttgtgtgatatgattctttgtttaccattatcatagttaacgaagaaatccgaaatcaccatatctatctgctcattgtttgtggccaaataaagttgttccaacatgttggcttctacccaatcgtccgcatcgcatacgatacagtaacgaccgcataaattatccatgcccatttgtctggcagaggcggaaccaccattttctttattaaacaacttgaaacgttggtctctcaagctgtatttcttgcaaatggcggcactattgtctttactcccgtcatttataagtaatacttcaaaatcttgaaatgtttgttgggctagactactcaaacttttatccaaatatttttcagcgttatagatagggacaataacagaaatagcgacagtattattcattgatgcaatatttatcttgaactttaaaaggacaagcacacagtaatttattcaaatcaatatcaataggtttccactcgttcttataagcaagcaaatcggttaaacgggtggtttcattaatctgaaccggttcattatcaattcgtcccaccgatgagaaataatctcggaatttaaatccgtttcctgttactttgttagaaaattcaatccatttgtttggaatgccgtatgagtcagctataatcagaccatgtaatgaacttgacaaaatgaattgacactgatttatttcatcgatgacatcatgccaatccttatagtttgccatatggataattttagcatcccccttcatttgtgaaacaagtttgaccacatatttacttttcatatcgacatagtgtggtatgataccaaccgcatacttttttacaatattgggtttatatatcataggaagaagcaaggctggatctccataaactggaggacattcaataccttgtgataggagatatttacgggttaatttgccgcgaacagcacgtacttctaaaggaacacatttcattttcctattatctgcgatcgctccactaccccaaataatactttgagaatcagccattgaatcaactattgatccaatgcagcaaatgtttgtcagcttcgggacaaaaaggttgaacttattgactaatcgtttgcctgagagttctttaatcagataataattcagttcatcgcccagattacgattttccggttcatcatcgtataaattcatccatgcatttacgactaacaactcgtttcgattcatgccgtaatatttcatggtatgaatgaggtttttaactatatggcgcagtttattttgtattcgtattgcaacgttcgtcttcattttgtattgtttttccttgttgttttaattcaagatatatttttccctcctctttgagtttgtcatattgattcttatcccggtatttaattattttagcagggcatccgccaacaagtgccattgagggtacgtcttttgtgacacaagaatatgctgcaacaacggctccctcaccgatcactacacctggcatgacagtaacatcggctccaatccatacattttgctttatgaccacatctttgacaatatatttgtcatcatacggaagcatgcttccttgccagtggtgattagatgtgtgaaccttaaaacggggaccgataatcgtgcctgattcaatgataagcttgcctcttagctgtaaccacgaattaggaccgatataaacaggcggagagaatattaaattttggtgattgaaatcagagaagggtatatgtatttcgagtccgtttttatttagtttcctggcaattgcaaattgtttaaaataatgaaacaacgtcgaaagagtatatttaatcattttttctgattgttttaaatagtttgtttttaaccatttctttttctccgttttccaaccccataaaccatatggaaagcagtactatgaaaaggcaaacacaaaggttggcaagtagatttaaatcgttgacatacctatataggagcattggagaaattgaaaggatggtcgttggaataattttgccgaatacactttttataaaatttattatagggaattttaataggctatgacatatccacaatcttgcagaggtcgttaggactgatatggctatagccacataaaaactaacttccggcttgtcagtaatgtccaataatatatatgaaacaggaagattcataatcagcaggtttcctacaactatttgatatttttttatttttcctgttgcattaacagcgggaacaagaggcatcgaaatacaatctatcagagtggaaattagtaccaaacggcaaaaagtcatagcatgctcaggaattactcccagccataattcaagtattctgccagtttcgaaaaagattggacatgcaaaaaggagtaccaacaaatatgtaaatcgacaacttctgaaaatgagttgctgcgtataatctagattaccagctgaatactgcttgataatttgtggattaacagcttgtgtaaaactagaatataatgaagaaactgcagaattgacctggtatgcaatacctcttgccgcatttactgcaggtccaaaaaagatattaagcagaatattaactccttgcatggcaccaacagttgctactcctccaaagagagaccatccagaatacgttatcatattattgaatagagatttatcccagatgaatttataatgacattctgcaaaacttttaattgcataagttcgatagaaaacagccaccattatacttattaccagtagaattataccataccaaattaacttatctcctgtcagaatagtcaataaatagactcctacaagcttcgaacagcaatctaaaattgttccaattgcatatatatccattttttcatgagcgataatacatgacatatatggaacttgcagaatggatacggcaaaggaaattaaagcacactgataaatgaccaatgccgcaaacattctttcttctggtatggtcaaataagaataaataacataaagtcctactgtctctgccaacaataagaccaaaactgccaataagatatgaatacttactgacatgctaaatatggtatgtagtcttctaacatcattgcgtccgagttcaaaagatacaaatctttggactgctgctgtcattgcgttattcaagaatccgaacatcaagacaacaccagctactacattgtaaatgccaaaatcctcaattcccaaaacttgcagtattattctggatgtataaagggttacagccattataaacagcattcggatgtaaagcatcactgtattcctagccagtcgcttgttattttcaagatgtgacatttgtaatagaatctaagaaataatcagacgatagattttattcatcgtgtaatctatcacttgatttaatttttaataaagaataatatatttcgtgaagagtatatcttatataatgtttaactgtctgattttacgatagttactgtaaaggtaaagactattatttatatagaaaaatatttacttcttattttgaaaaattaccggaattataaaactgactcttttctttcttttattgtcattaaataagttttacatcttttacaaaagtagctgtaaattcatggcacacatcaactctttatgctttctttctagctgtaacttgttttggcaaattgcgagcaaatctcaatcatatatgatataccatcataccgctatcggattcactttcatcgtttccagattcaggtacagcccgtgatgctcgatcatcccgttgcggaacatcttccacaggatattgcagccgagttgtgccagcg

SEQ ID NO: 466 - DNA, 22804 bp, unidentified
  source 1..22804: mol_type = unassigned DNA
ctcatggacttgcataccctgaacaagtttctgaccattaaggacaagcacatccttctttacgagcataatgcttttacatcccacctgatgctggacagtgatgaagtctatcaaatgacgaaacgcgggttggacgctgcgcagatctctgcagcgaagcggattcacctcaatttggtgctggtgaaacttctggaactgcatcatctgggatacgatctacggcactatcacgcccagcaccatgcgtttattaaacagttcaaccttccggcacattttcagttttgatgtggccgccggatgagcctatgttcttataaccctaaaacccgtaatggatggtgcgttatgcctgtccattacgggtttttcgtgttatttcagtttttcgagaatttcatcagcactcatgccttcggcaagcaacttcttcaggacggattctgcttctgcctttttcgcttcttctgctgccttggcatctgccctggccttcttcgcttccagcgttaccacttctttttcggccttctttaaagcagccttttttgctttcagatcagccttcaaagtgtcaatgtttgctatgatggatgcaatctcagcagagagtgtttcctttacggactgcttttctgcaatctgcgttacaaaatcagcagtcacggttttaggcttattcttgctacctttggttctgggcataggacacaaacctctttcctgttatgatagtctaaatatatcacaggtctgaaaataaatcagccttgtacacaccattctccagcatcttcttgaagctgtcctttacggctgcaacatcttcgtgataggtcattccgtaccaggtgtcgttagtcctcagaacctttacggacatttttccctgctccaacagttcaccgatgaagctaggaatcagatactctgccttcagcggattgccgggtacttctttctcgaaaaactccttgaaaccattttccagcacacccagaaaatcaggagtcaatccccacatgttcatggaaaccagagcgtcaacatcaataactacaccatctgcttccgctccagttgcagtctttacgatgctcttagtctcaacaacctcggtcagattattctggtcatccatcttgcaaatgccacgagtcacgccaccgttatcagacagcgtgttcttcagcacaaagccagccatacaggactttccgccattcactagatactcatgaacagctttaaagccttccttgccatagtaatcgtctgcgttaatgacgatgaacggagttttaattacgtccttcgctgcaagcacggcctgaccggttccccagggtttcgtgcgaccttccggtaaagttcccggaatatcgttgatatcctggaaagcgtagtctacagttacgtcatgagaagagcaaatggaggcaatgcgatcaccaataacctctttaaactccttctcgatatccttacggatgataaatactacatggttgaagccagcatcaatcgcatcatggattgagtagtccataatgatatgtccagcatcatccactggctccaactgcttaattcctgttccgaaacggctgccgataccggctgccatgataagtaatgttgtgttcataattttttcctcttgctatcttttattccgcagtcacactcttagcgagttttctcgacttctctacatccagacctttggctgcaaatacataatagcccaatagctgtagcagaatcactgctaggctctgcaaaacggctctaggtaattgccagaatcgtcattgactttatgccttatatcccttttcgcagatcacatcgacaacttcggaaacatatttctgacaagtatcgtggtcgggggcttctaccatcacacgcaccacaggttccgtaccggactcacgaaccagaatacggccagtatctcccagtgcttcagccacattctttactgctgcctgcaccgcctcatcgttctgtgccgcctttttatccgttacgcgaacattctccagtacctgcggataaatcttcagtggtgctgccaattcgctcatcggcttctttttagccagcatgacttccatcattttcaaactcgtcaggataccatcacccgtgctggcatacttggagaagataatatgtccgctctgctcgccgccgatacgacagccattctttgccatgtactcgtaaacatacttgtcgcccacggcggtcttagcatagccgatgcccttttcgtcaaaagccttatacagaccaaagttggacataactgtggtgacaacggtattatttaacagcttaccacgttccttcatatagcaaccgtagatatacagaatgtggtcgccagtgataacattgcccttttcgtccacgcacaggcagcggtcggcatcaccatcgtaagcaaaaccaacatccaagcccttctccacaacaaacttctgaaggccctcgatatgggttgaacctgcattgttattgatgttcagaccattcggattattattgatgacataggtatctgcgccaagcgcatcgaacacggactttgcgatattccaggagctaccattggcgcaatccaaaccgaccttgacacccttaaaggagtagatgcccagcgagatcaggtagcccatgtagcggttgcgacctgccacatagtccacagtgcagccgatgtgctcacgatgagcaaagggcagctctggccagtccttatcaaagacatggagtttgccgtcgatgtaatcttctactagcagcagagtttcctccggcatcttctcgccgtagcaatcgatcagcttgatgccattatcatagtaggggttgtggctggcagagatcataatgccgcagtcgaagtcatcgacacgagcgatataagctacagacggggtggtggtaacatggagcaaataggcatctgcaccggaagcggtcaggccagcaaccaagctgtactcgaacatatagcttgagcggcgcgtatccttgccgataacaatacgggcaggttcatgctcgttgttacgctcacggagagcattataataccagccgaggaaacaccccaccttgtaggcgtgatcggctgttaaagtaattccagcttccccacggaagccgtctgttccaaagtatttacccatttctattcctttcctgcccttcacgcaaccttgatcaatacattttacttatcaatatgcttttatcggacacctaatctttcttagcacatttgttataaggacggaaatcgcaactgttccaactacacgaacaatataaatcaaagctgctcccatttccgttccaaatacactgataccaaaccatttcattgcacatgaaagaaccaaataatttaatggctctgcccataaataaactccatacgtattttgagaaatagcaagtagttttttatgatgctcttcctttaatgcactttcaattattctggcaaacgtccaaatccatataattccgacaaatggcattacggtatttattaaaatccattttactgatgcagtgcaaaagctaatttcatacagaagtgcaaacaaaaatgactctgccacaaaagcccgtttttttgacttgaatccatgatttttcgacgttttacttagctcatttagaatatcatcaataaaatgtcctgtccaaaaccaaatcaaccatcggaacggatttccgaaaggaacaatttgacgcgcatatttatagaagcccagccctatcaatgccaatgttccaacgattatgaattgttgtcccacatttttgatatgcttttcaatcacataatccataataaagcagaaaaatagtgcttccaaaaaccatagataaactgcatttggaaatattatctgaatcacagccatcattagcgggtgagctaaaccatcataataccctgccaacattttaattggtatgttccagacaaaccatacaaacagcaacggaatcaaaagtctttttgccttttctctaatcaacttactgacagacgaatagcgattcttttttaattccagcgaaaacacagcaccggacaagcaaaagtatgcaggcatatgaaacgaataaatccattccgtaagaaggctcgttgccttgtgaacccctgcatcttgaatcatcatatcactcaaaatctgatcgtaatgtattccaccaaattttgtatttatcgtgtaataactggcatgacccagaacaaccagaaccgtcaataagattctcaaaatatcaagatcatatcgtctgtctgtctgtctgtctgtctgtctgtctgtctgtctgtctgtcatgattgtccccctctgccttttattgtcaagctttttatttattgcacactttcttcgccttatcaattacttgggtcactatttccagaactaaaggctcatgcgcaatgagaagaaccagaccatagcttccgaaaaacaaaattgccgacaaaagcagcacaaagaaactattccagcccagcatttttacccataccgaagcaacacagccaatcaccagcgctaataacatttgtggatattgaattttcttatacgctggtataatgtcttgctttaatgcaccaaactgtacaacccacactacaatttccgccgcaagcgttccaatcgcagcaccaacagaagcatatcttggaatcaaagcaaaattcacgatcaaatcaaccacggctccggcgatttctgaataaagcacgattttctcttttccaagcggcacaagcatttggatgcccatgacattggttagcccaataaacaagagcgttggcataataacctgcatcggaagaattgatttttcataggcactgccggacagaaagaaaatgccttcttttgcaaaaatcataaaatagagcatcatcggcaacgcaatcagaaacacaaaattgattgctttgtgagctatccgataaaactcatcaatcatcttatgctcgatataatacgaagctcttggaagaagaactacaccaagcgaagtcactatactgacgagaatcgttttaatttttacagctgcattataataaccaacatccgcatctgttgtcataaagccgagcatgaccgtatccaaatgcgtgtaaattgtcgtagcacaggacattgcaaagaaaaccgcaatcggcttaaagtgtcgcttaaaatggtattttcctaccggtcgcatatcaatgaacttgtgcgcattgataaagttaaaaatattggaaccagaagcggcaagtatcgtaattgcaccataaaaaatgtaatccgatttttgatgcacaaaaacaaacattacaataagtgcaacaaatttgaagataatggaacgaatcgtaatataggtatactgttccaacgccttgtacatccactccataccaatcacattaaatgcaatcgtaaggcttacgataatatataaggctctttcttctctcaatcttggaacaagcattaaagcaaccgctaatactgtatacgaaataacactcatcacaaaattgataatcaccagttcctgtgtcgttctggtcaattcttctttatcatctcgtacctttgcacaggcacggatgccgtatgtaggaatacccaactgtgcaaacatcgaaaaataggaaatcaacgatgttgcaaatgaaacctttcccgttccttccggcagcaaaattctggaaacatacggaaatgttatcagtgggaaaatgaatgatgacattgttagtatcacattcattataaaatttaatttaatagacttgctttttttcatactacaccttttgcttctatctcgcgcttacttgttatcaatatacttccgacatataaaacatttaacagtttataaggaacattagtaacgctaaacaaaaccaagaaaacaattagtaagctatatccccaccgctcatatttatttctaatcaatcccaatattggccatattataattgacactccagtttgtgccaatagtataaacagcccagtagacaagccgatacccgttctatatactgccgaagaaaaagaattatatatcggtttataattgttaattccaacgccccaaataggcgaagagaaaaagacacgcaaacaagcggaccagtcatcacttcttatgttataagaggttgacattgtttccaatttatagctcataagataacttacagcataaattaaaaagacggcaaaaactggcagcaacgctacaccaattgctctccatgatttatgtgttctattatcacatattttttgaagctcatatagtccgagaatcagaagtattacattagcaccagttgttgaacccgtagtaaatatagtaataacaaggattgtgatgcgaggtatactgcatttagtttttccaagaacttcctttgccaaagctaaacatagcacataagcaaacattggagattctggaaagatgcttgtatttctatatactgtatgtcccagcaagatttgcaacaaataattaggagtatatgtttcaaaatacaagttaaaatacgaacctactgtacggtcgccgccccatttatagaaagcagtcgtttttcctggcagtagattcatcacagttccaaaaaaataaaagaacagcgacacacttgccaaaaccaccactatgtcacagaacttttcaattaaaggctttcgctcagactcatgattacgtttaacagcctgtaacataacaacgaagccaataccaactgtaactgtattttgtattatagtatatactgataaatttccaattgacatgagtgcagcatatataacacttataatcagaaggataatttcttttctttttatcttcaacttaccactataaaggatataaacaatcatgaatataacccctacataagtaaagaaatcatctcccaaattatcctttctcagccaaattgtgttaatatcaaacacgaggatcaatgcaattaaatattccagcaatccagctattttacttttcccaaatctaaatggcatcacatccatcctccatctattcccatatcttttcctgcgatccttttttagcgattagaaagctgcttttcaatatattcctcaaacttttttctctgagtaatagaatccaaggttccaaggaaaatcactttagctctgataaagtcacctttaagaaatttctgaagtgcaactttaaaattgtgaatgaccaatttttttctttgcttttgacttacaaaaagtccctcattgatggttgtattacgataatatttccggaacatttccaatcgtttcgtatcgttctccatcataatatccaatttttttgcgttgaacctcttatgcaaagctacgcttgcacccacaaaataggctggcgcataatactttgatattctcatggtgtattccgaatcatcgccccatataaagtagtccttacaagggagtccacacttcttgattgcatcataggaaaccaaaatggaaacaaaagtcgctcttgaaatctgaacgatgccctccgacagatatttataccagtgcggatatccattttttgcaggacgcatatcaatggcaggcacattcattggctcactatctggtccaataatcgagcttgccaaatatcctattttcccctcgattttagatcgggcagacatcagcttttctaagcaatctgtatacggaatcgtatcatcatccataatccagacgtaatcacattccatatctctgcaaatcttaattccctcgtaaaacccacctgcaccgccaaggttggtttccattctgcgataatctattacgtctttgtcatactctccgccttttataaacaaatcggcggttccatccgtgcttgcgttatcaattaaaacaatcttatgtactttatatgtctgagacaaaactgcattcaagcattctttcagcagtttgattctattataagtaactataaccgcaataactttttccatcgtttacgcaatcctcatttctcttctaccaactttttcacaaccgtagcaggtactccacacgctacacacgctgccggaacatctttcagaaccactgctcctgctcctacgattgcattgtctcctatctctacccccccccactattactgcattagctcctatctgaacgttatttccaatagtaggaacaccactctgtccttttccgccaataacgacattcgcttgaattctggcattctcaccaattaccgcattctcatggataaccacaccgattgcacgatgcggaaaatacgcatttttaccgatttttgcagtaaatggaatatcacatgcaggaaaaaagattctgcttacaagcttcaaaacagccgggagcaccggaacgtgatgttgaaccagccaatttccatatttataaatcgaataataattcttcaacattttatacctcaaatcatcttagaacgtaccatcttttctttttactataaatctaccaaatgccttcagaagaattatattttttccaactctgtacggctttgctgccactatttcaaaatagcacttaatcgcttcacccacctgtttcgattgaatgtacagtctcagttcatattctctacgcgaaacaagtacatctttatcggttgtcaatatatctttctgcttttcatcgagacggtgcaatgcgtccaatctcttcatcgtgtttccagtaatgcgctctcccttatggatataataatgaatgagcgaatcctcggtatagtctatatcataaattttgcttatacgaagccatgtatcccaatcctgtgacgctaccattttagggtcaaatcccccaaccttctcaagtgcttcgcttttcagcagaggaaatgaacaggagcctataaaattatcgcacgagagctgcttatatacagatcccctatacggtgtatgtcgatcaaatacgcatctggtgcttccatctccttcatgaatggtcgcattgcaataaaccagtccgatattatttttggactttctaaacacatccaactgcttttcgattttatctttcacccattcatcatcgtcatcaagaaaagcgatatacttgccgttgctattagagaatcctgtatttcgagctgcacaagcacccatatttttttcatgctgaatatatttaaccctggaatccgatatattttcgcagtaattttttacttcatctcgatattcatattcatttgggctatcatccacgataatcagttccaaattctcatgggactgattcaacacactatcaatagctgctttaatttgagacacacgacgtttatatgttgtaataacaacacttaccaattctttttccattctattctccagatgtattactttgtttgaagcacaccatcgtacaactccaccaatgaatttttctttgttgcaatttcaaacccagccttggttgcacaatccttaaattcatctctttgcaaatgaggagtttcgcatatacgttgcgcccatacttttggcgattcattcaagctgatataattcatattaggacttatattcacgtccttcggcacatttgttgagctaaaacatggaagccctgctatttgtgcttcaacaaacaccaagccaagcccctcaaatttcgatggcatcaataatacgtccattgcggaatacaatttattcacatcatttcgtgagccaagcaatacgactttatcctcaattttgttcttctttatggtattgagaacaagaggctttagttcaccatcacctgcccaaatcatcattgccgcaggattcaattttgctatctccgaaaatacgcttattataaaagccggatttttcggttcggacattcttcccactacaccaactacaaatttattttctatttcaagactctttcggagttgcattcttgcatcaggatcaaagtgatattgtgaggtattcatcgcatttgttataatcgcaaatggtttatttccgaacactgattttcccgcggattccgaacaagccacatactcatttgcatctgctacgcaagccgtgtcatacagtaatgatctcattctcgctttcatagaggatgtttctctcggagcatgggtatgatatatccgtctactcattcccatactttttgcagcgtgcaaggacattacagcatttaacccgctgatattaacgtgcagtatatcataccccttactcaataccgttttgatgtaacgataatttgaaacattgggttttcctgtgtcatgcggaagtaggtaaatcttgctattatgtttttttacagtatctacaaatggagagtctatatttctattcagcaggaaatcaatcgtgtacccttgttctactgtgtattcgtaatatttcataatgcaggaagcaatcccactccctacgcgcaaatccctcatttgaatgagaatctttttctcctgcatccagtttcctccaaaaactattttttcaaacgcgcaccgctcaacctttttagcgactgccttccattaaccaaaatccttagaacgccatatgctctctttttcaaaaagaaaacaaaaattctttggctttgcgtgagcgttgttctatcaacttttttcagtgcaacattatatgggtatttatctaacgtctgatttaattgctcgtttacaagtttccgactcattttattttccgggtggaaataaaatagtctcatacaagaatataaccgcgttagtactcttgcatagtatgctttccaatactcttctggcaacgaaaactttttgattattctttcatagttttcaaaagccacctcgttataatactgagctttttcattgaatctatttgttacggattcttgcaaatatcggtaatgatataatgcactatggatataataaaatttatccgtcaactgtaaacactcggcattaaaaattacatcctgtccttttctcgcctttgggtcaaaccacatctcgttatctttcaacaaggacgcacgatacattttattccaaattgtatttgtttcgtattcatacgctcttccgttgactgataagaaattaaaaggagcaattttcagattatgtacccattctttgtctaaaactccgctactgtcttttagatatttaacatttgactttccatcaaattcctgaacataatcaaaccagaatatatcgaaatcattatactttttttgtgcgttatacaatgttgacacatgatttgattcaacccagtcatctggatcaacgaatgttatccattctgttgaagctgcttttattccagcatttcttgcgactgacacgcctgcattttcctgatgaataacgataacacgctcatctttctgcgcatattcatcacaaatatcaccactttgatctggtgatccatcatctacggctataatctggaaatccttcatatcttgcgctaatagactgtcaaagcattctcgcagatagctttcctttattttatatatgggtattataatacttaaaaaaggtgtcatatacttacctttcgtactttcgattgattacatcattatagaaagcaatgtattttttcttcattacatccgtgttataaatttcaagtacatcttgatatgcacgttctggaagttttgaagggaagtctttcattgctacctttatgcgttccgcatattcttcagccgtattgcatacatatccgttgacaccatcgttaataacgcttttattacccatcgtgttactaacaagaatcaactttttgatatacatattctcaatcaagctcattgcaatagcttcaccaaggctacacaaaatgaacgcatctgcgcctttggccatagccagagcttccttccggggtttccatccggtcacttcgatgtttggagcagtcagttcattttcaagttcaccgttaccaatccaaataaattgcgcctctggaaccagttccgcaattttgttaaaaagctgtggctgtttctggacgcaagctcttcccaaggtaaacaccgtaaacttatcattttttacaggctcaattccatcaagagatgccgaaaggtctgcgagattgactcctgtttcaacataagccgttctcctagaaaacttctttgcttcctcatcctcactctcacagcaagtaagtgtaagtgccttgtttcccagcactttttcagcaaatttatagattttgctctttttacccggccccataagaatatgtgcatacccatgaggtgtataaacaacagtgttatttttacccttgtatgcaagtcgtcctaaaccacctgcaacagaagaatgcagatgaattacatctggttgcacatctttttcaatttgacgtaattctttaatagctgcaatatcactttttaagttggtcaatcctttaacgccaacattttccatttcaatcaaatgtactctttgatctaaaaaatccgtatagtttttgggtgtctgtggtctaagcgaatatgcaaggtaaacgtcaaactcatctaccatgtcattgcaaagctgagaaacgtatgtaaatacacctccaccaaaggcctcacagaccatcagtattcttttctttttcattacgcttctcccaactcacttgcacatttatccaatacagcggcaatgacctgatccatgtcatagtacttatattcacccaagcgaccgccaaaaatcactttactttctgcctctgccagctttttatactcagaatacagtaaactgttctttgcatcattgacaggataatacggctcatcccccggtttccattcgctgctatattcgcggctgataatagtttttggcaaatcattcccgttttcatccttgccaaactcaaaccacttatgctcgatgattcgcgtccaaggtgtttcacgatctgtgtagttgactgcagcattgccttggaaactgggcttatcgagaatctcattttcaaaacgaacagagcggtactccagtgtgcccagcttatagtcaaagtaggcatcgatggggccggtgtagacaaccttgtcggccagttcatccagctcagccttgttttccagatagtcagtattcaggcgcacctcgataccgtccagcaagttggcaatcatcttggtgtaaccgccaatgggaatgccctgatacaacgcattgaaatagttgttgtcaaaagtcagacgcaccggcagacgtttgataatgaaggccggaagatctttacagtcacgtccccactgcttctcggtatagccctttaccagtttttcaaaaatatccttacccaccagagagatggcctgttcctccagatttttcggttccgtgattccggcagcctgccgctgctcttcaatcttggccgcagcttcttcgggagtcaccacgccccacattttattaaaagtgtacatgttaaaaggcagtgagtacaactctccgtgataattggccaccggagaattggtgaaacggttgaactccgcaaatcgcgtaatgtatttccacacctttgtatcattggtatgaaaaatatgggcaccgtatttgtggacataaattccttccacgttttccgtataaatgtttcccgccacattagggcgtttatcgatgaccagaacctttttccctctgtcagccgcttctcttgcgaacaccgctccgtacaatccggagccgaccaccagatagtcgtatttcataatttatatatttcctttctcacagtcgcattcctgcgcctacgttatttccgtacgacagccttctctccgaagacacgtttcagaaccaccagagtagccagtgtcagcagaataccgatcaccagacagatcaccacattctgtacaaaaccggcaatggtataagtcacaaaagagattgccgccacggtcagtacataaggtacctgggtggatacatggttgatatgattacactgtgctcccgcagaagccataatagtcgtatcggagatgggggaacaatggtcacccataacagcacctgccagacatgcagacacaccgatgatgatcagatgctcggctccgggtacgatagctccggtcgtgggatcggtaaatacgccggtaacgatagggatcagaataccgaaggttccccagctggtaccggaagcaaaggccaggaaacatgctaccaggaaaatgatggccggaagcatattggtaagccccgtggatgctccctgcatcaggcctgccacatagacatccgcacctaacagtccggtcatggtcttcagagtaacggcaaaggtcaggatcagcatggcaggaaccatggcaatgaagccctgggtcagacagttcatggcctccttgaaggataccagtcttctgcacatataatatacaatggcaaataataatgcgatcaaagatccccagggcagtcccacggaagcgtccgttgcgctgaatgcatcgataaagcccacgccttcaaagaagccgccgacatagatcatgccgatgacacagcagacaatcagtacgatcaccgggatcaacagatcgtagaccttgcctctggtggaacctttgggtgcattgtctgcattggccacgcgctctccctcggtgaacagatcacccttttctctggcattgcgctcatgctttgccatggggccgtagtcgaagcccatcagcgccataccgacgacgaatacgatggtcagcagagaataatagttataaggaatagctcttacgaacagttcaataccggaataaacaccttcatccaccataccggatactgcggccgcccaggaagagatcggtgcgatcatacagatgggtgctgcggtggcatcaataatgtatgccagctttgctcgggaaatcttatgtccgtctgttaccggcatcataacagagcctacagtcagacagttaaaatagtcatccacgaaaatcagaacacctaataaaaaggtggaaagcagcgctcccgctctggtctttacatgctttttcgcccattcgccgaaggctgcagagcctcctgccttgttcatcagtgctaccatggtacccaacaggatcaggaacatgaagataccgatattccatgcatccgccacggaattgataaatccttcgttgatcaccgtatccagcgttgcaataggagaaaatccggtataaatcaaagctcccgtaacaatgccgataaacagtgacgaatatacttcttttgtgatcagtgccaatacgattgccaccacaggcggcagcaatgcccaaattgttccatacataattttgccctctctcgtactttttttgtaacatttcagatacatttttactttatggcaaacccgtatacctgtcaatataattttccaaattaacgctttagcacaacaatttatccgttccttttctctttttcgctttaaatcgctaaattttcttgcatccttgcacgatctgggctataatgagcaatgacatttagcagaaaggacgtgccctgcgcacgatggaataccatgagtttcgaatttatcaaaaaactgcccactcctgcggagatccgcaaggaactgccccttccggcagaattagccagaatcaaagaagaaagagatgctgaaatccgtgacgtcctcaccggcaaaagcaataagtttctggtgattatcggaccctgctccgctgataacgaagattccgtatgtgattacgtcaatcgtcttgccaaagtgaatgagaaagttaaggacaagctgatcctggtgcccagaatctacaccaacaagccccgcaccaccggcgaaggctacaagggtatcaccagccagcccgatcccgagaagaaaccggatttcctggcaggtctgatggccatgcgtaaaatgcacatccgcgccatcaaagagaccggtctcactgccgcagatgaaatgttatacccggagaactggggttatgtatccgatatcctctcctatgtggccatcggtgcccgttccgtagaggatcagcagcatcgtctgaccgtcagcggcttcgatgtagctgccggtatgaagaatcctaccagcggagatttctccgtaatgctgaactccgtatatgcggcacagcacccccactccttcatctataccggatgggaggtgaatacccacggcaacgatctggcacacaccgtactgcgcggtgctaccaacaagcacggtgccaatatccccaactaccattacgaggatctgatccgtctgtgggatatgtatgaaaaaatggatctgaagaatcctgcctgcgtgatcgatgcgaaccactccaactccaacaagcagttcaaggagcagatccgtatcaccaaggaagtcatgcacagccgtaaactcagccacgatctgcacaagctggtcaagggcgtcatgatcgagagctacatcgaggaaggcaaccagaaggtgggtgccggctgctacggcaagtccatcaccgatccctgtctgggctgggaagacagtgagcgtctgatctacgatatcgctgagtacgaataaaaagaacgattttgcaaatggggtgctgaatagttaaaacagtttcaaaaaaactgcaggaatccttttaataacgcaggattcacaaaacattccaataaacatccgaaaaccagtgcgatccatatgagcgccagttttcccaatctgccgggcagggatttttttccctgcccggttgtgtgatggtaaaaataaatactccggtgcatatcttcacaccatctgagtaacaggatcatagccggcaggtaacacagataatggggaaagatgctcacgatccccagaaggatccccttgattccatacctaaacactgccgtactcagaaaaaagcccacagagaatccgtattttacggtgactcctccgcagaaaatccatcccagataagtcgttgccatgataataagcaccagaaaattccgacatcttttgcacagcacgtaccagaacaggatactgctgtccacggtcatatatttcatgcgatataacgtgtcctcatccagcattcccgcacggtttaacagaattccccgtccgaaatacaccgcaaacaatcccaccacaaatcccgtcaaaaacaaaaagtgcagcgggagttttcccgcaggcaacatggatctgttccatttcatatattctcgtctcccgtcaggcgttgttagtaatatatgcggacaacatggaaaatcatgctttcttattcgtctttcagaaaagaaaaagcccatccggacaggtactgcctgtctggatggggttccctaaaatcattatgtagcagccggtcgtgactgcttttgtctgtaacggaattactcactcaggtatttggacgcgtaagttaaaatgccgcagattgtcttggcatcctggatcctgcagtcgtagatcatctgctttaattcttctacggaataagcctctacattgatgaattcatcttcatccagatgctggtttcctctgtctttcagtcctctggccagataaatatcgatcttctcattgcagaatgccactgtggtataaatagaggtcaacagttccacatggtcagtatgatacccggtctcttcctgcaattcccgcatagctgcctgatccgtgggctcttctctcccgttcagtccgcctgccggaatctccagagtctcacgttccagggcattgcggtactgacgcaccatcagaagcttaccgtcttctctcacggctactactgcagccgcccctttatggtcgatcagatcccattttgctatattaccgttgggaatctgcatggtatcctgataatagtcgataatagcaccctttgctaccagatcacggctgatacgcttgaattcttccatgacttatcatcccttctcatccaaatcgaatacttacctgttttccagtaatttatctacgctcaccatcttgacgcagagtacgaacagatccgtagccattgccatctcctccggtgtggggaaggaaggtgcaatacggatattggaatccttgggatccttcttgtaggggaacgtagcgcctgctccggtcagagtcacgcctgcttccttacactttgccacgatagccttggcacagccttccagggcatcaaaggagatgaaatatccaccgttgggcttagtccaggtaccgatgcctaagcctcccagctcattctccagcacttgcagtacagcctcgaacttgggacgcatgatcgctgcgtgcttcttcatatgttcacgtacaccattgatatccttgaaataacgtacatggcgtaactggttgatcttatcataaccaatcgtctggattgtcatggacttgcgcatatcatccaggtttgccttggaagatgcaatagccgcaatgccggctcctgcgaaggttaccttggaggtggagcagaactcgaataccatgtccggatgtcctgctttctcacactcggaaagaatctctaacagctggtcctgtctgtcatcatataaatgatggatggcataggcattatcccagaaaatacggaaatccggtgcggcaggctgcaatgctgcgaaacgtcttacagtctcatcggagtaggaatagccctgagggttggagtatttgggtacgcaccagatacccttgatggcaggatcttcagacaccagcttctctaccatgtccatatccggtccttcgggtgtcatgggcacattgatcatttcaattccgaaatgctctgtgattccaaaatgtctgtcataaccgggtacggggcacagaaactttacatgatccagcttacaccagggggtattgcctaagatgccatgggtcatagcccgggatacggtatcatacatgatggtcaggctggcattaccgcagacgatcacattctccggcttcacttccaaaatgtcagcgatcagtttctttgcctcaggaataccgtccaggccaccataatttcgaacatccattccatcctcagccttcatagcgctctgagaatttacaacatcgagataatccattgtcatatccagctggttaactgccggttttcctctggacatatccagtttcaggcctttgccttttgcatcttcatatgcagcgttcagctctgctttcaatgttaaaagttcttccttggataattcctgatatgctttcatttcgtaccatacctttctcgttttttcccatagggaatacgctttcttctgtggacgttggataatcgtatacaatcatacactccgaatatcatactataagaaagttctttgtacaataccttttttcgaaaattttatcaaaaaagctgctgtgctttaacagcacaacagcttttcttacttcgtatgaaattgtcatttctgactggtcagttatttggcgtaatcaattacgcggctctcacggatcacatttaccttgatctgtccgggatattccaattcagcttcgatctgcttggaaatatctcttgccaacaataccatatcggcatctgaaatctgctcgggcactaccataacacgaacttcacgacctgcctgaatagcaaaagatttatctacacctttgaaattgtttgtgatatcttctaactgtcttaatctgctagtataggtttccagtgtttcccttctagctcccggtcttgcagcggatattgtatcagcagcttgtacaatacatgcaatcagggaagtaggctctacatcgccatggtgagattccacggcattgataaccgtagcgttctctttatatttccgacacagttcagcacctagctgaatatgggaaccttccatctcgtggtctactgccttaccgatatcatgcagcagtcccgctctcttggcaagtctcacatccagtcccagctccgctgccagaagacctgacaactgtgcaacctcgatggaatgctttaatgcgttctgaccatagctggtacggaatttcatcttaccgagtaatcttaccagttcgggatgaatgccatgtacaccaacctccagagttgcggcttctccctcttccttgatcattacttcgacttccttctgcgccttctctaccatctcttcgattctggccggatggatacgtccgtccacaatcagcttctccagcgcaattctcgctacctcacgacgaatcggatcaaatccggacaggattactgcttccggtgtatcatctatgatcaggtctacacctgtcatggtctcaagggtacggatgttacgtccctcacgtccgatgatacgtcccttcatttcgtcattcggtaactgtacaacggaaattgtagtctcagagacatggtctgctgcacatctctgtatagcgttaaccacatattcctttgcctttttgtctgcttcttctttggcccgactctccatttccttgatcatcacggccgattcatgtttcacttcatcttcaacaattttcaataagtagtcttttgcttgttcagaggttaatcctgaaattcgttccagttcctgcacacgctgctcattcagtctggagacttcttccttcatgcgattgagggattcttctctggatgctaaacttgcctcgcgcttctcgatggcatctgctttcttatcgatgttctcttccttctgctgaactctgcgctcataccgctgggcttccgctctgcgttccttgatttctttgtccagttcattcttggtacgaatggactcttccttgacttccaggagtgattcgcgctttttgttctctgcagtcttcagagcttcatcaataatctctcttgccttctcctctgcgttgccgatggttccctccgcgttcttcttcagacggttcgtggtaacctttgctgtgatcagcactgcagctataatggcaataacagaagccactaatactattacaatattagtgtccactacaggagcacctccttatgaaattttcattgtacattttgctccgataatacaaattatcgttcataatagaatgcaatttatgtacattctaacaagcaattcacaacagtattagtgtaaactgaaattacacccatgtcaagtacaagtcgcaattagtccaaaaatagttcctatatcaaaacaatctttgtgcattatttcttgctgttatgtgtcgtccggtattctcagaaatcatcgctatgcatgccaccgatggctttgcggatagcttctgcggagaatccctttctggccagaaaagcgtagattttctgacgttccttccagtctgtctctgcttccggatcatagtgcttcttatgaagctgttcccggatcatacgctgttcgtcctgctccccaccgttctcccgccagacctgccaggcctcttccatggtagctgctgagattcctttgccctgcagatcctgttcgatccgccgcctgctgcggctgtcctcatggtaagtaatataatccacggcatatcgaagatcatcaatataatgaaagcccgccacatagacgatagcctgctctatgatctccgccggataaaagccctgctgtaattttgtccgcagctgtgccgtcgtatattctcttccctgcaacaggttcatggcacgaagcttcgcccgcttgggaagtacctcctgcatgatagtccgatagtcttcctcgcttaattgctgtccttcctttatatggtaaagacgcaattcgcctttgtacaatacaaaggcgaattcctgatcaatatatactttgcttctcgatttggaaagttccgtaacctgtgttaccagcatggatctactcttccttctctgctgctgcagtgacatctgcctttagtccgtaatgatctctgaccttctcggcaatctcatcgcagatggcgggattgtcttttaaatactgcttggcattctcacggccttgtccgatcttgttgccctcgtaggcataccaggcaccggactttgccacaacgtcacagctggctgccagatccagaatatctcctaccatggaaataccttcaccgaacatgatatcaaactctgcttccttgaaaggaggtgcaatcttattcttaacgactttgacacgggtacggttaccgatcacttcaccgccctgcttcagagcttcgatccttctgacatccagtcgtacagaagaatagaacttcagcgcacgtccgccagtagtggtctcaggattaccgaacattacacctaccttctcacgcagctggttgataaagataaccgtacagttggacttgctgatcacagcggtcagcttgcgcagcgcctgggacatcagtcgtgcctgtaaacccacatggctgtctcccatatcaccgtcaatctcggccttgggtaccagtgcggctacggagtccactacgataatgtcaatggctccggagcgtaccatggtctccgtgatctccagtgcctgctcaccgttatccggctgggaaatgtacagg

SEQ ID NO: 467 - DNA, 24456 bp, unidentified
  source 1..24456: mol_type = unassigned DNA
atgcgcatggcagaatggcgcgaggcactgcgcaaggcaaagacagctaaggaacgcacctcgacaccgcgtgtgaagatgcccgagcttgcggcagactaccgcgtgacgtgcaatgaggaagtgaatcaagggttgacgattgagatggctatggcagaagcctcgcggtgtcttgactgcgccaacccgcaatgcgtcacaggctgccctgtgggcatcgacattcccggatttatcaaaaacgtggagcgcggcgagtttgccgaggcagcccgtgtgataaaaaagaccagcgcgcttccggcagtttgcggacgcgtctgcccccaggaaaagcagtgtgagagccgttgcatacataccaagatgaaacacgaagccgtggcgataggctatctggaacgcttcgtagccgactgggcgcgcagccacggttcggccgacgaggaaaaacccgccgcaaacggcatcaaggtggcagttgtgggcagcggacccgccggactcgcctttgccggcgacatggcgaagcgtggctacagcgtcacggtctacgaggcgctgcatgagattggcggagtgctgaaatacggcatccccgagttccgcctgccgaatgccatcgtcgacaccgaaatcgacggtctgcgccttctgggcgtggagttcgagtccaactgcattgtcggcaagacattaagctacgacgacctccacgccatgggcttcaaaggcattttcgtggcgtcgggagccggactgccaaggtttatgaacattcccggcgagaatctcaacggagtgatgtcgagcaatgaattcctgacgcgggtcaatctgatgggagccgcccgtcaggatgaagacacccccgtgcttcacggccacaatgtggcagtgattggcggcggcaatacggcgatggactccgtgcgcacagcgcgtcgcatgggcgcagaaaacgtgatgctcgtctaccgccgttcggaagacgagatgccggcgcgccgcgaggaagtgaaacacgccaaggaagaaggcgtgcgtttcctcatgctccacaacccattggaatatgagggcgacgagaaaggcaatgtgcgcctgatgcgcctgcagcggatggaactcggcgaacccgacgagtcgggacgccgctctccggtggctgttgatggcgcagtggaggatgtgcccgtcgatttggtgattgtcagcgtaggcgtgtcgccaaacccgttgattccgaatgcgattccagaacttgaggtgagccgcagaggcaccatcgtggtcgacgagtcgacaatgcgctcatcgctgcccgacatctatgccggaggcgacattgtgcgtggcggagcgaccgtgattctcgcgatgggcgacggacgccgcgccgcggcagagatggacaaaagcttgcagaaccaataataccaaaaaaatatggacaacttcaagattacggttataggattgatgtcgggcacatcgcttgacggtctcgacgtgtgctgcgccacattctcaaaaaccgacggccgatggcgtttcgcaatcgatgcggcacgcggctatgactatcccgacgatttgaaataccgtctcggcacgggagcgcaacagatgtcggcacacgactttgtggcgttccatagcgaatacggcaagtttcttggcgagcgtgtcgccgactttatgaaggaatacggcatacgtcccgacatcgtggcgtcgcatggacacaccatctttcatgagccaggcaagcgcataatgtttcagataggcgacggcgcagcgattgcagccgaggcgcgtgtgcctgtggtcagcgatttccgtcgtcttgacataatgctcggcggacagggagccccgcttgtgccgattggcgaccgtctgctttttgccgactatgatttctgtctgaacataggaggattctccaacatatcgtatgagtgcgacggagagcggcaggcgtttgacatcagcccggtcaactatgtgctcaaccactactgccgtcagcgtggcctagagtttgaccgcgacggactgattgcccgcagcggcacggtcgacgccgaattgctcgccagtctcgacgcattgccattctactcgcagacaggcgcgaagtcgcttggccgcgaatgggtggagaaagagatatttccgatgattgacagccgcggacttgaatttgccgacctgctctccaccttcaccgagcatgccgcccgtcaggtggcacgcgtagtgcggcgtgtcggcaagccgcatcccacaatgcttataaccggcggcggcgcgctcaacgtctatcttgtggagcgcatccgcgagctggcaggttgcgaagtcaagatacctccacgccagataattgaattcaaggaggcgttgattttcgcgtttctcggcgcgctttatatggccggcgaggcaagctgcctgtcgtcggtcaccggggcggcatgcgacaacatcggaggaatgctgtttaaaatttagagacatctgtcaacgaaaaagacttaacgcagcggattccgctgcgttaagtctttttaacagtggcggcggttgccacacaccattgccttctggcaaactatgtggttctattttggatataaatcaaagatttttcagtaaaaaaccttaaatggtggcaaattgccaccgccgtgacttttgttgttcaggcagttggcggttgcggttgctatttgccaaaaaatatgtgtaattttgtcgttggaaagattcgttttagaaaaaaatagcttcaatggcaaaaccgaatatccttataatatataccggaggaacaatcggcatgattgaaaacccggtgacgaagtcgctgcaaccgttcgacttcacgcaccttatcgacaatgtgcccaaaatcaagaagctcaattattccatcaacaatatacagtttcacccaccgatcgactcgtcaaacatgaatccgtcgcactgggttgaaatcgcacagagcatcgaggagaactatgccagctacgacggctttgtggtgcttcacggcaccgacacgatggcatacaccgcctccgcgttgagttttatgctcgagaacctgcacaagcccgtcatcatcaccggctcccagcttccaatcggcgaagtgcgtaccgacggagaagaaaacctcatcacagcacttcagatagccgccgcccgcgacaagaacggcgacccgatggtgcaggaagtggcgatattgtttgaagactatctgtggcgcggcaaccgcagcacaaagatgagcgccgaccatttcaacgccttcaagagcaacaattatcccgaccttgcccgcataggcctcggcattcatttccatgaagaagcattgtggcgccaacgctcgcagcgaccgcttaaagtgcagaccgcaatggaccgcaacgtgatgtttatcgacatgtttccaggcatcaccgagagcacactccgctatcttctcaacgcccccgacgtgaaaggcatcgtgctcaagacctatggcgccggcaacgccccgaccgacaaatggtttgtcgacctgatgcgcgacgctgtaaagcgcggcgttgtgatagtcaatgtttcgcaatgcgtcaacggcggagtccacagcgagcgctatatgacaggcaacacgctgcagtcgaccggtgtggtcagcggatacgacataacatcagaggcagccatcaccaagctgatgtatctattcggcatggggcttcggtcagaacaggtgaagaaatatctcaattgctcgctgtgtggagagataacaatttaagcctttgaacagaagcattttatatttgaaacagggataataatgcttaaagaattttaaatgcggaaaattttcgctaatagcattgccgtgtaaaaaaaatatagtaattttgcagcggttttcaaaagagagaaacattagtaaatattcactattataaatcaaacaacaatgagcaatcttgatttgacaaagtacggcattactggcgctacagtaatcgcacacaacccatcttacgagcaattgtttgaagaagagacaaaagcaggtctcgaaggttatgaagtaggtcagcagacagaactcggtgcagtcaacgtgatgacaggtatctacaccggtcgttcgcctaaagacaaatacatcgtaatggatgccaattcaaaggacactgtatggtggacttctgaagaatataagaacgacaaccacccaatgtcggaagacgtatggaacaaggttaagactatcgccaagagcgagctttgcaacaagaacctctatgttgtagacggattctgcggtgcaaacaaggacactcgtatggcagttcgtttcatcgttgaggttgcatggcaggctcacttcgttacaaacatgttcatccgtccaacagaagaagagttgaagaacttcgagccagatttcgttgtttacaacgcatcaaaggcaaaagttgagaactataaagaactcggactcaactctgagacttgcgtagccttcaacgtaacatcaaaagagcaggtaatcatcaacacctggtatggtggtgagatgaagaaaggtatgttctcaatgatgaactacttcctgccattgaagggcatcgcatcaatgcactgctctgcaaactgcgacatgaacggagagaacacagcaatcttcttcggtctttcaggaacaggtaagacaaccttgtcaacagatcctaagcgtaaacttatcggtgacgacgagcacggatgggacgacaacggcgtgttcaacttcgaaggcggctgctatgcaaaggttatcaacctcgacaaagagtcagagccagatatcttcaacgctatcaagcgcaacgcacttcttgagaacgtaacagttgatgcaaacggcaagatcgatttcgcagacaagagcgtaacagaaaacactcgtgtttcttacccaatcttccacatcaacaacatccagccgggttcttctgcaccagcagcaaagcaggtaatcttcctgtcggcagacgcattcggtgtattgcctccagtatctatccttactccagagcagactaagtactacttcctctctggctttacagctaagttggcaggtacagagcgtggcatcacagagcctactccaacattctctgcatgcttcggtcaggcattcttggaattgcacccaacaaaatatgcagaagagttggttaagaagatggagaagaacaacgctaaggcttacctcgtaaacactggttggaacggaacaggcaagcgtatctctatccgcgacactcgtggcatcatcgacgctatcttgagcggcgacatcgacaaggctcctacaaaacagatcccgatgttcgacttcaaggttccgactgtattgccaggtgtagcaactgaaatccttgacccacgcgacacttacgctgatgcagcacagtgggaagagaaagctaaggatttggctgcccgcttcatcaagaacttcaagaaatatgagaacaacgaggcaggtaaggctcttgtagctgccggtccgaagttgtaatcagaacttaaagattcaaatatcggagagcgcgtccaattgagggcgcgctctctttgctttttgtggaaggactgatgcaataaaacgcgatggtgtgcgtttaaacattagaataaaagtatgcttttctatgagactcaattttactaagatatttcttgcagccgcaatcgtattggctgccacagtgacatcgtgtaaggctccgcagtcgttggcatatttcgagaatgccgacagcttgaagacagtcggaacaaccgcactcgactatgccgttaaaatccgtccggtcgacgagctgataatcacggtcaactccattgtgccggaggcaacagccgcctacaaccttccgctcgtcaatccgtcgcttgagggagaggtgggtgtgtcgtcgacaccgcagaaccagacctatattgtcaatactgacggggaaataacaatgcccgctatcggcaaaatccatgcagccggaatgactaccaaaggcttgtgcgaatatctgacggaaaagatttcgaaggaggtcgacaatccggtagtccgtgttcagctcgcaaatttccgcgtcaacgtgcttggtgaggtgaaacgtccgggagcaatcgaagccaaaagcgagcggttcaccatttttgacgcgcttgccgctgccgaggatatgaccgaatacggcgaacgcacaaacgtgatggtgatacgcgaggaaaacggacaacgcacctaccaccgcgtgaatcttaaagatgcgaaaatcgtagactcgccatattactatcttcagcagaacgacgtggtctatgtgcagcctaacaaaatcaaggcaggcaatgcgaaatacagccagaacaacgcattcaaggtgacagtggtttccactgttgtcagcgcagtgtcggttatcgcgtcacttgtaattgcattggcaatcaaaaaataatagcgaaaatgctcaatatccatcgggcatatttctacgtgttcttcgtcagcgtgctgggcttgtttttggctccgcatttattgtcgtttcttgacgaattgtgtctgttggcatttgcagtgctcgctgtcgtcgacatgacgttcaaccgctgcttcggcaagtataagttgatgtttgtgctgcttggcgtgatggcgttgtatttggcatattctcttgtcgcgtcaccatacaatataccgaaggcgcagattaacgactttattgctcagtgcaagccgctgatagctttttcagtaagttatgccattgcgccgcagttcaccgccaacgagaagtgggtgtcgaaaaaggtgtgtattttcttggcgtttatggcatttttcgtcatcgccgccgacatctacgatgtgactatcttccatatctactatggcggtctgacttgtgtgggctgtgctatggtttatttgctgatgtcgtatgacaacgacaacccacgggcatatacacggtcggatcttatatggacctgcgtaatcctgttgctcggactgatatgcacccgctcgaaatattatgggtttgtggtgctggcattctatatgctgtttgtttatcgtcctggcacggtcaatttcaaaagtgtgcgcaacgttgttgtagccacactcgcattcgtgcttgtggtgcttgtggcttggaaaaaaattgaatactattttataaccggaaattccgacacgttcgaccccgacgtgatggagacctacgcccggcccgtgctgttcggcggaatggtgcttgtgcttgccgaccacctgctgttgggcagcggtttggctacatacgccacctactcgtcagggcctgatgtcagttactcggatttgtactatgactatggcataaacctgctttgggggttgtcgcccacttatggtgactttatcgcagacactttctatcccgagcttgcgcagttcgggttgttgggaatattcttctttggctatttctgctggtggatatggcggaaataccgcatcgtgatgcgcactcatcattatcagttgtttggaattggagtgatgtcatttgcgttccttgccattgacggtacagctggctgcgcggtgcttcaagcatcagggtcgcttctgatggcagtgatgggaattgtcgccgcgcaagccaaagcggtgaccaaagaagaggcgaaagcgttgctggcgcgtccggtgacagagttttatgataataaaaaagaaaaaatagaatatggctacaagttctgacaaggtggatttcagccgtttgcgctatgaaatccgtaagcattggtggtggtttatcgcctcgtttgcagcgatgatggcaatcgccgcagtctatatgcttaaaaacaatcctgaattcaaattccacgccgacattatgatcgaacaggaagaaggcggcggaatgggcggcggaatgatgcagatgatgaagcagttctcgatgggttcgttcggcggcggttcggtagatgatgagatggcggttctgcagtcgcgcagcctgctctgcgaggcaatcaacaagttgggattgcagtatgactacaagggtgttgacggaatgcgcaagctgtcgctctaccgcaagtcgcccgttgaattgtcaacgaatgttgacctcgacacgcttcaaagtggggcgacattcaagattaatctgcgttctgacggcaagattgacgtcaaggtgaaaggcaaatggttctccacgctgttcaaacaagacggcatgacattgccggcaacggtgaaacttcccgacggagcgttcaccatccgccgcacggcattttataaagccggggaggagcgcaagcttacagtggaagtgaacggcaccgcacaaacatatgacgactattccaagatatactacgccgacgtgccgtcgctgaaatccaatggcatcacgttattctatcaggacgaggacaagcagcgcggcaaggatttgctcaacatggttgtggagctttacaacatccgtcgtctgcgcgaggagcagacaaaggcttcacgggagatagcctttatcgacgaccgtcttgcgtccttgacaagccaattgtctgagtcggagaagcagcttgaggagttcaagaccgccaacgatgttaccgacatcgccgccgaggcgaaagttctgctcgagcaaacatcgaaaaacaaggcttcgattgtgggcttgcagacacaattgtcgatattcgacatgatttgcgagttccttgatgacccgaagaataagtattccatgattcctgttaccagcggacaggactatgaaagtgccgcaaaatcaattgagtcctataatcagttgattcttgaacgcaccaagcttgacatggcagccaagcacgacaacaaggctctgcaggctctcaacaagcagattgacggtatgcgcggaggtgtgatagaaacgatgcgcaaggcgcgtgaaagtgctgagattgcctacaacgacttcgttcgagaagatggcaaatatgcgtcgaggttgaaacagttgccgtcgcacgagcgtcgttatgtcgatctctaccgggatactgaaataaagaataatctttacattttcctgcttgagcagcgcgagtcgaatgcgttgaaatttggagtgcaggagataggccgcattattgaccccgcttatcatgaagttaaaaaggcttggcctaagggctcaattgtgtttggcgcggctttggttctggcaatcataattccgttgctgattctcatgctgcgcgccatccgcacaaaacggataatgattcgtcaggatttggagaaattgaccgattttgagattgtaggagaagtggcagacaatgagctggcagggatgcgccgagtgcgcgaccgtctgattgcttccgaaggagtaggcgtggtagccatagcctgtgtcaagtcggagtcgggaacagccggcattgccgccgctctcgccacctcgttcggtaatgctttgagaaaggcggtagtggttgatttgtgcggaaattcaagcgcggcagccactcttgatgactatctcgttggaaaagcgacgatagacagtgttgtcggcgaaaacgcaggagggtttgatgtaattgcgtccaagggcgaccaatcaatcgatttgattgcttcggaacagtttgctgtgcttgtcgacagcctgcgcaagaattatgattatgtaatccttgcaggcgacgcatttggcgactatagcgcgttcagcgttgtagccacaatggcagaccgcatgctcggctatgttgaggctggtgagcttagagaaaactttactgaatttgacaatgagttgaaggcactttcgttgccgagtggatatatctttcaaaaatagttatgagagtactgattgtaaataagttctattatccgcgcggcggcgactgcgtgtgcgcgatgtcgcttgagcgactgctgcgtgagcggggacatcagacggcggtctttgcaatggactatccggacaatatagcaaccgatttcaatcaatattatgctccggaggtgtcgttctccggaggaattggcggcaaattggcagcagcaaggcgcatattcggcggtgctggtgttaaggcggcatttgccaggcttctcagcgatttcaagcctgacgtggtgcacttcaacaacatccactcctatctgtcgcctgtaatcgtggaaatggctaagaaattcggagccaggacagtgtggacgatgcacgattacaagcttgtatgtccgtcatacagctgcctgaacgatggcaaggtgtgcgagcaatgtatagaaggcagcaaacgtggagtctattccaaccgttgtatgaaaggcagccgtgcggcgagcctgctggcatggcttgaggcggaaaaatggaatacgaagcgcttgcagcgcgccacggacacgtttgtctgtccaagcgagtttatggcatcgaaaatgaagcagggaggctttgatgagaaaaaaatcaaggtggtctgcaactttgtcgatccggagaaggttgaaaacatcaaagagaacaccgagcgtaaggactattatgtgtatgtgggacggctgtcggcagaaaaaggagtggagacgctgcttaaggccgccgtgcagtttcagataccattgaagatagccggcggcggaccgcttgccgaaggtttgaaatcgcgctacgggcgttgtgacaacatagaatttcttgggcatcagaacgcagcgcaggttaaagaattgctgggaaacgcacgcttctcggttatgccgtcggaatgctacgaaaacaatccgttgagcgttatcgaatcgttgtgtctgggcacaccggtggtgggcgcgcgcattggtggaatccccgaactgatacaacccggcagcggaatgcttttccgcagcggcagcgttgactcgcttgccaacaacattgccgcggcatgggagtcgccgttcgactatgcggcaatatcagcgcagtcgctgccacgcttcagtgccgagcgctatcttgacagcgtgctggagatatatcaaggatagaaggccaattggccggatttacgcagcaggcagcctgtcagaggcagcctgctgtcgttttatgccgaaaatgaattgggttaatttatattttgcgaggatatagcggtaaagaaccataggtccggcaacgcctgctgatatgacaagcactgcgccgacggcaaaaaacgggtcgtcaagcagaatgggcgcgaatttttgtaaggcagcctttgcagcgccctcgaatgtggtgtggaacaaatagattatatagcttgtcgccgatattgtcagcaaaccattgattttttttgctcctcttgaaatgatgtcggacaaataaattattgttgcaatcccgacaaaagggatgactgaatgacatgcgtcaaatcttatataaaagtattcaagcgcggcaaatgacaggcatacagcccaaaacggaatttttacggatgttgcaatcttgctccagtcgcaacaaacagcaccaagcataaaaaacaccaacatgctctggaattgtttgaaacaaaacacttccggcagaaacggaggaatgcagtacagaagcaatgccgcaccaaggagcaataatcttttttgtttcgtcgcaaacagcggcgcgatgacaaacatccaccacaaagcccagataaaccataagaaatatcccgcttcaggaaaatacagcatttttatatatgcataggcagttactggattctcaacaaacgcatgcttttctgtcagcatcttgattgagatgacaatcacagaaacaacgacatacgggagcatcaaacgcttcagcttcttgaccaaaaacttcgagtatgactctccttccttttttgtcgccatatagatgaagccgctggcaaacatgaacaacggcatgtggaaagaataaatgagtttgttcaaacattcataccagaccggagagttctcgggaaagtaatggcctacaaccaccaggacgatgcataaggcttttgctatgtcgaatggaacgattctttgcatattgatgaaaacaaatagtaacgttgtgcaaaggtagtgaattatcatctaaacctaaattagtttgtttgggaaaaaataattacctttgcaattcgttatacaatataatggatacataaaggcgcgtatagatatggcaaaaaatatagtacaaggcagtttaattactacattccgttgcaatgctaaatgcaatatgtgcaacatctggaaacatcagacacgtccagaagaagagattgatgcgtcctattatgagaaactacctgctggactccgtataaatatcactggtggagaatgcaccatccgcaaggacatagataaaattttcgagatactttatcccaaatcatcgttgcttgagttaagtacaaatggctataatacagaaacgatagtcgctcttgccaataaatatcccaacatcctgattcgtgtcagtgtggagggattgcctgcattgaatgacaaaaaacgaggcacgctcaacggctttgaccacgctttgcgcacgatgctcgaattgaaaaaaacgaagtgcaagaatatcggcttctccgtggtcatctcgccagacaattataaggatttgctgcatctttatgaactttgtgtcgctcttgacgttgaattaggtaattctgtggtgcataactcatggtatttccataaggacgacaaccaattggagagcgcggatgctcttgccgcacatgaggagtttgtcaaagcaatgctcacgtccaaacgtcgtggcttgaagaaccggctgaaagactatggacgcgcatatttcaatagaagtatccatcgtcgtcttcgtggggatgagccaggatatcgtccaccatgcggtgcccttaccgatttcttctttatcgacccgtggggaaatgtgtcgccatgtaatggttctggtgaagaatggattatcggcaatatcaaggaagacagtttcgagaacatcatgaagtcggaaaaagcgaaaaaggctttggaattggtgaagaactgtaagcgcaattgtgcgtttatagtaacagagcgtcatgatatggtgcgtcgtccgtggattccaataaaatggataatcaaaaacaaactgcgtatccgtcaaggaaaagatatttgttgggactaatttgatgtcaatatgagaattgacgtcataggaacaaggggcttccctggaatacagggcggtgtggaacgccattgcgaacgattgtatccgcaaatgaagggtgtgtctgttcgggtgtttcgtagaaaaccatatgtcaagacacagcaaagtcagtattccggaatttcattcaccgacctcccttcaacacggattagcggatttgaaaccgtgctgcattcattgcttgccaccctgatttcaatgttttctaaagccgaaattgtccatatccacaatatcggacctgcgatgtttgcccctcttttgcgtgctgtggggaaaaaagtggtgcttacttaccatagcgcaaactatgagcacgacaaatggaatgcatttgcaaaagcagtgctccggctgtcggagcggattgcattggcgtcggcctcgcagattatttttgtcaacaagttccagatgcagagatattcagaatctgtcaggcgtaaatcgacatatatcccaaacggtattgttccgatgagtccgtcgacaaaccatgactaccttgacaaaataggaatctgtccgcaaaaatacatactgtcagtaggcaggataacgcctgaaaaaggcttcgacctgctgatttcggcgtataataggcttgatacagatgtaaagcttgtcttagccggggctcctgaccaggattcaaaatatctggaagaattgaaatccattgccggctcaaatccaaatgtggttttctcggggtttacagatggcgacaatctgtcgcagttgtataccaatgcattggcttatgtcctgtcgtcaagaatagaggggtttcctcttgtgttgcttgaggcaatcaatttcaatttaccgttgctcgtttcggatatagaggcgacgcatcttctcaagctgtcggctaagtcatattttaaggcaaatgatgccaacgcgctttgtgataagctgtctgaattcttgaccagcggcgacaagggagaatataagtgcacggaagaagattctgccgactattgttggggcaaaatagcagaacagacaatagccgtctataaaaaagcaatgcggaaatgacggaaacgacaggccggggaaagcaatttctgaaatccgtaggaatatatgcagtcgggaatatcgggtcgaaactgattacgttcctgatgataccgttgtacacgtttttcgtcgagacgtcggagttcggttattacgacctgtgtcttacggcggttatgttgcttacgagttttgcttcgttgcaactccgcgacggggcgttccgctttttgattgacagcaagactgacgaggaaaaaaccgaggtggtcagcgcaacgatgaggctgctgagccgctcgttgctcgttttcatgctgttgtcggcgattgtgtcgtttgtttatccaataaggtgcctgtggctctcgttcggcttgttggtctcgatggcgttgattgaagtgttcgggcagatggcaagaggagtgggcgagacaaaaacgtttgttgtcagcaacataatctcggcattttccataggcgcgctcagcgtggtgtttgtagtgtggtgcggatgggggataacgggaatcttccttgccaatatttttgcgcgtcttatagccgttgtgtatattgaggtcagggtggggttgctgcgcaagtatttcaagcccacattgaaaaatgtaatgcttacaaaaaaaatattgcgctacgttctgccgttgttgccgacgataatgtgctggtggcttaccacgagcagcgaccgttttttcatacagcactacttctcattgtcggacaacggaatttatgccgtagcagcccgttttggagcaataatgcagattgtcggcgcaataatttttcaggcgtggcaggagatggcgttacgacagtacaatagtccggaccgtgacaagtttttctctgagatggtgaatctcttcataatgtttatgtcgatagcggcattatgttttgcgtttggcctgaagatagtatatccatttatcgtgagtccagaatatgttgcaggaatagtctatgtctttcctataatagcctcttcggttctttatgcattgtcaaacattcttgaggtcggttatcaatgttcttttgagacagggcgagcgttgcttggcgtcggagtttccgccgcagtcaacattctgctgaattttgtcctcatccagacgataggaatatacggagtggtggttacctcggttgtcacttatgcagtgcttcttggattccgtatccacgattcccgccgttatttcaaaatcaatatctcgaagatgtcgattctgaccgttgccattggagcggttggtgtatttccgttttattttaccgactcggtgcttgtggatgtggtcatgataatgataggattggcggcaatgacgcttgtcgctccaagagtgctgcgctctctgagacagtcaaaacgcggaagttaaatttcgaataagtttgacttcaatcgatgccgttcctggatttcagccatcgttattatctcgtcttttgtcagtttcgagaagacatagtctttcgacagaatggcacttacgaaatctttgatttcgtagcgcagaccgtcgcccagatacggatagaaatattttttgtttttgttttggtcttcgtagcgcacttcaaaatagtcggtcttccaccacggagcaggcacatagacatatccttttgtgccggcaattgtgaggttgccttcagtctttacgcccaaacccacctgaagggaagctacggcatggtcgtatctgaatattgctttggtgaaaatgtcgacaccgtctttcatccgcgagtagaacagaacgtccttgtaatctgtgccgaaaaacttaagaataggcagcatcgtgaagcatccgttctccaccatgcttcctccatagcgttttcctccgatgtagtcctcgtgctcgagcagggtggtcgatgtggcgttgatttctactatctcgccaatgatgtccgacttcagcagggagaacaggtgtctgaacgccgggcagtaggcagttttcaagccggtcatcagcactaaccccttctcctgtgccatgtcgtatagtttctcggcttccgctcggcttgtgacaaacggggtttcgcagaagacgtgtttccctgtgcgcatcgccgtttcggcataatcaaaatgagtgtagtgaggcgaggcgatgtagacagcgtcgcagacttgaagcaactcttcgacagaatccgcgcttgtcggaatgttgaactttttgcagaaatcgtcgcattcggatttcaagggattgtaagcgcctgtgattcttgcgctgtttacaaacgccgactctgatgcaaaccgagaagcaatacttccggtgccgatgattccgatgtctgccactgggcggtgtttgcggatttgtgttgacgaaatgccttcggtgcgcgggaggtataccactttgcagaattcattgagatagtcgaaatatccttcccaatcagatcctatggcaaagatttcgacaccgtatttcaggatgtcgtcgattttctgccctttgtattcttcgatgactatgaggtcggcaagtcctgtggcacggacggtgtcgatgcgttccattacattgttgcacgtgttgatttttccacgttccaaatcgaacgtgtcggttgtcacgccgacaatcaggtagtcgcccaacgcttttgcacgtttcaacaggttgtagtgcccctcgtgaaacaagtcgaatgtgccgtatgttataactttcctcatagcgtttttgattcagatggttatttgtccagttcaaggagagcgtccataaacgtctccatatatttgcgttcgcctatcgacactctcaggcatgtgccgaattcaccgacattagggtatgattttatgagaatttttttgacggatttcatctgtgccacaattttctctgcatcggtcttaggcttgatgaatatgaaattgccggcacagcccttgtgtgcgtatccgttgctgtcgagcgactctgtcagatattttctgccttcgttgaatttctcaatcaaattgttgagcacatcagggttggagattacattttcggcaagcagcatggcaaaagcattggtgttgtgtggagtgcatagtttctgaaccattttcacaccgtcgggccatcctacgacatatcccagccggcagccagccattgagaacaatttggagaatgtgcgggtgacaaatacgtgttcttggttgagggcgtatttgatgaatgtttttggccagaagtagtggtatgcctcgtcgaccaagacggtcacctgtttttctctcgccctttccattatcctctcaaattcctcgtcggagtagacatttcccattgggttgtttgggttcaggagaatcagcaactgtgtgtcgtcggttatttccttgatgatattgtccacgttcatgcttaaatcctcatcgtaaggcacctttatgaagtttctgccatacatttccgaatatacctgaaacataaagtatgacggcacgacacccacgatgcgtccgcccggagctgtgaacgcctgaatgatgtagcggatgccttcggcagacccgtttacaaggcatagatgagaaatgtcggtgccaagaaattcagccaacttttctgtgaacggcaaggtttccggatattgagaaaccaagcgtggcgtgaccttcgccatgacgtctttgatgaaatcttcgggaagtccgcccgggttctcgttaaggtcaaggcgcaagaacgaactgcgctcgttctggtcgaatattctgtgaaggttttcgattttattgtctaagtagtacatagctgaaaaatgttttattgtttccaccaggcgttgaagatgtggtttgccacctgcttttcttttggaggcaattgtctccagtcgccatagcaattcgtcaaatattcatcgtaatcctcgaagccgaaaaattcccggtcttcaaacggcattaatttcagattgtcgaaaagggatttcttgaaagggaatgaccgggattcgaacaagccttgacaacattcaaacactcgtctgaagcctttgccgttgtgctttactgccattttctggagtgtctgggcaaggagtcttgatgataccgccaagagggcgagcttgcccattgtcaatcccagctttttgcatatactccattcgctgcgtggtgaatatgtctttattgcatatagtttttgtagccttacgcgagtcttgttgtaggcgttccattgctgttcgtcgtcgggcacgtcgtcaattggaaaaacatcgatgttgacaccaatctgtacggtttcgctgactgtttcgcgcaatacggttcggttgtcgaatgctttgccgtaggctctgttccatttgctgtcgcgttcaagtgagatgaactgatattttccgtttaatgtttcgggaaactcgttgaccaatttgttgtagtcttcgcgcggcaggtagatgtcgatgtcgtcgtcccagggaatgtagccctgatgccgggcgcatccgagcattgtgccgcagcccaatgaatatctgattccgtgctcaatgcaaaatccgtgtacagcagaaagcacgtccagttgaatctgtttaagttcgtttatgtcgattcttttcatatggttcttctatgaagaagcgatgccatgcatcactcatgttttagtggctacgaagataacgaaaaaaaatcaatttacatcgggcataaggattaaagattcgcaaaaacgaggcggtggcttacgaaaacagccttgctcaaagcaaggctgttgatgtggagcatagcggactcgaaccgcttacctcaacactgccagtgttgcgctctaccagatgagctaataccccttttctccggtgcaaatttaaaatgaaaatttagtactgcaattccgcagcgatatgttttacagcagtttttgtataaaaaatgagccgttacgtctataaaaagtcattaaaggagcgtgtttttgtaggtgaatggtgttaaatagtgagaaaagtcgcgctaattgctttatttttattacttttgtagtggttttggaaaaaaattaatacaatataaaatactatttttatgaagaaactcttactcctatttcttcttgcctttttggcggttcctatcgccaatgcggaagagagcgtggtcacattgaccacaaccctcgacgagggagcaagcatcaagctgtatacttgggctgactctatggacgatgcgtttaccatcgactggggtgacggcgtcgagaaaatctacaacaaagtgaagcctagctggacttacggctcggagatcaccggcaagcttggcgcaagcaagaccatcaccatcaagggtgacatcacttatcttgagattaaagagatgcagatttctgccgccactttcgccaacacgaagctgaaagaggtggatatggaaaagaatcagctgacagatttcaatctcagcggacttccggaggttaccaaattgagtcttaacgaaaactctattgtaacattctcatcgaccggcaactctgttttgaagaatctcgggttgaagagcaacaagattgactctcatcagtttgagatttcttcgttggcaaatagcctcgagcagctcaatgtgtcggaaaacggagagaattttgtggcgttgaaccttatcaatttcgacaagctgcagtacttcactgccaacgacaatccggagcttaccacagttgtgttctatgacggaagcaccaatttgaagcagataagcatgaacaactgccacattatgcatttctatgccatctcgttgcctaatctgagctcgctcaacctttccaacaacgcgttgctcgattttgagaacggcacatatcccaaactgtcgacgctgtcggtcaacggcaactatctctctgagattgacgtgaccaagtttccgaagctgttttcgttcgactgctccagcaaccagcttacagacataaatgtagccaacaatccggaactcaattatttcaactgcggcaacaataaattgacaagtgttgatgtgtcgaccaacaaggagctcggctcgctattggtcaacggcaactcattgtcgcgcatcgacatctccaacaatgaatcgctgggcacaatcaacatcagcgatacgcagataagctatatcgacttgacgaagacgaagttcctgcgcgatttccgtgctgccaacactctctgcccgttcttctatttcaactatgtgcttcctggcggaaagttctcatatcttgatatgcgcaacaactcgaagatgacaggcaactcgatgacattcacgctgcacacactgccggcgttgaacaaggatgcctacagcaccaatctttttgttgaaggctcgaatgccgagactgccgacacagaatacgtgacgagcaacgaaatgaagtggaaaatcgacgttacaggcgacggcactgccaattgcccggctgtgcctgtgaccgtcaaggctaacgacacaggcgagaaggtgaatgttaccggctatttcggcggcgacatctcaaacgagcgcaactataactttactaaatattccacaacccacggttcattctatctttcgcagtgggctggcaactattatcaggaacttgccgatgtgacgacaactgcaaaggcaggcgtcgccatcatggtaaacgacactcctgacgaaggctatatgtttgaccacgtcgttgtcaacggcgagagcatctatgagaagacgtttgtggtcaacgaagagtcgacaatcgaagtggtgttccgcggagagacaagcactatctcgtttaccgctcctatcggtcagtcattgtcgtttgcgctggctgccgaaggcggtaataagccgacagtctcaatcgactggggtaacggttcaagccaggaatatgaggtgagcagcaagaactatgtgcgtatcgacggcgtagcggctgcaccggccgaccagtcggcaacaatgtcgacagtgacaatcaagggtgaggtgttcgctcttaaccttgaaagctacggcgagtttggcgaggagatgggactgtggaacaacaagatttccggcatcgacctgtcgaagacaaccatactcaacaacttgaacctttacatgaaccctatccgtacgctcgacgtcagcggacagccgttcctcttggagctcgacgcaagctactgcgagctgaaagagattgacgtgacccacaaccctgagctccgctcattctcttgctacggcaacagcctgacgtctgtcgacctgtcgaagaacccagagctgcttgtatgcaacgttaaggtcaaccagcttgaggccatcgacctgtcgaacaatcctaagcttgaggaagtcaacgttgctaacaactacctgacagccatcgacctgtcgatgcttccagcacttggcaaagctacattgatgaacaacgagctgaccacagtcgatctctcgcacaatccagaacttatagatgtcagcgtgggcggaaacttgctcacctcactcgaccttacagccaacaagaaggtgcagatgctctcgttcaatgacaacgcaatccgcagcctcgacctcagcgccaacaccgacctttacaagattgactgcggcggcaacggtatgactgcttgcgaactcaacgacttcttctacacacttccgcagcgcgcgcaggtggttgaagagcaaccgtctgccaatctgacgctgctcacaggcacggaggctactcctaacaatgcagaaaattccgacacatcaatcgcttctgagaaaggttggacgccaagcatgagcggcaacggctctggatgcgacgtggcacgccttatcatcgcaccgacagtcaatggctctatcgagttgaaagacgctgaaggaaaggtgatcaactctggcgacaaggtgaaacgtatgtcacctatcaccatcaaggcaacgcctgacgctggatacgaactcgacaaaatcacagccaacagcaaggtgattgaaggtaatgagttcaagatttcgcgcaacactacggtgacagccctcttcaaggttatgggcagtgtcagcgacgtggcgctcgacggtgtggctatagccggcgccgacggagcagtgcgcgtgagcgtggcaagcgacagcaaggttgaaatcttcgacgtgaacggccgtcgtgtgtttgcaggcaatatctcagccgagacaacaatcccgatggcaacaggctattatgccgtgcgcgttgaaaacgccgacggctcgatggcacgcattgtcagtgtgaaataacacttgcaacaaccctatatgaggcgggcgcaccaagaaattggcgtgcccgccttcagtttataggctatgtatgcgtcccaatccggataaaagcagtaattttgcagctgattgttttaggaaagaaaaaaattacagaatggtttatcaatgtggaatcatcttcggcttccttgcgataggggagctgatagtgtggctcacgggcatcaaactgccgtcaagcatcatcgggatgctgctgctcacagcgtgcctgcagcttaaatggatacgcctcagatgggttgagggtatagcgaattttctggtcaagaatcttggattcttctttattccgccaggcgtggcgcttatgctccacctcaatgtcataaaggcgcagctgctgccaatcattgtggcatcggcggtcagcaccgttgtggttatcgtggtcaccggctggattcaccaactggtaagaaaatatcaacatcgtcaattcacgaaacgtcatggaatacattaacaacccatacttcctgcttgcgctcacatttgtggtctacggctcagcgcaactgatacagcgccgcacgcgcttttctttgttcaacccgatacttgtaaccatcgcgctgatcatagtgtttctgatggcttacgacatcccttacgacacctacaaccagtatggccgttacattgagttctggctcaagccggcagtcgtggcgcttgccgtgccgctctacaagcaactgtcgaccgtcaagaagcagctgcttcccataacgctgtcggcgctcggcggctgcatctccggcatcatctcggtggtgtgggtggcagatgtctgcggcgcgtcgcatgatgtggttatgtcgcttgccgcaaagtcggtaaccacgcctatagccatggaggtgacaagctcgcttggcggcatcccgtcgctaacggcggcggtagtggtcagcgtaggcatcttcggaggcattgtgggctttggcgtaatgcgctggtcgcgcgtccatagcccgatagctcaaggcttgtcgatgggcacggcggcgcatgccgtagggtcgtcgcgggcgtttggcatcagcgaccgttatggcgcttttgccagtctcggactcacgctcaacggcatcttcacagccatcctcactccgtcgattctgcatatcgtcggatatttctaaaggctggaaagttgaaggcacaaaaaaagattgtatcaactgatacaatcttttttttgtgcgcatgaagggactcgaacccccacgacttacgtcactagatcctaagtctagcgcggctaccaattacgccacatgcgcaaatcgggtacaaaagtaatgacaatttttcattttggcaagacttccagtcgaattatttcaaattgacgtgaaacttgtaacagcgagtcgcgtcaaaccgcggcagcacaacgagttgcacgtccttggcattgtcggtcagcgactccgtcccttcgccaaccgaaagtcccgcctcctgcagagccttcatcgcgcagcttcgtgccgtgtcgggcgtgttgttgtcgtgacttaggtggcaaagatacacgtatttcagcctttccgaggcaatctccttcaagaaagccgccgttgcggcgtt

SEQ ID NO: 468 - DNA, 31629 bp, unidentified
  source 1..31629: mol_type = unassigned DNA
aagccgaaatgtatccggaaacagctactacgactgaagaccgttttgtgaatttcattttgaatgaattggcacgtgagttgaatcaagagatggtttattatgagaatttgcatcattcagggtggcaagctgatcgtataatctatcatgatcaattagcttcacctaaacaagggttgtgggataattccgataatttgattaatggtattgggcagacaggtaatggtatgggaatgtttgaaccgtattttacttttaagccttttgcccagactatgcttgacttgcttacagatgaaaatggtgtgttgttagatgaagctgctaagaaagcttaccagaattatggttattgagatgccgctgtaggtgtttaatatttatagtaaaagtggaaagagttattattactttttccacttttttatgggagcagtatatcagtgaaaaaatctaggatatatagagaatagttggtttaaagtgaacaattaaccatataaatggataaaattctatttgatataatttctctcatgcataaatttgtcgtatcagataaaaaatgacatgctatgagaaagacatttttagctattacattatttttagcttttagtaaagccgcattggctcagtttggaaactgcactgcatcggaaatgcggacttatgtagatagtgcgaccggcaatactatcactatgttgaccgacacgatgaagaatgaccgttttctttatcagactgatcccatgtggacggctgatggcaaatacttattgttcaggtcttccagccgtggaaatgacaaagaggtggaaagtacgcttcctaacggagaaaaacgtaaatggactcctacacagatttactttattgaaatggccaccggtaagattattcaagctacggaaggaccgaacttgggcagtgcttttttggctaataaaacgaatcgtatgtttgtcagccggaaagaaaaagaaaactggaacatgtatgtaatggacttgaataaattctttgccgatgtaaaacaaggaaaagtaggtaaaccatccgcttatgaaactttcataggaactttccccactgagatgggacgtccgggaggatatgctgtggattgtaatgatgattatgcctacataactgttgagcgtgagggtacggaagaggaaaaggaacgtatgatgaaaaacgctttcctgcctgaaagtaaccagccggtaaagataaagccaactctttgcggaattcgtaaaatgaatctcagtacgggagaagtaactaaggttattgatacggagtttaaaacaggacatatacaagccagccgttttactccgggtgaaatcgttttttgtaacgaaaccggtggcgatgcccatcagcgtatgtggttttgcacggcagatggaacagtctttaaacctttatataaagaaactccgctagattgggtgactcatgaaacttttgcaaccaaagattttgtatatttcaatatcttaggatttcagccgcgtcttcgcaaacaggcaagtggcattgtgcgtatcaatttgcgtacggatgatgtagagttgatagggcaggtggaattagaaaaagaccgccaagcgattgacggccaattggtaggaagaggtttctggcattgtaatgccagccgtgataataaatgggctgccggagatacttttggaggaaatgtatggttggttaatgtacagaccggggagcgtcattggttggcgtcggataccaagatgaaaccggatcatgcacatcccagctttagtccggatggtacgaaagttcttttccaatccggacattttacaaatggaaaaagattgaatttaatgatggtggatatttcatcctttaaataaagtaaggttggatatgaaaaatacacgtaagatattattttccgcagctttgttgtcttcagggcttacgatggcccagactacaacggcagagaaatcgcccaatgttatttatattatggcggatgatttgggaataggtgatttgggatgctatggtcagcgtcagattaagacaccgaatattgatgggatagctcagaacgggatgaagtttatgcagcattattccggttctacggtcagtgctccgtcccgttgtgctctgattacaggaaagcatatgggacatgccgcaatcagaggaaatgcaaaagtggcaggttcggatggattgttatatgaaactccgcttcctgccggtgaagttaccgtagccgatatttttaaaacaaagaattatgttaccggatgtgtaggcaaatggggaatgggaggaccgggtacggaaggtatgcccggcaaacatggttttgattatttctacggttatctggggcaacgttttgctcatagttattaccctgagtttttgcatgagaatgagcagaagattatgctggatgggaaatattattcgcatgacttgatgttggaaaaggctttgaattttattgatgaaaatgcgcagaaacctttcttcctttatttttcaccgaccataccccatgcggatcttgatataatgggggaagcgatgacggagtatgagggggaattttgtgaaactccttttggaggaagcagagacggttataaatcgcagcaaactccgcgtgcggcgtatgcggcgatggttacttatttggataaaagtgtgggtttgattattaaagagttgaaagagaaaggtttgtatgatcatacgatcattgtttttacttccgataatggagtccattcggagggagggcacgatccatcttattttgacagtaatggtccgttcagaggccagaaaagagatttatatgaaggaggtatccgtactccgttcgtcattcaatggccgggagttattccacaaggggtagttaccaatcatatttctgcattttgggattttttgcctactataggtgaattggtgcaggcggatattcctcaaaatattgatggtatatcttatttgcctactcttacgggaaaaggtactcagaaggagcatgattgtatttattatgagttctttgaatttggaggaaagcaatctattatgacacctgatggttggaagttggtgagactggaagttagtgattcgtctaaaacttatgaagaattgtataacatttatacagatccggcagaaactactaatgtgataaagcaatatcctgatgtggcaaggaaattaaagaatatgataggtggtcaacgtgttgaaaatgcccgtttccatttttaaacaagtaagatttatgaagcaatccttatttttaaagaaatgcagtaagttctgttatgtactttttgcagtttgtggctgtttggcttgtacacagaatcagaagattgaatggccgcaagtgactaacgaaaccaagccttggacgcgatggtggtgggaaggcaatgcggtcaggactactgacttggatacggttatgcgtaagtaccaggaggcaaatctgggtggattagagatcactcctatttatggaatacatggttatgaggaccgctttaaagattttctttcttcggaatgggttgatttgtttctgtatactttgcaggaagcaaagcagttggggttaggaattgatttggctaatgcttcgggatggccgtttggaggaccttgggttactcccgaagatgcgtgcaagacggtgggttataaaacttatcaattgaaagaaggcgaacaattaggtgaacctgtccgatataaggaagaaggctttgtcagattggcagggcatactccggtaaaactggaggatttgaaagaaccagtcagtgcgaatgctgatttacagacattggcattggatcaggtacgatataaaaaggaactgcctttgattatagtgaccgctaatagtgataaaggtgaatgtctcgacttgacttcaaaaataaagccggatggtacattggactggacggctcctcaaggtgactggactatttgcgctctgttccaaggtcatcatggaaaaatggtagaacgtgcagggcctggtggtgaaggtgatgtgatagatcatttttcagcttcggccattgatcattatctcagtaaattcgatgaggcttttaaaggacaggatatcagttatctgaggtattattttaatgactcttatgaagtggacgatgcaagaggcgagtcaaattggactcctgctttttttgacgaattccaaaaatataggggatatgacttgcgtcagcacttacctgcattgttaggtatggacacaccggataagaatgcaagggtgttgtatgattatagacaaaccataaacgatttattgataaatcattattctattcgttggcaacattgggcggcaaaacaaggaaagggtataaggaatcaggctcatggttctcctgccaatattctggatttgtatgcagtgagtgatgtgcccgaaatagaggggcgtgatttggtcagtataaaagcagctccgtctgtagctcatacggaaggaaagaaactctcatcttcagaaagtgcgacttggctggatgaacattttcaatcgaatctgggagatgtaaagaaagcgcttgaccttttctttctgggtggggtgaatcatattttttatcatggcacttgtttcagtccgcaggaggctccctggccgggatggttattttatgcggcagtccattttcatccgaataatccgttttgggaggattttaaatatttgaatcagtatgttactcgcgtgcagtcatttttacaggatggcactcctgataatgatgtccttttatattataacatagccgatgtgatgtctgagcaagggaacagaagtcttcaacactttagcggattggatcgtaatatgttggaatcttcggtcagagaaagtgcggtaactttaacagagaatggttatgcgtgggatatgatttctgacaagcaacttcttaaaactaatattgagaaagaaatgattgtaacgcccggtgctgcatataaaaccgtccttgtttcggcggcgcaatatattccttatgaaacaatggaaaaactgatggctttggctgatgaaggtgctaccgttgtgttttataagggaattcctcaggatatggccggaatgattctttcggaagaaaaacaggctcattttaaagaaatgctggatgctctggactttcatgctgaaggtgctgttaaatgtgctcgtgtaggtaaggggaagatttgtttgtcagatgatattaatgctctgatgaatgtggcgaatgtgggtgctgagaaaatgtatcaggcaggtctgcaatgtatccgaagaaatagtgcgacgggaaaatattactttaaattcttatcttattgacagattgatttgaaagacaaacgcttatagaagttttaaaaagtttcgggtaacgatttggagattgtgctaatttcaatattttacagcctcatactcatgagtataactcttctttgaacaaaggtaagaatattttttggattaaagaaaaatcccgaagggaaaaataaaaaatatttgggagaaaggattggaaaaattcaagagagggaggttgagggattaagtgagggaaatcgcataatcgatttgtagttaccgaaaaaggcatattcgaaatccctgtatattgcttctaccggcgattacacgaccggaaattatattaaaaaatgaccccaatcaagaagtattttatgtttctcggttggggtataaaggttatttgaattgtagccatacctcatatattcaagccgcctttctttaaaggaatatgtagtaaagatttcatttccatatctgcgaaacttggtaacagcatcttttaaaggtgtctgaaattgctggcagttatgtacatatccgaattctgctattatgcgtgtttactcataaaattagactctatatctgcttgcactgattatcactatactatttcctgtaaataacatttgggaatataattggtggcgaccaatatcagcaagccttcaaaaggaacaaccagccgtttgttctttttgatacgtttgtaatatcccactaccccagcatattccccacctgtcacccggtatttttcggcgttcttcacgagattgtcatcatacggtatctgttcgaaaccgtcctccatggaagaagtgagcatgatgaacatgtccatctcttcatccggaatggaagctggaatctgggtaccgggacgatgatacaccatggctttctcatcgagaatcgaattcaaggaagagatatagtcatcatcgcaacgcaggaacatcaacatggcgacaagcggaacccgcctgatcacgacttccccatccggttgcggatagcttctggttttcatcgggatataactctcaatcccgtcacgtgacaatgtggccttgatttccgaaaaacggttatagaaaaccttcagggcataccattttttcatcatgacctattgattcctttttttatgatttccagttccaatcgaacctttcgacatcttcctccacgagcagatctcctgactgtacctcaataaagagcagatcggtcatggccttgacggcatgtctcatgcccttcctaatacagacggtgtctccacggccgattctagtcattttcccatcaagagccagcataccctcgccatcaatgaatgtccagacttcatcgcgatagcggtgagcctgatagcttacgctcttaccggcttttatctttaactgcctggtaaggatctcatatccgtcaggaaaactcaccgtatcgataaccttatattctccccagcgacgctcctcgtacatcgggtggcattgcaagcggtccgcatatgtcttgatgtgctcgctcctccctttctctgaaaccaggatgccatcgccatgaagcggctattaccatgtctttggcaccgatgcacatgacaggtatttccaattcgttgatcacatgggtgttttcagatttctcgtccatcaccacgttaccgatgcaacgctctttcagttcatcagtaagcacgttccatgtgccgagatctttccattccccgtcgtatggaacgacagccacagacttcgctttctccaccacctcatagtcaaagctgatctttggcagttcctcatatcggaggcgtacctcctcaaaaatatcgtatgcgagataactctttacgatgtcaatcatatatccgagacagaaagcgaacacgccgccattccaaaatgcgccatctgcgataaatctttcagcagtggcgacatccggcttttccataaaacgctccacttcatatattccgtctgttttgcgatgcttttgaagtatcacataaccgtatttggcggacggataggtgggctttatgcccatcagtacaagatcagccacattattctgcactgcttccgccatttccgctatagtttgaaaataacgctcttccgtatacgggtcgcatggcataacaatgactgtttcattcttgtcgcatttcgctgttttctccaaataggcggaagcgagacagattgcagggaaggtatccctacggctaggttcggtgacgacagtcacatcctcaccgagctgattggtgatggcatccttttgaaatacacttgtagcgattgtaaccgggcaggaaagtcccgattccttgatctgtcgtagacacgctgtaccatagattccctgcctccgtccggggaaggaagcagtctgaggaattgtttggagcgggattcgtttgaaagcggccacagccttttacctgaaccgccggataagagtatgatttgcatgattatgttgtgaaagttatctttccgccctcatcgggttgtttaagaaatcctcgtaggaaagacggatgccttcctccagttccgtcttgtatgtccatccgagcgaagtcgctttcgaaacgtcaagcagcttgcggggggtaccgttcggccgtgaggtgtcccagcatatctcgccggtgtagccgattatctttgccactaattctgtcagtgcctttatggtcagttcctttcctgttccggcgtttactgtctcgtaccccgaatagttgttcatcaagaatacgcagagattggccaaatcatccacatagagaaactctcgcaacgggctaccgtcaccccagcaggtcacctctttcaagcccgcttccttcgcctcatgaaagcgacggataagcgccggtaacacgtggctgtgctcggggtggtagttgtcattcggcccatagagattggtgggcatcacgctgatatagtccgtgccgtactggcggttgagaaactcgcagtatttcaatccagagatttttgccaatgcgtatgcctcgttggtcttttccagttcggaggttagcaggcagctttcaggcatcggctggggtgccatacgcgggtatatgcacgatgaaccgagaaactccagcttcctgcaaccattgcgccatgccgagtggatgacattcatctccagtatcatgttctcgtacatgaagtccgccaatgccgattggttggcgatgataccgcccacctttgctgcggcgaggaatacatattcgggcttttcttcggcgaagaagcgttccacggcttcctggcgagtcaagtccaattctttgtgcgtgcgtgtgatgatattcgtatatccctggcgttgcagttcccgtacaatggcagagcctaccattccacggtgtcctgccacatagatttttgcgttcttctccattgttttctcgattattttacgattcctttttcgagatattcggcaaggttggttcttacctgttgcgatgcacgttcaacggccacttttgccatatcggcatccaccatgatttttacaagttgctcaaacgatgtcttctgcggattccaatccagttcacgtttcgctttcgacgggtctcccaaaagatttaccacatcggttgggcggtagaagtcgggagaaacctcgacaagtactttaccgctcttgcagtcgatgcctttttcgttttcaccttcaccctcgaaacgcagttcgattccggcatatcggaaagccaattggcagaactcacgtaccgaatgctgctcgccggtggcaatgacaaaatcttccggcttgtcgttttggaggatcagccacatgcactccacgtaatccttggcatagccccagtcacggagcgatgacaagttacctaaatacaatttatcctgcttgccttgggctatacgtgcagcggcaagggttatcttgcgggtaacgaacgtttctccgcggcgttccgactcgtggttgaacagaatacctgaacagcagaacatgttgtacgcttcgcggtattctttagtaatccagaacccatactgtttcgctacggcatagggagaatagggatggaaaggagtattctcattctggggtacttcttctaccttgccgtatagctctgacgtggaagcctgatagatacggcaggtatcagtcagatcacattggcgcacagcttccaaaatgcgtagtacgccggtggcatcgacatcagcggtaaactctggggagtcaaacgacacctgtacatgactttgtgcggcgaggttgtatatttcgtttggctttacttttttcaccacctgtaagatgctcatcgagtcgcccaagtcagcatagtggaggtggaagttaggatgcccttccaaatgtgcaatacgctcacgatagtctaccgatgaacgacgtatagtaccatgcacgtcatatcctttttctaaaagcaattcagcaagatatgatccatcctgtccggtgataccggtaattaaagctgtcttcatataaatatcaaatttgtgatgtattatttcgtgaaactttagtttcgatgatctcatatattttgtaaatgtatctcaacgattcaagcaaaacattactgtaaattccattatccttgaatgcccgttggtgatctcgcaaaatttgtttatggctggacaatccactggtcgatgctcctcctgtacgcattgttacaaaatccattgggatgtatcggagtcgtattttatggacgaatattaatcgtaacagacattcaaaatcagcagcaattttgtatgacaaattgaagccgccgtatctctcatatatttctttgtggcaataaaaactcggatgggcgggcataaagccgagacgcatccaacggcgatgaaaaagtttcgaagagtaataacgggtacatttttgcaagtcattgtcttgtacataatgtatatcgccataaacagcatctatgttaccgtcttcaaatgcagatgccactgttgaaagcacaatatcgctggtataaaaatcatcgctattaagtattcctatgatatcgcctgtcgccattgcgatacctttattcatggcatcatatattcctttgtcttttccgctgatataacgtaatttaccttgatattcaggctctaattcatgtacgatttccattgtgctatctgttgaaccaccatccacgataatatgctctatatttggataggattgtgacaacacactccgcatcgtgtaacgcaaagttgcactgctattccatgtagcagtgattattgatattttcatcagattaaattaaattgattttgggtaaagagtttgattacgattcaaacattacccgttctgcgactttaaccgcaggattcccacgatatatcgaatatggcattaagtctttagaggctatggaaccgacagtaagaacactatgtgaatgcattgttactccgggacaaacagtggattgagcaccaacccatgcaccattttcaataacaataggttttaccatgaggtcaaatgtcgggcgtttataatcatggttaccacataataacatagctccctggctgatacagacattcgaaccaatcgcaacatgggtaagattgtctatccatacattttcaccaatccaagaatagtctcctattgacagattccacggatatttaatattgactgaaggttttattacaactccctttcccattcgggctccaaaaagacgaagcagccgtatcctaaggcttgaagaaggattccaactgcaatttataaaaaaaacatttacgaaataccagataatcgctttcatctttccagcacctatgtagaaccatgaattatcatatttcgacagatttacgctagtcataaacaaaatcgggtttagaacgttcacctaatagccattcatacagttgttgcatttgcattgctatcataggcgcagtatatttcttctgcacaagctgttgccccctttcccccatggcgagtagttccgggatagacatctccatcacttgtcgcattacttgggcaatgttttcgggagtacggtcaatccaccatccacagccgatggtgttcaattcttcccacggagtaccaagactagccatcacaggagtacctaccgacaaggcctcggttacaatcataccgaaattctcgaagtcgctcggcacgaaaagacatgataattgtgccaattgttcatacttatccctaccgttaataaagccgcagaatttaacacaatcttctaatccaagccgtttcgtttcgctacgcagaaattgttcgtaaatttcatctcctttgcccataatcactaattcataatcttgtaaacgaggtagcaaggctaccccataaagaaggttttcaactttctttctggggtgtagtcgtccgaggaagccaaacttcctcaatcgactacaccccagaaaggacggctttttagtcgcaatctcgtttagataaccaggcaaattggccgggttagggataacagctatggcaccacggtatccaaattggcgtacatactccatttcaggcttgcaagtaacatgcaaacaatcagcatgattgatgtccttacgaaaacaaaactgtatcaacggccatttcttccagtaagagcgttttaacgcttccggataaagcattccatgcggcgtgataatataaggtttacgtttatgccttgcaacggaacaagtgatgtggttgcaatacatccataacccattggtgtgataaaggtcatactcattgttttgtagataggaagagatgttctttgaatactcgtacggagttatagcatcatttggtaatgctttaatccaattttcacccttacccatcaatacatccgatttgtttttcacttccaaagtcaacaaatcaataggaaaaccgatattatacatcgccaaaattaagtcatacgtgcaagtggctattccgccatacaatgcaccaaacccagcgatggtttgtaatactttcatataaattgtatgctttaagtttttgaacaaggcccttctacaaaaggagtatctttccctttttccagacagtttattaggatcagcagcctttcggctgcgatatggggattccatagttcctgcatcaaggcggtagaacggctttggatatcttgccatttacgtggattggcaagcaggtactccactttgtcgcataaggaatccaacgctgcaatatcggggcggttgaaactacttgattgcttgggactggtaaataacaatcccgtctgcccatcattgatcaaatatggagaacttcctattccatcgcttgccaccaacacacaaccattggacatgctttcattggccacagcaccccaaccctcgttgcggtcgctggtgaagaggaatatgctgtggcagcgcatcttgaccatcagttcgttgttgggcatgttaccgtaaaaacgaactacatcagtcacacctagattcttcgctagctgtttcgtacgactttcatactccccgctgccgtacatatcgagccggaatcgataccctttccgtttcaaccgttcagccataaggatgggtagttccggatgtttcaacattaaatatcttgaacaccacataagtggtgtgatatttaatgtggaaacatccgagaatgcttcaacatcaactttttccacccgggtgaaatagccccatttgtagcaacgtccctgataagtacccactttgtactggtctgccgccgcaaatgcactacaacaaagtttatacaacggctttctactccaacctccgaaatgataggcgaggaacattttcaagatagcaggtgaaaataagttcaaaactccccgtttcagccatcgctcgctcatatcgaatgacagcagccctcgcttcattcgtatcttttggaaaggcaaagcctgtactcctgagaacacacaacattctgccgtctgtgccaactccattgctttactgtaattctttttcgattgccaagcccgcaacaaataaggccgatcgctataatcatacgagtctcctttccgatgctcggcttgcagattggcaagttccacaaagtaatagttatgtccagtcaaattccacaattcatcagccacatttgcctgatggttgtttagtataagcgagtaaaaaacaagtttcatttgattcgtaaatgctttattcctctatttttgccattgcttgattccatacttcgacaccaaacaatcgttccacaacattcccttgattagcataacgtaacaattcttcatcagataagtctgctatagctcttattccgttatggaactcctctttggtaggtttaaccgtaaaatatttcattccttcaatttgtggataatgaatggtagatatgattatacgattgtgaaacaaggcttctattatcttagaaggaaagttacattgattttccggaaaattaatatctcgtgtacttaattgaaaggtgatatggtgtaaaagttccatgtaaacgttgaaaggcaattgaccgtgccaatggatattgctatgattgttagcgtattgctgcaacattaactcatttcctttgataccggtgatatgtaattcgtattcagatagtttggaaaaaacatcaagcaccatagaaagcattgatatttcctcagaaaggacaccggagagtaaaaaggttttctttatagatttaatttccggtctcgtcttgctgctatatggaacaacacctgggagaactaacgaattttcctttttgaataattcagaattggctaaacaaatacggccatgtgcccaatttataagtttcaagtaaatctgattcaatccgaaacctcgatttacgggtgtaaagtctaatactatcacatttaattgtacggatggtttcaatagcttcaacatcacaaacaataaggcattaagtgtatttaggttgtagaaccatactgatgcatccttgggtatttgctggaacatagtgaactgttctttgaatgttgccagtttttgcttgaattttcccgccttgcgccacctatcataaatcaattcaaagcgtttatcgctaaacgcttcttttgacatctcaccgcctacataaagtggcatactgctataaactttgtcaaaagcacaaccactcatcaagttataggagaagttacaggcagcaaatgacaatctgtattgagcaattaagtgttcaggcagtatgcaagtccaaaatatccgatatttcttcataaaatcttaatccttaccagtcggttaatgccatctttaagatatttcagtaaaataagtacaatgacaagaatggcatatttcaacaatggatttaatgtaaataaataattgatacacataaccgtgacttgggagaatgcgaccaccacgtatgtttccctccccactttggtaaatatattagaaaacatagttgacgcatttcttatccaaaccgacaagcgaaataccatcagcgtaccggtaacagctcctaatgtcaatggaattatcggggttattaaattccacgctaaatcaagtttccacaaatagctaattaccgcagtgacggatagcaagcaataaaaatcccaataaaacgaaaggggtgtttcaattcgttttttgtaatctgctaattctttacctaacattacaaggaaagaagcataaggaagaaccgacaaactccatggtaaggatatttcataatgccgcaaactatatccaatataaaggaagcataacataataaagcgtcggacatattttctctttatcaagaaagttattcgtaccaaaacagatgacataaataaaatagggataaaccataatgcatacccccccaaccacattttatatagtgtatgacatccaattccccgataaaatacattaaaaatgcaacaatagtagagtaacacacaaatggaagtaaaagcgtatatgacttatgctttatatagtccacgaggctatacttttcatagttactcaccaatcccgaagagataaagaacaagggcatgtggaaagcatatatgaaatgtgacattacactgggaatcggtgtatgccccgctaccatcaagataatagctatacctttagctatgtcaagccagcgatttctattctgactcattaccaatcgaaagttttttcacttgcagatatgcctgcattactattgtaaacgacatcaacggatatagcagttgcgtaccatcatacggcctctgcaaaaaaccaaatatcaatatccaaaatgtccacccgtatttcttgtcataccgtcttaaacccaacaggaaaaagaatggactccaatagaccagttgtcctaaaaccccatcgcaggccaagattaaatttggatttgcccccacaaacactctatgtttttgcgatatacttatcaagttccgtgcaccatgccccacaactggtgcttccttaaataattcccagcacacctttgtcatctgttgtcggttgtcaccggctatcgttcctttcttctcgtcatactcgaagcgaccaaatatggcccgattcatccgttcattgaaggaagaaatcataatcaaggcaaccacaaaagccacaatgtatagtactaacttactgaatctgtttcgatagaaaaagaatgcatatattgctatctggatgaagtaggccaaagaaagcgtagaaataagtccggatataagtagcatctctactcttttattattaacaaaaagcttattgattatcaaagcatacattccccaaaacgccaatgcacctggttcatcatagaaaccggcattacgaacaagaccgtcaaaataagtattagttgtgaataggccaaagaagtatcccggtctcatatccaattcacggaacacaaaaataggctgaagaatgccaataagaactaaaatgaatcctatgctacctgctattacttgaaaaacaagccataaattatatgtcttcacaaaacctaaacgttcatcggataattgcatctcaaggaacatatatgtgatacacaacatcagtattcgagtgaaataggacgtatcaagcccatgaatgatagaatagataccccaagctgttatttgtaatactaataacgatactataggagacggtagcctaaattcattctttgttacaataaaaaatgctactaatacaaataatagcagatagtttatcgtatagtgaggcaaccatcccattaaaaaaaatacgcaaggccagccagctattaaagcgaagaaatacaggaaatacctaagatttagatatgcttttattttttcaaacatattttcaacgttgcattatatcgtaataaatttctgcaagtctattggcatttttcttacagtcatgccgttcttgagctatttccatttctgcagccgaaagtctggtataatctcccttttcaaacattcgcatcacaatttgcgccaacatttcatactcctcataccgataaaaatatccggtctctccttctgtcaacaatgtcggtgtacctccgcagtagcttgcaactacaggtgttcccagcatttgtgcttcgcacagcgagttgggcgaattttctatagcactcggcatcacataaacatttgcatcaaggaattgctgtttcatctgtttttctgataaagaaccaaggaaatgaacattatcctgcaagcacaatttttttactagtcggcgtagatataaatgataaccttggaaacgaagaatatctttcactgcactactcattacactactaccacagaaattaactacagtgtcaggatattgtctcaagataataggcaatgctttcaatacttgatgtgcacctttcaacggagaaccactattgctcacaaaaatcgtgtgttttttacattgtcccaagttccatacaggagcttcataaaaagaatcacgcaaagtttcattcataaaatgatagcgcagccgtgggtttacggtcattacatgatcatgatcccacccagtacgtcctacaatatcagtaatatgtgtgagtacataatgctcgcattcagcacgatgcttgaaacttcgtttcgcattcaacagaaatgttccccggtaaaaatcaagtggggtgatattcatccatttatcccacaatgaaagtctaccatcggcataacgcatatatggccctgccaacccttggatgtttgctacagtttttactctgtcctcattggccatacacacagctttagcaagcgaatgttccgtaccatggatatgtatcagatcgggagcaaaatcccatatagcctcattacaagcctctatctgttttttagttgtcttgtctatctgggcagtaggcacaagatagtaggtcacgccatctatctcataccgttcatatttctttccgtatgaatagacgatgactcccaactgtacctctggcatctccatcagcattgcctttgccgatgaatacatccacccgcaatgtgccggtgcttcttcccccaagtaggagcataatggaggaaatttaaccaaagatacccacaagattttcattctttccatttttaaaaagacttggtcatttatacaaactctctgcatctttgtttcaattcatctgccaatttccgccatgcgctcttgttggacgggtggttggtgaccgtgatgggcaatacggtatcgaaccggggtgacaaaacaccattttcgacactcacaacgttgaacaattcacgcaggccggccaatctgcacttactttcctcaatgtcgcttcctttttccaaataaatgacaggagtttccagtccaaggcatggcaatgcacaatgtatacgagaggttattactagacgagcctttgcatacatcttgacaagtcgctcggcttcagaaagacgttccgcatcggtcttgaaaagcgtcttataacacatactttcttgggttacatatgtggactccatgacgagtttccgaccaaacacttttgaatactctttatagtaaagagccgtttttaatattttgctcacgatgttccttccataatgcaaacgtagctgtgttatcccacaaagtttcagcagatcgagaggatgcttaatggctgtacagacagcttgcagaattgcattaaaattaagtgtaccattgaagatagggtccacgatatatgtcttatcctctttctcctcggaatgatatttctcgccaagggtcaaggtcatgcacccggagaaataggcatctactccgtttttcgacaacaggtacaaagtgttcaggtctctgcaacctataggctgatgacttttcaaataagctatgctttgtgacgaaagcaatacttcttttacaccactgttcaagtgaaaggcaacaaatagcggatctatcaagtcggacggaggccaattttgaggtaggtgcatataccatccattcatgatgaccttacagggttctcccgcgtaatctttcaaatcttcgtctcggtcaatgaagccatctatgtgagggaggaattgcgaagaagccaatgcttgcacataatccccgatattcactcccgatatgttgggaaacttagaaaccgctaataacttatatttcatattccaactagttttttaattactctgtcaagtaccttttcatatacatttaatatcttttctccgtaattctcaatggagaagttctctcgggcaaattgccgggcataccggataatttcttgatgatcagtttcggctgctttttgcatcgcagacacacaaccatccatgtcgttaaacagcagtcctgtcttgccgtcaaacacaaaatccttggtaccgccggaattgcggccaatcaccaaacagccataaaacatggcctcaatggaaacacgtcccaagccttcgttttcggaacacatcaagaatgcaattgcccggctcatatattcctttaccttgtcgcttcgtccaagaaattctacagcgtctgatatgccggcgttcgctacgattttggttaattgggacatatattttgagtgggcttctccgataatcttcagtttatatcctttggtagccaaccccgacttcgcaaaggcagagatggcataggcacatcctttctgttctgtcaagaaccctgcacaaaacaggaaatacttctcttttggtctaacaaggcatgtatcatctttactccgaacggcatccgatattacatacgcattcttgctttccaaagaaacataatgttcaagcacggtcttggtgataccaattacagcatcggtttgctttagcgtgtttatatatttgtcccatccccttaatggcatccacccgaagtccaggtccataaagccacgtaaatgccacacaacctttgagttaaggatcttggctatttcatagccaactgacatgacagtattattgatatgtacaatgtctatttttctacctttcaagatttgcgcaacagtttctgcacacttgcggtttttccgatagaatgttaaatggtttggaatatattttagccaatattttatgtgttggtacaatttcacaggtttccctactaagtcttctttaaagtcgcacacaatgcactctacaccattagcggtgaagtaatcatatacacatccttctgtcccaaccatgacaatgggatggacatatcctcggactgattttatcaagtccattagcgaatatgtcgctccatcaaaatttttcgaggcaaatgttacatacaaaacatttatcatctttatcctaatttggtttaaagttctacttttcggatatcagtttccaccacatttccgctatccgttcctgtgagaaccgctgcgtggagatgacggcttgccttgccatccgttgccgcaacatattatcactcatcaattctttcattcggcatacgtaaccgtccacatcactctcattgataatcacaccgttttcaccatcggtaataatttcacgtaatgaggcataggtatcaaaggctatgggcactacgcccatctgttgcgcctcggtcagcgttaatccccacgactcgcttttcgaagtcatcaggaagatagatgcctctttgtagtagggaacaggattttgcctgccttcgagagttacatcggggatatgttcgttacgaatgatatgttcatagagtttgcggtcattaccatggcccacaatgcggagcgtccaatctttggctaccggatcttgtttcacacatgcccaaatccgaagagccagtgacaaccttttggatggttcatctaagcgtgaaacaatcaatgccactttgcatttagtaagttcgtcaaagcaaggcgtaacgccgaatgacagtccgttggggataactacatatttcgatgtgtcatgcacacctgcaaattctccataaggtttgatgaaaccccgacagagcagcaccacatggtcagcgcactcataagctgcacggtagactgaggaaagttgccgtttcttccgcattgccgtcaaaggatacattattatactttttgtccatcgggcaaagtccatcacagattttggatgatacctgataactttaccaaagcgtccgaacacaagttcccattgtggctcgaaatgatgtgcaaagatgactttacatgttattccttctacggcagcccgaaatctgggtacatgaatgaatgccccctgcacaatgacgcaatcaatacagttcgccacaatgatacttctaagcacttgggcattcttttccaaatccttctgcggaatccattgaaactctttgataaagcattcctctttgggtgtatcggcaggtgcctcatagatggagaagcatctggcaccatacagctttgtcaaagctgtggctacggtgatagtggtgcgttctgtcccacccttagtggaatgcacttttccgtaagtgtgatataaaatgttcatgtgtaaaacttagacgaagtatctgtttttacagagtatattcaacaattccccttggatacaatatctttgctaagtcttttggcagacgacgcagtactccaatatggatagctccaactttttttttgtcagaattgtagcattctatgcgtgtataaaaaacacgatcgattatttgtatcactgctgcattttcttttttgcaaagtttaataatttcgtaaaatgttgattcttcatcaatttttatattgcgctcgtcatataatgtggacaaatcatctaagttaaacttgatttctaaggcctcttcttcaagagttttgagaatgtaatttggaatcataccttctttaccaggcatttctacattatagaagtttttagtctgaaatacctgcccatctcctgttgaataaaggtttctccatatttgataagaatcgatattttagaagaaacagttttcatctattgatttttacgtttgtcttctaacgcatttttctgctcctctgccagttcgttatcgagtacaatgcgtattcccttactgtcttccaatgactgcttataagtatctatttcatttttgacatcaaccgtatctaaggccgtaatccttcctgcacaaatcttgatacagagtttcaaagtgatattctttatatcaccaccagtcagtccggcggaatattctgctatttcagcatacgagaaattatgtatatctttgggaatttctttggttgaagccaatttcattctttctagaatattggggtttccgaggtgaaatttccaaagttctactaattctttattggttggtaaaggatatttaatgtggtatagtattctcctaaaaaatgctttgtcgaagttcttgaacaagttagttgcgtaaattattgtaacattcgaacgatcaactagtgtcaataaatgcgacttgatttcatttgcagcatttgagttcgaactgttggttgtgcattttcccaagagccatggctattgcttcagctgtgatacttttgcccgttcctggttcaccataaagatttattcctatagaagaattgcccttcaagaaattatttaatccccattcctcaataagcctatccttgtttttgcagaaagtaataacatcaagcaccgtctcacgtaccttttcgttaaggattatttgctcaagtctccatttagggtcatcttctatgaactttttcaattccaatttttgttcttcctcgttgctactaaacaaagaagactttggcttatcgttttcaggattctctctcccgtatttctttttatacttgtaaatgtcggcatagcgctatattttttatcttctttctttacactatgtaaagtattgatgttttttactttatgcaaaaatattgcactttagatattcttttccaattccttcaataaacagtattttgcttctctaagtctgaaagggcaggcattaattaaaggatataaatcaatcgtggcaggcttccagtttgatgctttgagatttataagttctataggtaactcgtcattcgcaataaccaatggcgtttctccgtagcgttgaacagacaagaaaaaatcgtgaaacttgaaatgtccccctatcagtggtttcccgaattcaatccaaacattgggtacatgataagcttcagctacgataagaccatgtagcgaggaagacaagatgattccacattcacagatttggtcaatgatatcatgccaatgcttatattgcccaagataaataatttgtacatcctcacattcacttaatggtttcccattaaaaagtaaggtttccacaaccgtctgattaaccacatgggatataataccatacttataaagtttctgtttagatggctgataatagagaggtacaagcatggctgggtctccatatatttcagggcaatctactccttcggcaagcagttttgctcgggaaagtggtccacggactgcatagactttcttgggctttatttttaaaggtttacttccatcaataataccagctccccatacttcggtgttttgtgtacataacatatcaatggttgagccgattaccaaatagttccgtagtttcagtctgaacgctaaggaggtacggttaaagagtacaaccggagactttattatctcacggaggaaataataattaatatcatcaccccagttttcatgcttgatgcgtttgttattttggtaaaatacaaatgcattaattataacgggatgtaagaatagtttaatatgctctattatgattattgcgagtttaatcatgagacctatatcttaaagtatttattttagtatatattaggtttctttcggaggtgtttaatcctacaaataaaatagaaattgcagtcataactattgataaaataattacaattactgtttttaataaactctgattagtcattgtataataaatacttattgacatacaagaagcgagtgtaaaaacagaaatagttggtaatagtactttatgcgcatattgtacgagtgaaaaagaaaccatccgaccgacaatcattattctacaaataagggctaccatagaaataattaagtggacaatgaagaccatttctggattgccgcccaatttaagagctatataagctatcggaagtataagcaacaaaagccctcccacgacactttggtaaacttttacttgaccaactgcctgcgaggagatcatcaaaggattggataaagcatctataagcaagatgcataatattatacgaacaaaccagaccgtatgagccggaacattcttcaaccacacagccagaatcgtctgtgtttcaatcataattggtagcactataagcaacaacaggaaaaaggaatacttactgcttgcaaatatgagagaatgcatacgactcaaatccccggtagcgtaacttttggtgatttgtgggtttaatgccatttgaaaattgctaacaaaacccgttacaaccccttgtatagtgaccgctattgctcgtgctgcattcacaatagggccaaagaacatattcaaaagaacattcaatccttgtgtgtagaataccccggcaatattaccgaacaagctccagccagcgatattagccatttctttgaaaattctcttattgaacattagtttcactcgtgcctctttgaaatgccgcttacagtatatgccatatattaaccggtcaagaatggagatactcaaaagcagagctgcataaaatattaatcgatcaaatgtaactattgtcaacagatacactatcactaatttcaagactacatcgagaattgatatgtaggcaaaagccgacatcttttcatgtgcaataattaccgcattataagggatagaaacaattgatacaaacattgtaagtattgaaaattggtatacccaaatggcagcaacaaacctctcttcaggaataaccaacttatgatatacaaaccataaaccgagagtttcagcaacaatcacaattaacaatgcgataacaaaatggataatcgctgcggtagaaaatgtcattatttgttttttgatatcacctcgtgcaagttcgaaagtgataaacctttgtgtggcattagacattgccccgtttaagaatgaaaaaaaggtaacgaatcctcctactacattatatatgccataatcctctactccaagtgtattcaatacaatcctgctggtgtatagtcccacgcagaggataaatatcattctcaaatatagaatgaaagtattcttggctattcgtttgttcgaggaaacagaatctggcatgaatcttcgattagattatttagatttttcccctatgataattccccagccaatgtttctgactgctattgttaaggagataggataatgttaggctgatagcaaatacacctaatgagagtagtattgggggaatctcatagggaattgctataaattccagccaataaataatcattgagtggaacaaatatattccaaaggaatttggaactatcaattgatataatttagtgttctctatccacatggtattgacagaaagaatataaaatactgttattccaataaaagcattaaataattttaataaataggagggggggggtaattcctggcattactatattaaaaccaatcccacatacaactgcgatggctacatatttaaataccggtctgtaaatggtaaacagatagcctaatgtgaaccaaatgagatattgctccacatttttgatctggaaataaatcatatttatgggaaaacagtagagaagcaaagcgactatgactatcgcccatattgggatatctagtttaatacaaattttgcgtaaacagaaaaacacaaggaatatcagaaatagtgcatacacaaaccatagatgccttggatctaaaacaataatgaaaccatcaattaaataatgtatcgggtctcggacacctagaagtaccattgtagggtaaaccatcaatagtccaaacacataaaacggtatcaataaccttttaaacttgttcttaaacaattgtacaaaagtcatagatttcttttttacctccaattgccaagcgaagatacatccgctggcaaagataaacagaggcatgtgaaaagcgtaaatcacctcttttacggaattcaaaattggcgatggcgtactgggtgtaataatcgacattggggaatacgtaaacacaacatgccccaatacaaccaatagaataccgtaaaatttaagaatatttagttctgttagcataatgacaatcgttcaacaatcctcttatacttcatctaactttctatattacacttccaattgtaaaacaactcttatgtcaaacgtttgacaaagatttcgtgtaagaagaaaatctttgaaaagccgtataaccatcatagaagtggcagaaataacaaaggggttattgatgcatacaatgtaatttgcaattacatactaccctttatgtactaaaaaaacaattctgattctaaaataaccttctttctgctagatatgagttcttttgtgttacctcccagagaaaagacattgggtaatatattcaaactcatggcgcattccaaaaggttattcaactcttttcattaaccgtattcaataagatgagtggcaataatcagattaaaaatcgagtagtttttgtacatttcttgtgatgcttgtacaaatgaacttttgaaatatattgtaactgtgaatgtctgtcccggtataagcaacagccttttcacttaacagcagcacggcctttttcttaatccggttaccgtacatacctgctattgacggaaggttgagctggaactttacccccatgtcttttagccgtcgataatctgattcacccatataaacataccgttcggggtgagcgagaaccggatagtagcctttggccttgatgcgaagcaagatattgctcaatcccatcggaggactaaaataagaggtttccaccaacaggtggtctccattctcgcccaaaggcaacaagtcattcttttccaaacgctcctcaaagagattgtcgagcatattttcagccgcaagatgtagcgttatcgggccggtataggtggcttgtagttccgcgaaacgctcccggaggtgtgccgtggtattgggtatgtcctccatgatgtgcggcgtcaaccacacggctttcacgcccagctcttcatacagacgcagtatctccaacgcttcttccacagttcgcaccccgtcgtccacacccggcaggatgtgtgagtgccagtcggtaaaaccttcgaatataccgctatctttcaatggtatgcatttcctgaacggccacacaatgatataaagattttgtttgaaaaggatttattgataactatttggcagatagctatttacagctaattgtgtttttcgtcggagccgtaatggtagcccgagccgtaaccgtagtgataaccatagcgatagccgtaacggtatccgtatcgaccaccgcttccctcggtcccgttcaggatcagggacatgtttttgtattttttttcatcgtagatcttctccaattccgagagcatgctccgttcgagcaaccctgcgcggactacgaaaatggtacggtcagccagtttctcgataatttgcgtgtcggctaccagttcaacgggcggacagtcgatcagcacatagtcatattgctcccttacagtatcgattgtctgctttaaccgctcgtcgaacaataattccgttgggttaggaggtatcgttcccacgggtagtatatccatagatttatgtttcggatcgggtacgatgatctcatccagattatcgatacgacctcccagatagtcgctcaatcccttgtcgggagagtcgatataggatgatgcagaggcgtggcgcaggtctccgtcgattaccagcactttttttcctttgatggcaaggctcatggcaatgttcatggtcagaaacgatttgccgctgcccggattgaatgaggtcatgatgatgacattcgaagtcttgtccttgccggtcataaattccaggttggtacgcaatacgcggaacgcctcattgatgatgtcacggttgccctccttgacgacaacggccttgacttcctgcggctttttcccgaatattcttttcttctttcttgtaaacagcggaatctcgccgatgaacggtacggtcacactctccaggtctttccttccccgtacacgggtattcatattctcgcgcatgaagataatgactatcggaatgagcagccccagagcaaatgcgaccataaagatgttcttgcgtacaggggatgtcggcaacatactgccgtgcggtggagtgacaatgcgggtattataggccgtaaatgcttgcgagagttcgttctcctcgcgtttttgcagcaggaacaggtaaagagcctcctttaccttctgctggcgttccaccgaaagcaggtatttggcctgtgtagggttggccgctatacgtgatgttgtctgttgctccgtctgccgtaaactttttatctgcgaattcaaggttactatctgattgtcgatagacctgattatcgccccacgcatggatgccagagcctgatccatatccacgaccagcggattttctgcgctgctgttcgcaaccaggctgttacgctgcaacagttgtttgttgtattcggcaatctgcgattcgatgttggcactctctataccggaattggccggaagcagttgggtacggttggcatcgttggctaaatagttcctgatgtaacgggtcatgtaaagctggttgttcaaggccaggatctgtgcgttggtcgcactgctttgggccatgtacatgctcgatgccgcctgcacatcgggtaacaggtgttctgacttgtaagaggaaatatcctcgtccacgttccccagctcctgttcgattactcccagacgttcattgatgaacattgaggtactgacagcaatctggtttttgtccttcacccagttctcgttataaacggaaatcaacatactcaatatatcttccgcccgctgtgtagagttatccttgaatgccaggtctataaccgacgctttctcgttattcaatgaaacggacagattggatgagcaggagtttacagcgttatacaaattggatttgcctacatataatgtatatgccttgcctttcacgtaattgggtgttgtattgataatgattttccccaatggtgtaggaatggagtcgagcaagtttccctttatatccttttcgtcaagatccgtcccgttacgtataaagtcggataggaataacgtgccgtccggctgcacttccagcgtgaaaccggctgattcattttcaggcaagtcatttatcgttacatccactggtaatgtcagtccataggccacctgacggtggaattttcctggaacgaagtaattcatatccaaacgcaaccgtttaactacttcagtcattaaagacggtgactgaaaggtgataagttcgttattcacatttgtaccggattggaacaacccgaactccgagaaggattccagatccgaggaaaacgacttacctttggaatcttctttgaccaataccgaagcggtacgtgtataaacggcaggggtacgtaacagatgaacggtagcggcaccgaccgttatcgccaaagacaagacgaaccacttccaccttgcgagacacagatacaacagatcctgtatccgcaggaaatcatcctgctgtcccggttttatattcttttgatttatggccatatctgattttatatttatttcacaattaacacggtaatggtagtcagcagcgaggccaacgacatccagaaagaagcagaacggacgttattgccgttgacagtcgcctgccgtgctttcattgagttaggttccacataaactatatcgttctgctgtaaataatacacgggagaggcataaaggtcgtatcctgaattcaggttaacctgatacaaggtctgtttaccgttttcctcccgttgtaccagcacattctcccgtttcccgtagacggtaaggtctccggccatgcttaaagcatccaaaagcgtcagcttgtccttatcgatattgaagcgtccggggttggcaacctcacccaacacggaaacggtcaggttcatgaactcaactgtaacgacagggtctttcacgagattcttcgaaaccagttcctcttttatatacgaggcgatttcctcgcgtgtcattcccgccacatggatatgtcccaacactggaaaatcgatatctccatccttgttgatcgtatatcctgatatcccctggctattggatgttcccgatgtcgtaccgatctgtctggatatgatcggaaggttgaaaaggttcatcaacaaggggtccttgctgttgactagtattgagatcttgtcttcgggacgcacccggatttccagcgggttcaagacttgttctgcggtaccccgtttcaggtccgtgaaataagcgactttcggcgtggcacatgatcccagcaggaaagccacggtcaataagaataaaatgtatctgattttcatatttcattgatttttatttgttggttttctgttccgattgaagttgtccgatagatttcgtcagcctgatgttggcaagagtccatatcaggatatcgcccagcacgatccagttcacattgagataaagggacagaagaatattgagcagtatgaatattgttgatacggaaacaatgataatcatggcattgcgctgctttattccgagagcaagcagcttatggtggatgtggttcttgtccggcaggaacgggttcttcccgttgcgtacccgatgcaggtagacccggaccacatcgcagcatggaaccagcaagggtgagaaggctagcaccatcggatgtatatttcctgtattatcgtctagaccgcacatggtcagtttgagactgaggaaacagagcatcatgccaacggtcaaactacctgtgtcacccatgaagatcttccttccgtgctcggcgttcccgaaaacattgtaatagaagaacggtaccaacactcccaatgtggcgaacgccagtatggcatagacatgctggtggagcatgaaaaaagtcagaccgtaaaacaggcaggcgacactgcatagcccggaagccaacccgtcaatgccgtcgatcaggttgatggcattgatgatgaagaccacgattaaaatggtcaaaggataccccagccataacggaaccgcatgaatacctaggatgccgtgcaggttattgatatatattccaccggcgataagcatcacgccac

SEQ ID NO: 469 - DNA, 7920 bp, unidentified
  source 1..7920: mol_type = unassigned DNA
ttatttaccctcgtatgctgcctgaatctcttttttgaactcttcctcgcccactctctgaagagtaagtctgaaacgctcaccaccgtttgcatgcttctcgaagaaactaattgccgcatctgtcactctgaaaagagtttccttgtcgcggataatcggaacaagctgctctcctttatagatgtggtttccgaaaagtcctccaaacgatacgatatatcccggagttcccttccatgcatctgtcggacagctctttacgcagcgcgcacagttgttacatttgtctctgtcgatgataatcctgccatcctccatcgaaagtgcaccctcgcggcatgccttcacacatacaccacactggatacaatcgtcatggctgcactctactgtcatgccgcccttgattccgacatcgttttcctcagcctttaagcagttgttctgacagcctgtgacaccaaacttgaacttgtgaggaagctctcttccgaagtatctttcatcaagttccttagccagagtgtatgtatcgatacatccgctaggacagatttctgagccctgacacgctgtgacagtacgtactctcggtccgcagacacctgttcctacaccgccctttgccagttcctcttttactacattgatatcctcaaccttgataaaaggaatctcaataccctgacgcgatgtcatatgaacatatccgtgtccgtatttctcagcaacctctgctactgctttgatattttctgctgtaagatttcctcctacaaccgcaattctaagcgagaaacagcccttttgcttctgtctcatgaatccgcccttttttagggccgcgtaatcaactttctccgccatttttaatctccttattgtgtaaatatgttaatgttttgttttatatgtaaatgcatatgcacgccctcatttgcatacacattgataccttattattatggcttaatcagctatatttgcaaaagcctgtgcaaaatcctccttgaggtcatctatatcctcgatacccacactgactcttataagatcctcaaatactcctgcatcctccttctgcttatctgtgctgtgaagactgattgtagagcccggatgaatgacaagtgtctttgtatctccgatattgctgagtgtgtaaggaatcgtcaggctgtctataaatttaaatgccttttccttgctgccaaccctgattgtaaggattgctccatagccgtttgcgagctgtttttttgctatttcatgccatttgctgctctcaagccccggataattaacctttatgtcaggataattgttttctatccacgacgcaagttcgagtgcattagagcattctctttccattctaagaccgagtgtctcaagtcctataatatttaagtatgcattcaccggagctaaacaggcacccatatttctgaaaagactgtttctcagctttgcgacaaatgccataggtccatacttcacataatctgcaaaccccggatatctgttcttgtcccatttgaacttacctgagtctgtcagaataccactgattgcattgctgcttccattgatatatttggaagatgaattgaccacgatatcagctccatgctttaaaacctgtatcaggtaagctgtcgatgtggtattgtcaactacaagcggtatatcatgtgcgtgtgctatctctgcaagcttctcaatatctgtgacatccagacagggattaccgatagtctctgcaaaaatcagtctggtatgctcattgatactgtcctctatctgctgccagttgttgttctcgacatatctggttgtgatgccgaaggcctcaagatcatggaacaaatctattgtgccaccgtagaggctggcgcttgagatgagctcatctccactgcttagtatatttaagaaggtattcatcagtgccgccatgcctgatgcgcatgccaccgatgctattcctccctcgagctttgttattctgttctcaaaagctgtaatcgtaggattggcaactcttgtgtaacagtagcccggagccttgttttcaaatattttttccagatctgccgcgctctcctgctcgaaggcgcttgtctgatataccggtggcagtgtagagccatttgtctcttttgtcacgccggcatgaagtaagcttgtattaaatctcattattttcttcttctcgttaattcttacatagtctattgtgttactaggaattgatgagattattatacaaacgtgtgtgttgaaagtcaatgctatcagttatacaaattatttgtccgtggttatatattttgtttataaccattaatgtcccttaaatactctgcggctgtcgttgcggcatttgcgccgtcagatactgcggttaccacctgacgcagtgtcttggtacggacatctcccgccacatacagtcccggctgaatgcttctatcatggtcaccattttttgttgcagcatatgtgatgccgtcctcacctgccactacatatcctctctcatcaagctgcaccagattctttataagctctgactgcggtactgaaccatatgccacgaatactccgtctacagccagtgtcctgccacttttaagctttatgcctgtcggctttttttctccatatatttctgtcactgcttcgtttaggacaagctctacattttctttctgctttaagagctcaactgtgctctgtgcaccgcggaagctgtctcttctgtgaaccagatagaccttctcacatatgtcggacagatataatgcatcatccaaagcggtatctccgccgcccagcactgcggctgtctttcctttatagaatgctccgtcacagattgcgcagtaagatactcccttaccggtatactcatcctctcccggcactcctgcctttctcggatatgctcctgcggtatagatgagcgctcttgcctctgctatcgtgtcatcatcgaatttcactctgtatatcgctgattcttctttctcaccattttgcactgcttctatctgcactgcttctttttcgataaattctacatcaagagacactgcatgctccctgaatttttctcccaagtcgtatccgtttatattgggaagccccagatagttgttcacatttccgctctcggctatctggcctgtcccctcgtattctttttctgccactgtcacattcagattggctctctttgcatatattgctgctgacagtcctgccggaccactgcctattattattatatcaaacatggaattggttcctttcatcgtccattgatttttttcggtaacttattatatacattatccttaaaaaatacaataataccgcctgcttttataaaacacctttataaaaacaagcggtatcaattttatctatcgtatatacatcctggcctcataaggtctgagtactgacatatcagaggtatccttataatttgaaatcagcacctccatgccctcacactcctttgcaagcggcattggtatctccttgtcaaagaaattgcacacaacaatcatggttttttcttcattctttctgctgtatgcaaaaatattctcatcatcctcaagtaaaagtgtgaatttaccatcaacaaataccggataatcctttctcagctgaacaagcttcttgtagcagctaaagattgaatcagggtcatccacctgtgatttggcatttattttgtcgtaattgtcatttacctttatccaaggtgttcctgtggtgaagccggcatttgccgagtcatcccactgcataggtgtccttgcattgtcacggccctttgcgtaaatggacttcatgatttcatcctttgagtatcctttttcaaggcgctcatggtacatgtttatgatttcacagtccttataatcctcgatatcatactgtacatttgtcatgcccagctcctcgccctgatagatgtatggtgtaccctgcatgccgtgcagcaatatagcaagcatctttgcagattccactctgtactccctgtcattgccccatcttgacacgatacgcggcaggtcatgattgtcccagaacagactgttccagccacagttgtagagctcattctgccagtgagccattatctttttgagctttttaaacggaagcggtgcaaggtcccatttctcgccgccctccttctggtcaagccctatgtgctcaaactggaacaccatagaaaactcgctgccatccggattgctgtaaagctttgcacgctctgtgtctgcgccccatgcctcacccacggtaatcaggtcgcccttctggaatgtctccctgctcagttccttaaaatattcctgaagccttggtccatttatggtgattctcttgtccggctcttttgctatctggtcgattacatcaagtctgaagccgccgactcccttgtccatccaccagagaatcatatcgtagattgctcttctgacctttggattctcccagtttaaatccggctgctccggtaaaaactgatggaaataatactgtccgatttccggcacatattcccatgcgcttccaccgaaacaagccttcatatcacttggaggcacgccttcatctccgtctctccaaatatagtagtcatggtatggattgtccttgctctttttagcctccttgaaccacctgtgctcgtttgaagaatgatttaagacaagatccatcataatccttatattgtgcttctttgcctcgtttatgagctcctccatatcatcgagactgccaaacgtcggatcaatatccctgtaatccgaaatgtcataaccgttgtccgcctgcggtgatttgaataccggcgaaagccatattgcattgattccaagcgtctcaagataatcaagtcttttgatgataccctgtaaatcaccaaagccgtctccgttagaatcctgaaagctctttggataaatctggtaaactaccgcctttttccaccatttttcgttattgtttttgctcattatgccctccttgtctcttcattatctctttttgttatctcttttagctgtctctttttgtaaaaattcagcctggtttctttaatgctgtatcaaattatgctattttacaagcaccaccaaaacctcacagctttcaagcttaagctcagatgctcccactgaaacagtgctcttttcagcatcatttgtgttggacaaaagcacctttttcacactgccatccagcctgatttgtgcctctttactgccaaaatttgccacaaccagcacgcgcttattttcatcctctctgtaataagccatgatgccatctgtatcctcatatgccggaacacatctgccgtaggtgaacagctccttaaattcatctgactttcgcagtgccacaagccttctgtaatagttcaaaacagatgaagggtccttttcctgcgccgcaacattgatagccttatagttttcattgaccttaagccatggctttgctgtggtaaaaccggcatttgcctcatcactccactgcataggtgtccttgcattatccctgctcatccttccacaggctgcaagtgcctgctcctctgataagcctgctgcaagtgctgccttgtactgatcctttgtgctgatatcgtcatactcatctatactgttccatttagcattttgcataccgatttcctgtccctggtatataaacggaatgcctcgaagcagtacgctgacagttccaagcatcttgattccggcaggattttgagcatgctttggtaaaaatcttgaggcacctctcggctcatcatgattttctatgatattggccttaaagccgtacttttctgtctcaagctgtgaaccaagaatggtctttctccatttgtcaaaatctattttcggtgcatcataccatccatgctctccatcacttaagcactgtgcacaaaaatcaaatatcgttgaaaaatgcccattctcaccgataaactccggcagctcctcaggcttcatattgaatacctcgccaaccgtaaatgcatcatacttcttaaatgtattgttctttaattcctctaagagctctccgacaccttctgcactttcaaccatcttgtagcaggcagccagtccgtcctctgcatccggctcaaaatcagggaaatcgagatttttctttatattgattatcgcatctattctaaatcctgacaagcccttatcaagccaccagttaatcatctcataaagcttttgtcttagcttttcattctcccagtttaaatccggctgctccttcgcaaacatgtgcagataatacttgtccgtgcccggcaccttctcccagcagcttcctccaaaataagagcggtaattgctcggcggattgccgtttttaccttttctgaaataaaagtaatcagcatactctccatccggatccttaagtgccttttgaaaccattcgtgcttatccgagcagtgatttattaccagatccatgatgatgtgcatatcacgcttctttgcctcggcaaggagctcatcaaactcctccatagtaccgaactcttcagctatcgcatagtaatcagatatgtcatagccctgatccacaaatggcgatttatatatcggagacagccatatgatgtcaattccaagcgattttaaataatccagctttgaaatgatacctcttaaatctcctattccgtcaccgtttgtatccagaaagctctttggataaatctgatatgccaccttgtcatgccaccattttctctccataatgtgtacctcttatctaatcataaattttgcactcatttacatcttgagcactttgtcttgatgtattatactgctattatagaaagtgattagtataaattcttgcaatattttttcattttataacacaatactgctcttataattttaaagggtatagttttaaaagctatggagaaacaacaatatgaaaaacaataatcagcctgccctcgggcagaaagaaaacgcaaagcacggagaagtatttttccccgttcagaaatatataacaagacttgcagcagattaccctgtcatcactacacactggcacgacgaggcagagctcacactgattacaaagggctcatgcacctatcagattgatttgctcgaatatgaagcaaaggaaggcgatatcatctttatcccgccactgctgctgcattccatttcaataagggactgcgacgaattttactcggaaacgtatgtattccatatcaattttttaggtggaaacaataccgatatatgctcttcaagatatctgactccgctaatcaaccatgagtttaccatgccttacctgattgcaccgaagcatccggcatatacatccctttgcaaatgcttcatgcgcataacaaatctatactccagtcaggaattcggctatgagctggccctaaaggcatttctgcttcaggcaatatttctattgctgcaatacagtgaaaaaaatgctgattttggtgtcaacacatcctccgataagctcaaaaatgtgctcgattacatcgagatgcactatgccgaaagcatccaggtttcagagcttgccgggctttgctatttcagtgaataccacttcatgcgtttcttcaaaaaacacatgaacatgacctgcgtgcagtatatcaacaatgtgcgtcttgaaaaatctgtggaacagttcgagcgcggcaacacctcaattttagatgtctcactgtctgtcggatttcacaatctgagctattttcacagggcatttaaaaagaggtatcatatgacacctctttcctttatcaaaagccttgaataa

SEQ ID NO: 470 - DNA, 50193 bp, unidentified
  source 1..50193: mol_type = unassigned DNA
ggaattatccggcagccgccctgttacaatcattgcgtataaagcacccgcaattattttaatgtaacttttgctccctcagcttcaagtttagctttgatatcctcagctgttgctttgtcagctgcttcttttaatactttcggagctccatctactacgtctttcgcttcttttaagcctaagcctgtagcttcacgaacaactttgataactttaactttgttcgggccaacttctgttaactctacgtcgaactcagtcttctcttctgctgctgcgccctcgccagcacctgctgctgcaactacaacgcctgctgctgcagatacgccgaactcttcttcacaagcttttactaaatcatttaactctaatacgcttaactctttgatagcatcgataaattctgctgttgttaattttgccattataattttcctccattataatttattgtcgcaccggtcagtctctcctgccgtgcccatatactgtttcatccagccgccggatagattactctgccggtgtctctgctggttcttctgcagctgctgtttcttctgccggagcagcctctactgctgcatctgccgcaccgcctttttctgcgatctgattgagaacgcgagcaaggttggtaatcggagactgtaagcttccaagtaatttggaaagaagttcttctcttgatggtactgctgcgacagccttcatgcctgcctcatcataataagtaccctcaacaacacctgctttgatttcaagagcaggagctgttttagcgaacttagctaaaactcttgccggagctgttgcatcctcagtagagatagcgaaagcattcggtccttcaagaacgtctcttaagctttcgaactgagtaccttctactgcacggcttactaaagtatttttgtatactttgtaagtaacaccagcttctcttaatgctttacgtaactgagtatcttctgctacggtaagtccacggtagtcaactactacgaccgactgtgcatctttgatgttttcagaaatttcctgtacgataggctgtttgagttctacttttgccacgaatcgtgcacctccttttattattttgccgacggataatccgccggatcacagtgattttcccactgctgctgcataaaagacttgaggtatataaaaccgctttattcagattaaaatctgcaataaaaaactccctgcaaagacagagagatacggtcaaaaaaatcttgataaagatcccctcggcaggtcgtcttacgtttacgccacatggcacctgctgtcttcggcatatatgcaaatcgctgagtaccggaaaaccggctcaacgatatgcattataacattgtatattatggttgtcaacaattttctgcttttactgtgtaattttaactacgtttaatcttacaccaggtcccattgtagatgcaagagttgcactcttaacatactgaccttttaagcttgcaggttttgctttgttgatcgcacccataagggtctggaagttgtcgcttaactgttcttctgtaaaagaagcttttccaactggcacgtggataatgtttgttttgtccaatctgtattcaatcttaccagctttgatgtcgttaacagcttttgtaacatccatagttactgttccagccttcgggtttggcattaaacctttcggtccaagtacacgaccaagacgtccaacaacgcccatcatgtccggtgtagcaacaacaacatcgaagtctaaccatccctcgttctgaatcttcgggatcagctcctcgccgcctacgtaatcagcgcctgctgcctgtgcttcatcaaccttggttccttttgcgaatactaaaactttaactgatttaccagttccgtgtggtaatacaactgcaccacggatctgctgctctgcatgacgtccatcacaacctgttctgatgtgaagttcgattgtctcatcaaatttagctgttgcgtttttctttaccaggctgattgcttcagcaacatcgtactgagcagccttatcaaaacttttcacagcttcctgatatttctttcctcttttcattctaaaaaacctcctggtggtattatcgggagaggaccctcccacataatcgttaataaatatcgttaatttttgcagaatttctcagaagaatgccactcttgcattcttccaatgaatttgctgtttttgtaaattctattcttccactgtaacacccatacttcttgcagtaccagcgatcatgctcatagctgcctctaaagatgctgcatttaagtcaggcatttttaattctgcgatttcctgtaattttgctttggaaagtgtagcaacctttgtcttgttcggtgttgcagaaccagatttaatgttgcaggctttcttgattaatacaggagcaggcggtgtctttgtaacgaagctgaagcttctgtctgcgtatactgtaataactacagggatgataagatctccctgatcagcggttcttgcgttgaactgttttgtaaattcaacgatgttaacgccatgctgtccaagagcaggtccaactggaggagcaggtgtagccttgccagcaggaatctgcaatttgatatatccttctactttctttgccatttggaattgcctccttaatccaatgtttcaggcataatctcatgcctgcgcacagatcctggtctgtgctttaattgttaagttttacatctgcgaaacttatttctaccggcgtctcgcggccgaacaattcaacattgatcgtcacactctgctttccgtgattcatcgcctggatcactccgatagtgtctttccagacacctccggtaaccacaacggtgtctccctctgtaaagtcaacttcaatgttctctttcttgattcccaaaggtttcatttccatatcggtaagcggaaccggcttgcttcccggaccaacaaatccggtaacaccacgggtatttctgacaacataccatgtgtcgtcattcataaccatattgataagaacgtatcccggaaacattttctttgatacggatttttttgcgccatttttcatttcgacaacatcctgcatcggaacgcggacctctaagatctgatcttccagatgtctgttttcaattgtcttgtcaatgttcgcttttaccttattctcatatcctgagtaggtatgaacaacataccagtgtgcctctgccataaatcactctgcctccattaaaaattaaaaccaacaaggaaatcaacgccatactgaattgcgaaatccaaaagcgcgatgataagacctaatacaacggatacagcaataactgctgtggtctgtcttacaagtgattgtttctccggccaaataatctttttgaattcagccgaaagaccggtaaaccagctctcttttggagccttgtctaacttctcggtttctcccattttttcactcctttgccacgcgcgtcttatttggtttctttgtgtaacgtatgggtcttgcagaatctgcaatactttttggtttccatcctgtcaggatgagcttttttgtcttttgtcatgttgtagttacggtttttgcattccgtacatgccaatgttatttttgtgcgcacaacttccacctccattaaaattctttgtgcttttttctgccccggtctccgtagtgagacgttttttaaggatcagcgacagtccttaaaaaaaggcataaaaaaaagacctacttccatcgcctgtctactatatcatatccacttgtttccgtcaatctttttttgtatattatacccttttaaacctttttgattattttttcctatttcacatttttttctcaaatggtataatatttttatatagttagaccgaaatacttttaaagaatctttaaaaatataattaaaatccccacatttatcatgccaggcggcaaggatgctgtcctataacctgataaatgtatatatttcatggaagaaaggaggggttttcttggctgctattgacagtgcctatcattattatttaagcacttatggcacttcgaaggtatcgcgttatgatacccataagaagagtcagcttcgtgctgtctataatcagattgtaaaaacaaataaagatactcctctgtataaaattccagattccacggatgtgaaaaaatttgcgattgacctgaaagaacatacccgttcgatccagaatgtaatcgctgccctttctgacaacgacgaggggattgaaaatgtattcaacaaaaaagttgcaaagtcttccgacgaatcttctgtcaatgttacctacattggtgaggatcagagtctcgataattctttgcattttgatgtggaggtaaaacagcttgcagccccacagatcaatgtcggaaagtttctttaccctgatgaatgcgatttcaaaacaggtacttacacattcgatatatcaactgatttaagttcatatgagtttcagtataccgtaagcagaaatgatgacaaccagcatattcttgaaaagcttgcacgcctggtcaattcttcaggtgccgggattcatgccgatcttgccaaaaatgccagtaacaagattgccctgcgtttaacttcaagtcagaccggtcttgcagacggtcagtcctatctgtttgaagttaccccaagttccgatcatgcatccgaaaaagcaatgcagacactcggtattgattgtgttacccagacagcaagtaattcttctttcttattaaacggtacggagcatgcatctctgtcaaatacttttactgtcaacaatgcttttgaactgacactgaataaaccaagctcccaggcaaaccctgtacagatcggctttaaagcaacagctgactccattgtagacaatgtccagtctctggtaaatgtatacaacaatctgatccagttaagctatcgctatgacagcacacaggaagcagataaactgcggcgcgattttacacaggtggtaaaaccttattacaatgaatttgagtcgtatggattaaaactttcagatgacggtgccatcaaggtcgatacacatcttttgacggatgcagtcacttccacggatgcaaaagaatgctttgcaacattaaataagtttaaaaacgatctcgggacgaccgccggaaccgtctctgttgacccgttaaattatgcaagcaaaacgatgatcacttacaaaaaaccaggtcataagaatttttcctgcccttacctgacctccgtttattccggaatgatgttagacagatattgctaaacggacacttacagattttctgtagtgtccgtttaatattccaatatcccagatgcaacttcagattatgcatctttcgcactgatcatgtactatatatcattttcctgattttcattttcttctataatatccagcatcgtatttattctctctatataattgtgatgctcccttacttttcgataaccattttctgcgattgccagacgttcttcctcatgtgccagataatattctgctttttcacaaagatcttcgattccgtcaaagcatatcaggtcttccccctctttaaaataatatggtatctccgcctgataatttgtcatcagaaaaccgcctgccccaaggacatcccatacgcggagcggaataccgcttttaatatttggaattgtgaaattcaggttgatctttgacatatgaaaaacctgtggcagctcactccagtaatcaaccgatccgcagtactggatcctcagcaggtcactgacatcactgttactgtatacattgacatgataatgcttcgacaactcgatcagcgcgcgcctgcgctccacctccgcaattttaaacccaagcaccgtcgtctgaaagatcaatccaaggtctgaaaaagatccttctgatttttccagttcaaaatattcctgcagtttttccaaaatatccgtagtcagcataggttccactatattggcaccgctaatgtttaactgtgcctcgatcacagcatcaaaatatccgcgcaggtattccggcagcctgctttttatcttatcataagagttccgttcataaagacttccgacaaacgcaatgtctcctttatatttctgtatttccggtgaatttgcaattaccgtatccatccggtccgtatccacggcaagtggcagataccagatatgttccactcccatctcccggaattccagatagtttgtcttatcaaaggtaaatatataattacacggatgaaaaatagactcatgatacatgctgatcagcggattatcacagctccaggatacatattttatccccattttctggcagacattcgagatcagtgcaaaataattgaccgtaaataccatatcatagtgcgtttcccgcagtttgttttcaatgattttttcaaattccggatcgatatcataattgccaagatgctgttcgatattatccaccgtatgccccagtaataaaaaagtctgctctatgtctctgtaattataagctttccagcgatacattaatatgtgcataataatctccattcctgtgccgtgtcagccaaaataacgttttcatctgtatgtaaaacctgttgcagggagggaatgagaacctccgctctacatccaggcttcccggatccactccgctctgcttttccacgtatgatgttcttttactgcctgatatccacggtctgccattttttgtgtggactgcatgtggccaaacaggtcaaatacacggtctggcaaagtccggatctcatttcttgaaaacatgacaagttcttttccatccgtaaattctctgcgcagataggtggaatcgtccgtcaccactgctgctccggcaagcattccgttaaaaatacggtcatgtgctccggctttgaaccaggtcattgtatttaagacgatcttactattgttcatcaaaggcagaatctccggtgcaagtacttttccaccgtaaaccaggtacggattgtcactccattcacactgatcccagcctgtcccgtatgctgtcacacggattccgttttccaccagtatgcggactgcctgttcgcggaaaaatgatgtcgcataggaatctatgaaacgcatctgcacgatgatctcatgaacacgtttctccgatatgtcattccgcttatattttaagtactcttcgatcacatcctccgtcgtgcggtccggatgatgcaccagttctgacaataccacctgtgccatctcctctccatcgacttccgggatggatgacagatccggtatcatcttcgcaactgtgtagatcggaagtgcccccgcatataaaacatcgattccacgctccgcgagcggcttatgcctgctgccaagttccaccccggcatgtggcagaaaatccgtataccggatatttttgaaatatctgcggatataccggacatggttgcggtccgtgcacagcacaacagatgttgccggtgcattctgcagtggtttttcatagtgaaacggatgatccatcaggatattgatatatggaatattgtaagtttcccagagatttggctcttcttccgcagaacctgctctttttgatcctgctgtactttggaaaatgtcctgcttcaaaagcatccctgttccggtcatgcctgccggaagtgacagattatatcccaggttattaaacgtcacacagaaaaacctctgatctttttttgcaccatctccgatacattcaatcagcgcctgcttgctcacctcttcgagacgggcatcataggtaaaggaagcatatcccatggattcaaaggcatttttcagttcctgggtgaataagtcgagggtgtcgtagacaccggtgatgtaaatgatggttgtctgcatggtggtctcctgtactttttatagatttattttttctatactgcagctatgccttttataatcatcctttgtggaatctgtgctgtcgtaattgattccagccaggatcacttgtccatgataatctttcaggctctgcatgtactgcttcttttttatctgtgcaatcgctgcatctgacgatttatcccattttaattccaccacgatcgctggcacatctctaaattttctcgggacaaacacaatgtcagcaaatccctttcccccggcgagttcccgatacatcacataatcttttcttgtagcataatatgccagcgaaagcacacatgacatagagttttcatcattatactttaaaatggatatattttcctgatgcacctgctcgatcatttccgcaacatattcttcttttccatctatagttgcctgaagcagtgtttcagaattacgaatcgcatccatgaccggttcccatccgccatcctctatgcagttaataaactctttctgcacctcctggtttggaatagaaacagtcttgttctcaaaatcgtaggtcagatatcccaaatgcactaaaagcgtaaatacatcatctacgctcgcaaatgtggacatatcattctgaaacttatccggattaatccttatatggctgcctgatataagctgtgtgattaacgccttcaagtgatacatgtccatctggatatatttttttagtgcctcataggtctccgtcttcgtccaataactgtcaaaatcatgtcccagcaatgacatgactactgatcttggattatagatctgaatgccctttaaatcatatccatcgtaccactgtttcatcctgtcataaggcataccatatgacacacacagactttgaacttcctcttccgtaaacccggtaaattcagcgagttccctttgattggtcatggaatattcatcaaacatattgagagctgaatgctcgccatactttttaatcggcagtattcccgtcatataagccaacgcaatatatggcttatctttcatccacaggcgcaagaaatccagatattttttctgcgcttcatcatcccccggatactttcgaaatatgcaatcccactcgtcgataatgatgataaatttctgttttttctgactatagatgttctctaatacatcaataagatcttcccgatcaaaacagtctacatctccgtattcccgcctgatatcccacaaaagcctcttttgcaggtaatcgatcattccgtccactgtctgcgcacggctgagaaagtcaagcatattgacatgaaggacattatatttattcagatttgcctcaaaactttcatcctgtgcaatcttataatccgcaaacatgcttttcgaatcacatcccttgctataataagctacaagcatatttgcagtcatagattttccaaaacggcgaggtctgcttacgcatatattctgatgttcggtattcagattctgattcatttcagaaatcagcatggttttatccacatatatcttagaattaagtgctttctgaaattcttcatttcccggatttaaatatattcccattctaatctccattctgcatttgaaaaattatatttttcactctgtttctccaataagctgactataacaaatttaactgtttatcaattttaaacgtttttttgccggctcataattaccgcacttctgataataatactttgcctcactgattttctccaggcattcataaataactccaacattataataagctgcataggaatttactcccgccatcctgcagtcccggtgtttgaccgctttcaaaaattctccaactgctgcatcaaacatagcgttattcatataaatgagtcccatcaggaactgaaagtccgcactatttccaaattcttcgtaaatgttttcaaagaaaagtgcttccccggcgcgtccgctgttgatcaaggcatagccgtaggtttccaccatatcgatgacatattctaactttggttcaaggtcataactgagcccatgggcgaaccagaagcatgcctcgttataatcttctgccatgtaatagctttttccaagctgatacaatagatacgggatctgctgctctttttttgcatccgtaattttagatttctgctctgcatccgtatcctgctttgcgatattctgatctaactgcgtggcatgcactttttcatcccatcctgaattctttaattcctgctctaacagtcttatgttgcgcagcgcttttgcctttttttctttcttcggaagatcataacccgtatggccgatgacgaccggtgcttcgtatgtacgatattccttttcgtcacaggcagttacctgctcatggattcttcccgtgtaatgaaaactttcttttgcaaaaatgcggttgatccactctttattttcctgctttccatcttttccggaaataatattgattctccggatcctgccaacctcacctggatgttcggcaatcattttctctaactgtacccgatcaatctgctgtaaatattcatcgctgtcaatgaccatcacatacggatgtgctgcttttgaaaccgcaaaattctttgctgccgaaaaatcatcgcaccatgggaaatcatagatattttccgtatattctgcggcgattttttttgtctgatctgtcgatccggtatctactacgaccagttcaaatccggtgttctggaatgatttcaggcagcgtgccagattgtgttcttcatttttggtgatgatgcagactgataacatgtggttgttctcctgtgtgccgatcgctatattggtgggcatattcactcctccctgtctgtcccaatcaaaacttttttgccttcaaatgcaaatccataatgatatatctgttcctttctgattcctttatcaagcaggtctgcatcgtattttttctcacagatctgctttaaggcagacagaactgtctcttgaatacttttttcctttcgtggatttcgaactttgaattctaaaataactgctttgcattcctttgaatttttcggttctaacattacatcatatctgccaaacccactttcacggttggatttaaggtaatatctatcccgcaggtcaacaagcagacctaatataaaaccatggtaaaaacgctcaggctctgccccagatgccctctctccggtgtcgaaataactaaatgtctgtatagcaattcgattcatgtattcattcatcgcatccacatcaccaagtaacattgcccttacaaaatcattgtaatctggttgtacaggagcaaaccagtcatgtaccataccctgaaacattaactttacttccagattcgtcaacgcaagctggtatttcggcatcttcccctcctcaatatcctgatacgtttcataagataatactttcaaatatccactcgccagcaaaagactccaaactgctttttcatttccatttaattgattgtatacaatctgctcttcaatttctgaccagatgtattctccgcacaataatttttcaaatttttccttaattgtacggtttccttcctgaatcaattttcctaccagactatttgcacttgtatttgcccaaaatgttttgtataactgtgtatcgagataatttaaaattgaccatggattataaatatctttgtgttccccaaaaatgaaaccatcgtaccatctttttacctcttttttttctttctcaagaccatactgttccaatgcatcaaagacttccttctctgtaaaaccaaatacagaagcatattcatttgatgtagtcgtaactatctttaagttattcaaatctgaaaaaacggattccttacttactcttgtgattcccgtcataattccacgttccagtgccggatttgtcttaaatgtcgaattaaacaggcttcgggtgaatgcgacaagttcatcccagtaaccatccacaaatgcttcctgcatgggtgtatcatattcgtctaacaaaatgataactttttttccataatatctatacaggaaatctgataactgatataaagaagatgtcgcatccgtctcttttatattttcctccaacatacgctcataatatgctctgtcggcatctgtaagcttttcactgtctttaatataacaaaactttatatatatgtttcttaacacctcacacatcttttgttttgttttctcataatctctctctttaatccgcgcaaatgacagactgatgacaggataagttccctgcagctcacggtatttttcttctttccagatcgccagatgttcaaacaaatctgacctgccggcatagtctatggaaaagaactgctccaccatactcattgtaagtgtctttccaaaacgatgcggacgggtgatcaaagtcgcactgtccccgcaatcccaccattctttaataaaaggcgttttatctatataaaaatagtttccctggatgattgtggaaaaatcctgtataccgatcgctatatttccagacattgtaacctccctgcttttcagactgatattgtgcattcctttttgttgtgataaattaataatataccatttttgtttattataccatacgtaacctttttaccaggagaatttcgatctatgaaaaaagtaagtgtcatcatcccatgttttaatgcaacaaaatatcttccgaaatgctttatgtcacttgtacagcagacaatcggaattgaccagatcgaactgatctttgtagacgatgcatccacagatgaggatgctacctggaacatgctgcaggaatttgaacgcgcctatccggaaagcattatgatcttaaaacttgaggaaaatatgcgccagggcggtgcaagaaatgttgccctgcagtatgcaacaggcgaatatattgcatttgttgacgctgatgactttgtctctgaaaattttctgttggaaacttatgaaaaagccaaagaatcggatgctgatatcatccagtttgaatatttttattatacagaccgtctgggtgccgtggactccggtcggaacattacgccggaagtgattgaaatttcttctgtcagtgaccgaaaaagatttctaatctcagaaaaagttacctatggctgctggaataaactttaccgccacactctgctgaatgaggctcatacagcctacgcagaacatgtcatttatgaggagccactttttgtatacccgcttttatattttgcaaataaaatcgtaatcttaaacgatgcctactattattacagacaaaatgattctggaaccatgcgaaatgatatgagacaggaagaaaccctaaaaatgcatgccgacgtccagcttgctgtctggaatttcatgaaaaaaactccatttttcaaagaatactatgatgaaatcaaactatattttctccatacctatctgtatgagacactgtattttgcaaaactccgggattttaaaccctcctatgctttctacaaagaattagaaaaaaccgttcttgcggaggtgccggattatgcgcagtccatttacagcgctctgattccaaagcagatggagctgtatcggatgatcggggaagggatgacggaggtgaagtttaaggagtattgggagcagctgtgaggcactccctattataaaaaaagcataccagatcatctaacatctgatatgcttatcttttttatctataacttctaattgcgtttttaaaatattattttgttcttctacttcaaagtacttttccagcaaaaagaaaacatttgctattaagggagtagataaggaatttaactgattagccataaataatgatcttgtaatagtatccaaaaaagagttattatgataagtgtctggcaatcggtaatttttgtccgtttcttctttgtgaagccttatgaaacccaaaaataactcccacgtactcataaaagccagttgttcgttaatcctagatgcagcggataaagaaaaaccatcatctgtttggatatttccgcttaccagcctgaccttaatgattgcagctgtcatacaggcacatactttatgccggtctaataaagttttactttcaccatttttcttttggtataaaactcttaatatggtcttttgattgagatattcttcatacaatgaatccggattatcgcaaaaacgaaattgcctgtactcattttccaaatgcacccctagtgtactgacatattgatatttagttaaatatttctggctgttattgccgttttatggtacaataaaagaaacggcggtgatatcctatggcaagaccaaaaaagtacaaaatcaaacttacggatgatgaattaaaagaatttaaatctgtcatccgaaaaaataaaacatccaaaacaatccgatgcagatgccagattattattgacctggatgagtcccacggaaaagtattgactcatgagcagtctgcaaaatcaaatggtgtatgtctggcaacagtaaccaatactgtgaaaaaatattttgagggtggtattgatgcagtaactgagtttaagcgtaatgttaattctgataatgcaaggcgtgtgctcgatggacgtgctgaagcccgtatcattgaacttgcctgtggtccggtgccggaaggacattcaaggtggaccatccggctgctggaagagaaatcaaaaattgttcttgatactccggtcagccgtgaggcaatccgaagagccttaaaaaaaacaaacttcgacctcacaaaaacgactactggtgcatccccaaaaaagatgatgccgaatttatagcatgtatggaagatgtccttgatgtatatgaactcccatacaatcctgaaagaccagttgtatgcatggacgaaaagccttaccagttactgggcgatgcaaggaaaccactgcccatgcgtccgggtgacaatcagaaaacagattcggaatatgtcaggaatggtacctgcagcatatttgcttttgtcgaaccgcttggaggcactcatcatgtcagcgtgcgagaacaacgtactgcctttgactgggcagaagagataaaatatctcgttgatgtcatgtatcctgatgcagaaaaagtaattcttgttatggataaccttaacacccataaaacggcgtccttgtataaaaggtatccagcagatgaggcaagacgaattatcaagcgtttggaaattcactatacacccaaacatggaagctggcttgacattgcagaaatagaactgaatgtaatgaccagacagtgtttgtcacgaaggattgaaaacattgcaaaacttcgtggagagttagctgcgtgggaagtcgagcgtaatacagtcgcagcaaaagttaattggcagttccgaactgccgatgcaagagtgaagttgagttcattgtatcctatgtttacaacagcttccgaataggaagttgttgtaatgctaaaaatcaatgtgccaatacactagttttttaactacaccattataaaattctaaaaaatctattttattcattatgctttgatccttacatcatccggcatttctattttcttaatggcctttgcaatatcaaaatctccattttcatcatttcctattccttcaatttcaacaaattgcatattgtctacataaaatccgtatgtcaatcctaacctctcttctttggattcactatattttttcattgcatataaattccatactttacacattgcagctatagtaaaaatgaaactaataacaataacaatttcatttgccatattttcaagcctccgctctattcacaaaacttttaaaaaagcctctctggaagaaagatatatcacatctcttttctcttccatatttctcctcttgttacgtattttaccatgtatcaccacgatacattcttgaacttcaatagcatttacaattgtgacattattgtgcattctatgcaagcattttctactatctttgcagttgttttgtaataaccatatttcaggccccagctctcttctactgcttcatacataccttcaatttctccaccagtctccggttctcctcttccccccggaccgcaagcctgatataatgctttccgttatgtatcttccctgtcaggtccttgatcaggatatttttctttaaaagtctgccagccagtgcctcactgctcattccatctaaaatttcgcacataaaataatttgcctgggacggatagacttttaaattttctatcatacacagttcatcaaaaaagcgggacctttcttcttttatttttcgcagggaatctgtataatcgcttttatacttgtccaggatctgcatgaaaaattccgccatagaattgatattccatatcgatacgtctttctttaagtgttcaatcatatccgtatttccactcgccaagattccaagtctgagtcccggaacaccgtatgattttgaaatactttttaccacatagagattccgattttcttttagcacctgttccgataataatgataaatcttctgtatccgcgaaatcaagaaaactctcatccacgatcagatttatgccacattccttactccactgcaggaggctctttatcccgtctgcatccatgcaatgaccggttggattatcgggattgatgaatacgagcgtatcaactggattttctgtgaagtattggattaactggctgtccgtgtacgaaaaatcgttttccgtacagtcgtatgcaataacatctttctcccagcggtttggatactcttcaaaagtcggacggatcacacccagttttccgttcagttcttccagtaatcctttgatcagctctgctgcaccatttccgatcacaatgtgttcttcatgcacatcaaaactctttgccgccagaagcgtattgactgtcataccagacgggtactgacgaaccagcacatcaaaattagattccatctcctcctgcatacgctttgtcggaaaatatggatttaccagataacaataatcctgtaaatgagggaaacgccagtatcctccgtaccgttgcatcagatgatgatatcgttctacatcatcctcgataaataacgtctgagcaatatcaagatcctgtatgtcatcaatctcataccacaattcgccatttagcctttttgccttcatcgtatttttatcaagcatcagtatgagtttgatcacagtctcatagtattcattatttcccataacctttgcatatgcttccaaaaatggaacatatacatctcttgaaaactgtgctccgaacttatagatatttactgttttataataatgttctttctcatggtattttaataattttcccggaatgaaatcagtaatattatcgtcctgatcgaccacgatgcaggttccatccatccagttttcgaatttgtctaccaatgcaagcgtatcccggtcatcttctaacagcatatcgatcaggttctcttcaaaaatcagatctgattccaataacaacgtatcttcctgcatcatctgatcttttgccagagacagcgaaaaaatattgttcgtcttatggtatacatcatttacaatatactcaaccggtgttttaagacacaaagaatcaacaaaagaaaccagatttttatgctggtatccgacaaccagaatgatccggcttaatttttttctgtcaagtatgcgaagcgcacgttcaatcagccgcacaccaccgacttccaccatacatttcgtattatttttcgtcaactctcccaaacgttttcccattcctgctgccaagataatcgcctgcatgccatatctcctttattttgtcagataacagtcaaaaacatatttatcctgaattattcacggagcaatctctaatctgaaaattgcaccatgaatcaaaaaatgatccatgtagccataacgtctctcaattcgtcagaaaacaatgtgcaattaaaatacagcagctatgtggctttcagccacgttcacggctttgctgtgaataattcaggtttattgttccagtacagatcattctgcggtttcacaagctcacactttacccctaaaaaataatagcagttgatcaacatgacatatattaatcaaccgctgttatcccatctctaactatattaccttaataataccagaaccgcatccttactgctattatactgtgccaacagactctgtgacgcatttaccaggatctggtttgtggtatatcccagaatttcatcaccaatgtcagtatcacgaatattgctctcggactgctgtgtattctgggatgtgtaatctgcattttttaccgcacgcgctaactgctcccagactgctccaaaatcgtctctccatcctgctgctttctcaatcgcatcctgcaccatggtgatcgattctgatgccttttcatgattcgatacatcaaccttatctacaccaagactttccttgctcgcatttacaaaattgatgataatactctgttctgccagagaacctgtctgaacataaaaaaatcctggtttcgcttttggcgttccctctgcaagcatgtaattctggttaaaattggtgtcataagcaatatggtcgatctctttgttcaactgatcgatctcgtcctggattgccttacgatcttcctcggtgttcacatcatttgcagcctgtgttgtcagttctaccatacgatccaatatcgtctgggtctcttccaatgccgcatctgctgtctgaaccaaaccaattccatcctgaatattattggatgccttgttcaaacctctgatctggtttctcatcgcttcagatactgtaagctctgccgcctcatcatttgcatgattgatcttgtaaccagatgcaagtttttctgaagatttgtctacattttctgtattaatcttcaactgccgatgttgatacatcgactgcatgttatggtttacaactattctgcccatatttccctccgtgtcctttttttccaaagatacgctaccgcttgtatctctgtaatcatcttccttgataattagctatatagtgtatcggcatttgccctctttttcttaatcttccccgcaaattttctattcataatatgtatcatttttcatttatttcagccgatatatttaatagtattttttattccttaaaggagtcccctattatgattttccctgaaaactttttccaagacgaatatcgcaatggttttttagttccgcagatgatgaagcgcgcctgggcggcaaagcttgaattactgcagatcatcatcgatatctgcaataaatatgatattacctattttgctgaatatggcacactgcttggcgcaatacgccacaagggcttcattccatgggatgatgatgtggatattgctctcaaacggcctgattacaacaagctgatccgcgtccttccttctgaacttccaaatgggatcgcactcgccggaccttatgcccaaacagataaattgtttttgccaacctgccagtctgtcgttgcaacggtttcgtccgactggaagctttcagattatatgcagcgttttcacggctttccgtatcgtaatatggggatcgatatcttcccgcttgattatctcccggatgatcccgaactgagttcccttcaacagtacctggttcagaaaatcgtgttctgtgtccgcaactgggagaaaaccaacgagatcacaagggaagaaaatgtaaaagagatcgaatcgctatgcagtacccacattgcacgtgatgcaaatattcttcgcactctgatacagctctcggattccatccgcgcgttatatcaggaaaacgacggcaatgacattgccaaagacggtttctggtttacaaatgaccgccagatcgccaccccaaaagaatggtttgctgaggcgattaccgtcccattcgaaaatattatggttactgtgccaaaacagtatgacgagatccttaccaaccgctacggtgattacagaaacccggtcataactgttcaaacgcacacctatcctttttacaaaaccgaagaacatgcattaagaaactatctggatgctcatggatataccggaagtattgatgattttgtgagaaaacattattcagagtaactccattatacctggagttcgcctgtcgaaactttctcacaaaattcttctacgcttcccatgaagcccaccgctcttatctgttttacaagctctttctccatttcagcataaaacggataatcatgaccgccttttacctgacttggtgtcatataatcgccaaactgagcctttaacacctcatcataattccccggtaccgggatgcgcacatgctcaaatggcacataacgcatctcgtcaaaccattcattttttacacggtataaacgtggctttgccatccacacattccaattcgtaataaactctgtgtcatcatcctgatacaggctgcacagtgcatcgatcaatcgccacatccagtttttaagatcatctctctgagggatctccacattacaaagttcgccatatccttttaaatatccctgtaattgcccgctttcctgcagacgatcccattctcttaatattgcaattccctgacggatgacctccttctgcagctttgccgtttccagatcttccggcatgcgatccatcggaaaaatgtcaatcccgactctctggtatgggaagccatgaaatctgcgcatataggaattaaaatcccacagcgtttcatccgcgatcacacgcagctgcggtacatacgctgcattttgaagtctttcagaagctgcgtacattcccgccacaacaaatccatgtggaagcccctttggcagaacgcggatcagttcattataatcttttcgtctcagacagatatcaatatcgtcatcccatggaataaatcccttatgacggatcgctccaagtaaagttccccagtccgcataatactgtaaatgatgcttttcacaaaccttacccacaacttcaagtacttccatctgcgctgcccatgcacgtttcatcatctccggcacttcaaagccgcatctgcattcttttttgaaaaaatcctctggaaattccatgcttttcctctttctagtataaatgtttttaattaactcgactcaataagtattccatgatataatcttcatataattgtatagggaggtcatattcatgggcagaaaagtaaacacaataacactaacagaggagcagcgttcgtatcttgaattacaaactcgtgctagaacaatacaggcacaaaccgtgtgtagagcaagaatactgttgttacgtgctgatggtgtttctattaatgatattgctgataaagtaggcatcaatagataatagatgcagtgtaatgttgtgcttgaataaattcaaagagggcggtgtcgaaaacgccttgtttgatgctcccggtcgtggtcgtaatgctgaaataaccgatgacgaaaagacgtggattataaatatcgcatgtcagaagccggttaatcttggctattcagcagaagtatggacacgtgcccttctcacaaaacatatcaataagtttgcagaaaatgcaggttatacaaggttatcaactataagtcagtcaaaggttcgcacaatacttgaagaggcagatattaagcctgacaaaataacttattactgtgaaaatcgtgatccggattttgaccaaaagatgcacaatgtccttctggtatataaacagctatcattacagttcgataaaaaaggacaacttcttccattttgtgaagatgatcaggtggtgcatgtactctcttatgatgagaaacctggaatccaggcaattgccaccacatcagaagatatccagccggataataatcataagaccataagccgagattatgagtacaggcgtcttggaaccatttcactgcttgccggaatagatttgcaaacaggtgaggcgattccactcgttaaagagtcccataacagtaaggactatatcgaatttcttaaaaaacttgataacaagtatccaaaatcagataagattcgtctggtgttggataaccttaaagttcattcttctgaggaaaccagaaaatacctcgcaaccgtaccaggaagatttgaatttgtatttactccaaagcacggttcatggttgaatcttgttgagggcttcttcagtaaacttactcgccagatgctcaagggcattcgtgtaaaaactaaggatgaacttgtgcagcgtatatataaatactttgatgaagtaaatgaagaacctgttatatatcattggaagtacaaacttgaagaaattgatccaaatgaagaagtggtggttgatacgttgccagtcaaaaagtcgagttaattactgacagctatactagtccactacctcaggaaaatgatacttcataaaattctctttattttcgaccgcgctctctttcggtctgcccagatctgctctggctcctatttttacctttacctcaaggaagacaggtccctctatgcccgcaatgtattgcagttgcttttgcagatcctctaaattgtctacacttgccacataggaatacccacattcccgtgctgtcttgtaaaagtcgatcccaactgctccggttggcattcctccaacagactcatgcgcctcgttgttcagacagatatggataaagtttttcggctgctgttttgccagaaatgcgagttcccccatgtgcatcagcactgctccatctccctcgatacagtatacctttttatctgtcctgttctgtgcaatcccatatgcgatcataccggcatgtcccattccaccaacggtcagaaatgcctgcttgtgatgtcccagctgcttgtcgcactgttcatacacttctctggaaattttacctgtcgtcgatacaatgacatcatttgcatcaacctcttttatgatctcggaaatcgcatcttccctgcaaagggtataatcattctggtatgcgttctttacccctgcttccagtgcatcccgctttacaataattgcaaactgcttattttcggaaagtgcttccttggcatttttaaaaatattttttatttcctgctcagtcatttcagccgaaagtatcgcatttggtatgtctaacacatctaaaatacctgttgtgatctctcccataaaccgatgctgcggttcatctttctttcccggttctccacgccatccaacaacaaataaaatcggaatatcgtacaccgctttatttgcaagtgaggttaccggatttacaatatttccaattccgctgttctgcatatatacgcatgccggttttccggtggacagataatttccgatcgcaataccaaccgcagctccctcatttgccggaacaaaatggtgaaatccacattctcctgcattcagatagtagcaaagtggttgtaatgccgaatccggtactcctgctatcgtttctattcccagagatcttatttcctctacaaatgattctactttcatatttttatggtcctttactttttattcagctgcggaacaatgatattatcgataatataggctgcggtctgatcgatttcttcaaatgctactgtcttaggcagacgaacgtcaaacacatctgctactttccgtaccagatcatctgtgtaggtcaggctgccatcttctacattttcaacaccgtccagagcgatcgacttgcggtttgcttccctcatctgctctaaggtaaataccgattcatcaatgtatgcctgtaacttatctcccgttgcatcgattctgaccggataaccaccgatttctccaaatacacccggagagaatatttttctgctgtcgctctctcttacagcatcgataatggaacagataatatcgtaattgctggatgcgttcatcatatttcgtttttcgtcagtcggcattgttattttacaccgtgcaaaaatatcattctgatcgatatccagttctttcccctgataaaatacctttaacagctgtggaacttcctctgtctgtccctctttactgatcacgacatcatggaaatgtgctgttgcaaacatcacatccacattccagaagtccgggatctctttgatctcggcaactgcatatttgatccgcggtaccagatggttcatattgccgcttccgaaatcaggatatggctgtcctgccgtttttaaccatggaattacggcatcagaataagatgtattaattacaattccgttcagatcagcgatttcacatgctttcatgatatttttgatatacttgatcgctaacggagaccagataccatacgcacgtaaatttttccatgaaatactgccatacttcaatcctgaatacacacggcttgaattgacaataaaatcaggttgatactttttgatacattctgccacctgtccgacttcatcaaaatccactccgctctcaatgatgatctgcgagcgattcacatgacggatcaatgcactgatgcggacaatattcgcattgttttccagcttctctgcatttcttccgaccacgacaagtttcattgatgcgtcgtttctactggtcagaaaatccaaaagataggttcccacgcttcccagtcctaagatcatcacggtaatgttattgtcttcaatatgtttttttacaagctgtaatctggtttccagatccttcattttctttcacctcatccttgaatctatcctaagccgccttgttatgctccgttccttaggctttttattattttaccgcaaccatacggagtacaaccgggtccgaatccccaaatggtgcaaatccggttttttcttctgcatagataacctgaaagccggtttcggtcaactgctgtgctaattcttccttttcgatgaatcttctgttgtgtccattatagaagtatgtattttttgccaccagagttccttttccaaacaactcatcctttacgcatcttacttctatgaaaaattttccgcctggttttaatgctttataagcattttttatacaacattcctgctcttcctctaaaatagcatggatggtaaatctgctgtagagataatcaaactcttcgcttctctctcccagatagctgacatagtctttgttttccacatttatttttccggcataaacctgcgcaatatgctcggttgcaacatcggaagcatctactgcatagacctgcatcccgttttccatgaaatagatactgtcccgtccgtttccacaacccatatctacaatttttttgtctgtttctacctgctcaagtacccatcttgcaaataatgacggctcattcactcctttatttgctgcataaaatgtatcccagtatgatttatccattgatcacagtccctcctgatttaattctagtttagatactggcgcatgtcccactctcttttcttctggtggaagtttcatataatcgccatatacgtatgacaaacaatcgtcataggccctggttccccagaattcttctccctcaaagacatatttttcacgatctaacagccagtcccttttaaatccgtatctggaatacagactgttgacctttttattctcctcttttcccggtgccgtaaacagcagacagcggactctgtctgaaaccttatttcccttatgtaccatcacattgcgcaacttatatatggtgcttttgggaattggtgccaatattttgtataccagacgtaccagtggatttttctcggtattttttccaacctttgcccacaacatttttctcagtacaaaaccatatgcatcctgcaaaatacggaatggtaaaaaccacggcacattatccagaggaaagatatcgataaatactccatttttatatggaatatgctcctgtccgcaacggacataagttgtattcaaattgcgcagcttggaatatccccagaggtaatattcatcggaacattcatcctgaaggaaatattttgggggcagttcttttttgcatgcctcgcgaaatcttctataatctttacgtagcattaaaatatccacatcatcatcccatgggataaatcccttatgccttactgcaccaagcatggttccatatcccaacacatatttgatatggttttcttcacaaatccgatgtacttcccttagcatttccaactggatttttctgatccgctcccgctgttcttctgtaatcttgatttcttccatattatctgttcgctcctgtcattacttttttgcatatctcgcgatgaactttttcaccacaggttccatcggtatttgccattgaacttcttgcatattccattcgttcctgctgctttggatcaatgccagccaataccatatttaaaaaatcagaaagattctctccatcttctctgaaatagtttgaaaaataatcacaaaaaacacaatccttacgattttcgcttttcccggtcagtaaataggacggtttgccggtgaaattatactgcattaccagtgagctgtaatcgctgatcatggcatccgatgctttcattgccgcttccgccgtatcactgtcatcgatcatggcatttggtgctttccggatgcgctccaacagcgtgtcatattccgcctgcttttgtaacattgatctcatcgtatcaagtaacagcgggtgcggacgccagatcaatgccagcctgttatcctgcaagatcggttcgatcagtttctggatctgttccagccagctggcatttgtcaggcaggtggtaatactcgtatttaacaggatcactttgcgattttctgtcactagcttccactcatctattttggaaaactgtttttccccgatcttatagacagcatctaccttagggcttcctaataccagcagtcttctttccgggtaaccgcaaaatgcgtacgcatttttcagattttcactctgcaggataaggtaatcactgtatactgctcccatattggcacagaccggtaacatattttcgtatttttcacaaaaccctgaaatataatacggtacatataccaagatacctccgccttttttcagttctgtggaaaagaaacgcggatgcaccatcgttactttattgtactggtcatagggattgtggacatacataacatccggcatttcctgttccaaaaaataggtctgataatctatgatcggaacttttttagcaaacgccgctccctcataatgttctttttcaatctccccatctgtgtttttggaatagtatggtatcggtatgacctgacattcacagctttcatcccggtctgcagcttcccatatgctctccagagaatcccacatcgaaattttatacgggaaaaaggcaacttttatcttcttcgaactttcctctttgttcatctgtcttacccttacaactgttcttcgtattttaaataatctgctttcgtattgcagttttcccatgttttaagaggaagcagctctctttcctcctcactgatctgatggaaatattcctcaataaacttaagatttgttccctgccacatcgtctccgggctgtctgataccagctgcttcacaacgtctgtatcagcaaatttccagatctgtccggaattataaattgccagaaatggctctgtgatctccaccgatccatgcttggtgctaaatttatatttcagttcatgcgcctcgtttatgtatgcgatcactgctttgttgctgtagatcgttttattgttataggtagcaacactccgcgttgatctttttacatcatccagggatgcctcatcaaaaaacagatcgccctcgatcagggtaatttctgaactgttatcctgcagacattgttccagccccagctttaatgtataaccggttccaaattcctgatagtttggattgtataccatctggatttgaaatggaaaatcctccttacaggcagatacatattcaaccagtttctcgtactggtatcctcctaccagtactacccggtcaaaccctttgcattttcttaagatggaatataacagtgtcttacggacatcaccctctgtgtaaatccctttcaacaccggttctgccatatcctgattaaatcggctcgacatgcccgcaactgcaactataaccgttttcatttactttccttccacctgtcttctgtaatctacacacattttgatgccctgttccaacgtgatcgtcggtttccatcccgtacgcgcctttatctttgcagcagataatacacgtctctgcggatcggattcacgatatccttcaaaaataatttccggtttttcaatcccgatcgctttcgcacatacatctaccagttcgatcatggaaacttcctgctccgttgccacattataaacagttccgtccagagccgcatctgtgtctgcaacggcaagcactgctgcacagctgtcaatattatgaaggaaagttcttttatttactttggaattttctaacagagttacttttccatcttccatcagactggtaatgacatgcgggatcacatgttttgccagcagctcatttttactgtaaacattggcaaaacgaagggaacatccctttatcattccacgctctaccgcatctttcataaaaaattctgtcagaagctttccggttgcgtaactggtcctctggctgtgttctgctgttgccagaagcaggaaatcatcctcttttacgccgccctctttccaggatgccatcgaataaacctctgatgtggaacagttgatataactgtctgccccgacacggatcgcctgctccaaaaactttttcattccgatcacattcgtctcaaatgtccggtcaacatgataaaaatgttcggtatgtacgactgctgcacagttgatgtagatcaccttttcatactctgcttttcttgcggttaccttttcttccagttctttcatctgtgcatcgttattaatatcgccttcaaaaaattccaggtgttccgaatcgatcacatccttaatcgtttctgtggatgatgcaaaaaaattatcaaaaccgatcacatcatcgccccgttttacgatctggcgtgcaagctcgttgcctgtcattcctgtcattccacttattacatataatttcttcatacgctgccttctctcattactgtaactttattctaccggaaccaaagataaaatgtctttgatcgacatgcagtcctgacttgcctcatagcatctctcattttccagaacagaggtgactactttttgcattgccggaaatgctgcccgtaacatatggtttgcataaataaccacatttatcttgtgctccttaaattcgctctctcttacctgattgtatgtcgtcggtaccacaacgatcgctgtatctttatccgtttctctgaagcggtctgcaaattcgaagatctcatccggagtctttgcacgggaatggatcataataccatccgcgcctgcttccacatatgcttttgcacgctctaacgcatcgtctactccctgatccagtatcaggctttcgattctggcgatcagcataaacgcacttgatccgatcgcctttttgccttctctgatcttctcacagaaatgttcgatgctgtcctgatgctgttccacatcattgcccaacagggagtttctctttaatccgatcttgtcctcaataattactgcggaaacacccatacgctccagtgtcttgatgttgtagacaaaatgttctaccagtccgcccgtatccgcatcgaaaatgatcggttttgttgttacttccatgatatcatttacggaattaagtctggatgtcagatcgaccagttcaatgtcaggttttccctttgcagtagaatcgcagaggcttgaaatccagatgccgtcgaactgtcttctttctccatccttttcaatacttgttttttcaacgagcagcgcgctcaatccgtcatatgcgaccatgactttaaacacttctccggagcagatcttccggcgcaatacctgtcttcttacctctggaagtccacggctctcactcatcgcattttcaaacagatgcagatttgagcttttataatatgggatttcaatcagttcgccaccccactcagctaacacctcaataacacgatctctgaccgctttctgatatccatcggtccagttatctccgtggattacgatatccggctttaattcccgaatggtctcatcataatagatatcattctggacaacgacctttgatacacctttgatattctgaatgatcctcatacgttcttccaacggaagtatcggatatttctcatacattgcaacatacttgtcacttaaaaccccgacggttacctcgccaagctccgctgctttttctattacattgatatgtcctgtctgaataatatcagtagacatgcacaaatacacttttttcatttctatacacctatccttagtctctctttgtaaaaagaatccacttcatccgaaaatgccgctatctcatgctctatgtcataggaaactgctttcatctgaacgctcatcgtctccggttccaatatggcatactgtgcatttgcattatgattacgtggctgtccaacagaacccggattaaggaacacggtttttttccggttccggtattccttacattctgccggataaaaatgttcaaaataatgcgggatatgggaatgtccggaaaagacataatcgtattttttatacgtttcctgatcctccccatgagaaatgctcttccagaagaaatcaacagccgaaccatggactgccagacattttttccctgccagctcaaattccatgtggccgctcttgtccatctcgttttccagatactgcatggtctgcgttgtcagcatctttctggtatgtgctgcacactttttcccacgttcgctggaaaatctcgaatcgtctccatccacgactgccttttcatgatttccccagatatttaccaggatcttgtgttttggcaggttctttaacttttccaccacttcattggaatgtggtccatagtcgatcaaatcgcctaacaacacaataccttcaaattcctctattttttctgtttcccagattttatttaatgcagacaaatttccatgaatgtctgacatgatcaagattctactcatattttatccaatacaaaaagagttcacgaaaagtattaacatttaccatgaactctttccctttaaccgattacttctctggctgctgctccgagcttctccagctccggctctaacgcacggaacgcatctgccatttttgcgtcatcttttccttttactgcctcccccaatgcgatcactttctcattgaaagcctctttgacgattctctcttttccttcgttgatcacatccagcgttgcgttcaatacctggatttcccagtttatcgcattgagaatactatccagaaacttatccgtatcatccagtctctgtccggataattctttaatcaaaattcctacatttttaacaactttgtcattataggaaacaagtgtctctaacgcctccagcttttctgttctgctatcctccatgattgccacctgaccttgcggtcattcctttcgtaaagtatttataaatctatatttatttatcggctttttcttcaaataccttaatacaactttattcgtgtcccgccagaatacattcgatcacttcgcggactgcgccgcttcctccttggcgtttcgttacataatcaacgatcgcttttacctcgtccatcgctcccggcacactggcagaaaatcctaccgcctctaaaagctctttgtcattgatgtcatcgcccacatatgccacttcctgtaacgaaattccatactgtccgcacagttcctttactacggccaacttgtcttttattcccattttaaggatatccagatgcagtttttctgcacgtcttgcgaccagtttcgtattctctccggtcacgatcccgcaaaggatgcctttttcacgcatcagacgcatcccaagaccgtccagcgtcgaaaacttctttaactcatccccgttttccgaataatacattccgccatccgtcagacagccatcacagtctgtcagaaacatcttaattgttttttttgcgtcctgaccggttttttcctgtgccacacgtaaacgccgttccagcattttttcaatgatctgccagtcagatggttcatcgatctcaaaaaaggtgtcctcactcatctccactgccttgactttgccggaaatacggtttcctgtctcacacaaacgctctttggatgtgatataaaatgccccgttttcgacacagtatccgtcaaattcctgtcgtctcggacgatggaaataatcataatttaatgcctgtgccgttccatcttctgccacattccagttaaaccgtttctgccgtaccacagagagcacactgtcggtgtcctcttcttcatataatgcaaatccccggtccaaatcctctgcggtcagaagtggcgatgttgcctggatcagcacaatatggtcaaacgcatgctcattcgcaaactccagcattgcaaattctgtcgatgccgtgtccgaagcagactccgcgcttcgtccgatcacttccagtttctgaaatgcttcattttcctcctgctgctttacctcaagcagtgtctcccggatcttctcactgtccgttgccacatatactttgtcgatctttgcacagccgcaggctgccgctaccgtccaatataccagtggctttccacacattggtttgatgtttttaagcgggatcgatttgcttcctccccgcactggaataaatgctacattcatctcttgtctccatttcatcgttatcttttacagtctttttgcaagtgccctttgtaacttctcattgtcctcgcgatctcttatcgcgatccggatatactgctttccattgtcaatctttccgctcagatctttgatcaggatattatcttttaacagttctgctgccagtgcctcactacgctttccatttgtcagctcacacataaaataatttgctgcggacggatataccttaagtccttttatcttgcaaagttcctgataaaagagagcccgctcttctctcagccagaccagtgactgtttataatcggctttatatttatccagtatctgcatgaaaaattctccaagtgaattaatattccatatcgccacttttttctttagtaccgcgatcatcttttcatcataacttgccaggatacccagccgcagtccgggcactccataggatttggaaatgctcttgaccagatacagcttcggatattttttcatcatgcgttctgacagcatggatgcactggtatcgtccgcaaaatcaagaaaactctcgtctaagatcaatgcggttccatttgacttacaccagtctaaaagtttcctgatctcttttttatccagataatgtcccgatgggttatccggattgatcaaaaccattgaactgaccggatgctctgtaaaatagctgcacaggctgtctacatcataagaaaaatcatgttctctgctgtcatataccacatatctgccattgcagcgatgtgggtattcctcaaatgtcgggctgatcacacccacagttccctctaactcagtcaaaagttccttgatcagctctgccgccccatttccgatcacgatatgctcttccgatacggaaaaactctttgcagccagaaggctgttgacccgcataccggatgggtactgtcttaccagcacatcaaaatttgacttcatctcattcatcatgcgctcggtcggaaaatacgggtttaccagataacaatagtccttcagatgagggaaacgccagaatccaccgtaccgtgaggttaatgtatgataacgttctacatcatcctcaaggaataaaagttctgcgatgtccagatcctgaatatcgtctatctcataccactgttcgccgtgcagacgttttgccttcaaggtgtttttatccagagtcaggatcagcttgatcaccgtctcatagtattcgttgtttcccattaccttggcatatgcctccagaaacgggacatagacatttctggaaaaatccgcgctgagtttatagatgttaacagtcttataataatgcgctttctccgagtattttagcagcttgcctggaatgaaatccagaatattgtcttcctcatctaccacaacacaggttccgtccatccagttctcaaacttatccacaaggaccagcgtgtccctttcatcctcaagcagcagatcaatcacactctcctcaaagatcagatcagactccagtaaaagtgtgtcttcgcatccaagctgttccttcgccagagccagtgaaaaaatattatttgtcttgtcgtacacatcattgatgataaattcgattggtgtactgatatccagtttgtttacgaatgtcatcagattttcatactggtatccgaccaccataatgatccttgataatccctttttatcaaggatacgcaaaacacgctccaccagtcttaccccaccaacttctaccatacactttgtattttctctggttaattgccccaaacgttttcccattcctgctgccagaataatcgcctgcatcttttttcctccgctcctgaacgtatcgccgttctgttgattcttttttacaaaaattatatatatgtttcgtctattttgccgatatatttattatatcttatattatcacaatttgaggagtaatgcatatgaattttcctgctgaattttttcaagatgaatatcgctgcgattttcttgttccagagttgatgaaacgcgcctgggcgacagaaatcgagattttggaagtcgtgacacagatctgtgagaaatacaacctgcaatactttgcttattatggtacactgctcggtgctgtccgacatcagggttttgttccatgggatgatgacattgatatctgcttaaaacgaagtgactataatactctggtttccgttctgcccgatgaattaccggaaggctttatcacagacggactgcacgctgctgatgccacacgcagattacagaccagcatcattcacacagcagtaaaaacagatccatcctactggtctcttccagattacatcagacgatttcatggttttccgttccgcggaacaagcattgatatttttcctcttgattatattccaagagatccggatacctttcttctggaaaaacttctactcggacgcattttcgtacttttgcgtgattttgataccttaccggaagatacaaaagaagcccggattgtggaactggaagaactcactgcgacaaagctgccgcgaaacgagacgaccaaatggtctttatttcatcttcttgaggcgattgcttccatgtttgacgaaagtgaatgtgacgaactggatctatgtttccgtattccctatgaaaacaaagatcctctgaaaaaagaatggtataatgaaacgatctaccttccttttgaaggtttccagatcgccgctccaaaacattaccatgaaatattgactacctactatggagactatcaggtaccggtcaaatttacacagtcacacgaatatccattttataaaaaaagtgaacaggaactgactgccattctgacgcaaaaaggctttcagggtagtatctgtgattttatccacaatattgattcctttcacattcttgaatccaaataattttgaaaagaggacatcccacccatgaagcaaaaacttgaacaggcaatcttacagcaggacattccagagatcgaagcctgcctgacacgttatgaagcctgcaatcccaccgactttgatcttttttcttacaaaatctcactggctctgctaaaagaagacttccaggcagcctacgatcttgcaaaaacggcaattaccctcaatccatttgatgtagaagccaattataatttcatggtctgtgccagatcacttgggaaatacgccgtcgcttatcagtcgttcctgatgatccagtttgtgcagatgcgatatcggataacagttatcaacgatgagacactggctgtatgggaacaggaatttcaaatacttgctgcagaagacactgacttggagaacgaattttcccgtattgagcaaaaccaccgctatgccatactggacccttttaagaattatcaggaaagtctgtgtggaaaaatacttacctgttataatgggcaacaatattatattgggcttgctgacaactggtacgaatcatactttaacttttcgtttatcaaggatccaattcatgccaaatgtgaattattcccaattgccgatatcagcacaaaatatgacattcctgctgacctcggcaaggtactggttcccatctgcctaaattatgatctcacacagaaaaattccaattacattactgatgctgcaaaagatccaacaaaattctaccgggaatcagcacgagaaaaatactgctatctccctgtagaaaatggtactgcactgcgaacggcttatcccactgtttttggcaccccaattccattgacgcaccccgatgcaaacggtcgaaaaaaactggtattaagcatttttatcgatagttttaattattatctggtcaaagatctcggtcttgaaacactaatgccggaaactttccgatatttttccaaaggcattatctgtaataattattactctggttccgaatggactctgccgtccattgcgacctactggaccggaaaacattccagtcatcacatgaaccttatggaggactaccgctttgactttatgaaagactccaaagtcctgtcagaatattttcacgatgccggatatgtgaccgcaaagatcggtggaaacgatgcagttactccatggcagggatacatccgcgggattgaccgctttacctatcagtattcctcccaggcataccgcaccaaagaagttatcagtgacgtcatccaacagatcgaaacctttaaggatgcctgtcagtatatctggtttgacttccttgatctgcacgatattgccgggggatttatgtgttctcttccggtgcagtccagattgccactggctgcacgacatattgacaatgacatcacaacgacggtaaaacagtcattcagccctaaccgccgggaaatttatatccagcagttacgcgagttagatttttatcttggcatcctgtatcagtatctggaacgcaattataaagatgaagagatcatcgtctcactgttttccgaccacggaaccgctttcatggtggaagatgggaaacctttcctttccgagcagcgtgtcaatgtgccatttatgctgcgttgtagcaatctttctcctcgggtttcggatgagctgatagaaactgccgattatactgctattctgtgtaaactagccggtattccatatcactttgagggaaccgatgccaatctgccccttacatttggtggcaaacaggaacgcgactatacgttttcccagaacattttcccgggtgacccttaccgtgccgctttacatggaaaggattttcatttttatatggactccaccattccggtatcgcctgaccttcgcattgatctgaccggccggaaatgtcttcttaccgatactaagggacaccccgttcaggatgaagtcctcatgaaaaaatatgaagccattataaaaaaagagattgctcatcttttgatctatcctctcgcaggtaattgataataatcatagactttggctcgttgctcgcgtaaataacacaaaatggagggaaacatattcgttcccctccattctattgccgtaaacattttctattcttttgccagtcttgcatccacaacagcctgctgcttcttgtaaaatggatagttatgaccatctgtccattgcgttggtttctcgtaatctccatacatatttcttagtaccgcgtcatactcctttggcactggaatttcacttgtctcaaacggtaatcggatactttcactataccactcctgtttatagcgacggctcgatctatttaaataataaatcagttctgcatagtctcctccgtcatcgttatacatctgcagcactccatctgccacacgcagtagctgatgccatatctttttcgtgcggtcaatagttactccacacatatcttctattattcttatcgtttcctctgtttcatcttttgaataaatcgcttttattaacatgcgaagcatactgcactgtatatcttcttcatctttatctacaggcagcttatccaatgggaaaatatccactcctaccgcataaggacatccatgccagcgttccagatactccttagtataattcacatagtttgaattgacaactcgcgcaaatatctcgttgtactcttcgttcgcataaatactaagcaaaaagcatccatccggacgttctccattaaagattcgtaaaaaccggttatagtcatctcttttcattacaatatcaatgtcatcgtcccacggaataaagcctttgtgccggattgttccaagcaaagttccccagtcggcaaaatactgtatgtcatattctttacaaatccgatctatgatttcaagcacctctatttgtgctgcccatgctcgtttcatcatttcttctatgtaaaatccttctctttcttctcccctaaaatagaattctggaaattctgccatatgcctgactccttacctttccgtgtattcgcgaaaatgatgcttataagttatcttttataatatcggcatttcaggaacaaatattagtctgtcaacagattttttcgcacatatatacctgcaattccataccgcttttcattgcgaatctttttaaaatcttttatactattagcagataacacatcggaggtcatacactatgcaaacaccaaaagaagagatgatgcagctcatctccacctgcattgaaaatcaggattttcagacagcccgcgaatgtctgaaaatttacagtaactctttcggagcggatgaattctttgattcctgcacactgtcactccttaatgataacggacccagagtttctcttatctgccttgatgtcagtgcctctacgttagaggattatcttgcagtcgagccctataagaatcttgaaatcatcgactttgtcggcaaagattatatcaatgacctcacgacttaccttaaaacatgtagcagcaaatatttatgctttctggaagagaaccaacgctatgaggcatcaaggatcgcatccatggtccgtcatctcgagcagataccgacattgaatgccgttgtctgcacgcgtaaccacatagatagcgatggcgagatcattgcacatcctgattacgcttatgaagatactctcgagaataaaattcttgatggaaagcttcttttggaatattccatccatgcaaatgtcaatctgtatggcaccccgtcaacactggtattatctgtcgcatatgcacagggactccttttgtctgacgctcatgtaacacctgatatctgtgccatgtcacttctgtaccaattattacttccggcatgtatcggctatctgcacacaccttacgtttcgacatttttggaaaattatcgtgatacctctgaaacacagcttcactacgaagcgtacatccgttttctgtctgacaacggacaactttcctgcaatacgccggcacatgtatctaccacatctcctgctcctctgaaagagcctcttgcccgtgacattacatttatctccggaacatgcggtggagagtttttcaatattaagcccattgcagaggaagccagccgccgtggttttcatgtgcattttacagaagaccgatacgcaaaagcagagatcggtatctactcccagcatatctgccatcctgaaaattcaaagttttctgttattctgctacacgatatggcacagggtagtgactcttggccaaatctctgggaagtagaacggtggaataattttgacattggaattcttccaggcagatcctgggcagaacgctggacagattgcagctgtttctactatacgcatccccgcagtggtgtctatgaactgggctatccaatgagtgataccatacatggcgaagaattgcagaaacgcgcatctgaacttcgccgtgaacttggactaaaatatgactacacaatcctctatgccccttcctgggaaaatgacggcaaggaagatgatttcatacaggcattatcctctctgaaagtcaacctgatcatcaaacaggcatgctggaattttcttcccgagatccaggcaaatgtcgaggaaatgcgtaaactgcacgaacatcattatgacaatgtctattatatcgagcaggaagagagcatcatgaacgcgatcgctctctgtgatcttctggtctctgaggagtcaagtgtcatggcagaggcaatccttcttaacaagccaagcatcgctgtaactgactggttgatccctgataaaactccaagccgcaaagcaagcgttcctatggactatgttatcaaatgtcataaggccgaactccgtgacaccgtagacgctgttatctcacatgaaatcccatgtgaggaatacataaaacgtggctggcgcactttcagtaatgccgggaactgttgcaaggatatcgtcgatgccattgaatattttacacagggagccgatttcgtttcaaccggggacgttcccgactttctgtccaagcaggtaactgcttcccgctacacccgctgtactatgtggaattaaacggacggctgggttttcgggaaatattgaccacctaaaaaattagtaaagataattggagaattgatcatgaaattactcttccttgattcaccttctttcgggaaattggatctgattgatgcttttgagcaactgggatttacagttcagctttttaaccatgaaaaactgcacgaatattgttgtaaagaatttgatgacgctttcgacaactttgtcgcacaggactgctatgactttgttttctcgctcaactactatccatccatttcaaacggatgtaaccgcaatcacttaaaatatctgtcttttgtatatgacagtccgttggtttccctgtattcgtacacgctgatcaacccatgtaactatatctttctctttgacaaagctctttaccttgattttgccaaagaggggatcactaccatatattatctgcctctgtgtgcaaacactgcacgtctgggtgccatgcagcttccttctgacaagcgttctattttatccagtgatgtctcttttgtcggcgcactctataatgagtcccataactttttagaccgcatgacagatctggatgactacaccaaaggctacatcaatgccattatggatgcccagatgaaggtaaatggctatttctttattgaagagctcttaacccctgacattatcgcctccatgaaaaaatctctggaataccatacgcagccgggcggcaccgaatcggatgcctatgtctatgccaattattttctagcgcgaaagatcacgtcgatcgagcggcagaacctgttaaaagccgtgtccgagcgttttgacaccaaattatacacacataatccaaccccggcacttccttccatccagaatatgggagctgtcgattattatgatgtgatgccgcatgtattcaaaaacagcaagatcaacctcaacattacgcttcgcagcatccgttccggtatgccgctgcgcgcatgggacatcctcggagccggaggatttttgctgagcaattatcaggaagatttctttgatttctttgtgccgggtgaggactttgatttcttcgacggaacagaagaccttttaaccaagatcgaatattacctgtcacatgaaaaggaacggaaagacattgccgaaaatggcttttgcaaagtcgccaaacaacacacttacctgcaccgggtacgcaccatgctcgaaaccgcaggactttaaaacaccgatatttttgataaaggatagattttatgactgagcatgacctgcacattaccatttgcaatccaacttataacgagtccgtgtctttgcaatttttagacatccttctggacgaaacgctgctttatgacagcacgatctatgtcccaacggcatgttttgaaacagtaagcacccgaaatcaccgcctgccgtgcaagcaggtctatgaattgctgctgcgccttgccacagagtatccggtcattcttactgcggatgcaccggctgacctggagcaatacagtgtactttcttcctcacccgaaccagtcacgtttgattccttaaaagcggattgttatatcgtctcccgctacaaacagctcctgcagcaacaggactattttgatgcggctgtcagcagcctgttagagcttgcccagtccatccagaagcaggaagaactggtctcgtatctttcggatatgctgtctgaagcacctgcctaccagtacctctatgccggaagccagccgtttttaatctacaccggagacagtgtctgctaccagatcctgaccgtatttgccagacagtttggcgcggcgcttcacaggcttggctatctcgtagaatattttgatctgtcatccgaagattttaccgaatcctaccgcctcatcggcaggcattatcaggcggtcatcggtgtccagagctatatgttttccgtgaaactgaataacggcatgggatttttacatgacaaaattggggggccaaaatataatttcctttttgaccacccgtccagattcgaaaatcatctgaaagatgttccaagccagcttacgctcctgaccgtagaccgcaattacgctgcctacgccagaaagacttacccggtcgatgccatcttttttccaccgggaggcatacgcacctcgtttgaaccacaggaacgtatttatgatgtggcctttatcggaagctactttgataatttttcttttgtgctggagcttttttctgaatttgaccggaaagaacgtttcctcgccaaccgtttctggctcatcatgaaaaaaaatccatccctgccggcagaacatgcgctgtctctggcactggaccactatcacatgcagctttcctggaatgaatttgcagaacttttccacaagttccgggatcttccggtctatctgtccacctattaccgcatgaaggtgttgaaaactcttctggatgccggtattccggtgcatgtatttggtacaagctggagcacctgcccgctccgtgaaaatccaaattttctctggcataacaaagacctctccacgagcgaatgtctttctatctggcaacagtctaagatcgcgctaaacacgatgacctggcacaaagatgccattaccgaacgtattttaaatgccatgcttcaaaaagcggcagtcctcacagagcgcaatccttatatggaagaacatttttccgacggaaaggatgtgctgctctatgacttagatcagctttctgccctgccagaacttgtgcgttctgcgctctctgacccggcacagctttcccggatcgcacaaaacggctatcaaaatgcccttacagaccatacctgggacagccgggcaaaagaatttatacatattttagagaaatccagtgcacaaaaaaatgaggggtaaatccctcatttttcttttactccgctgcccggatgattttttcaatctgctggcggaacgtatagtatttctgaaccgtttcaaacccatgacgtgcaatacggttccgctcgctttcatttcgcagataaaaatctgcttttgcatacagatcttcgatgctttcataaacgacgaaatcatccccgatcgtaaaatactccggcatctctgcctgaaagtttgtcagcaggaaaccgccacatcctaatatatcaaaaacccttaacggaattccactttggatgatcttcagtgaaatattcagatttatcctgctggatttaaaaatttccggcatctgcttataataatctgcatatcccatatattctactttatcgagacgggcatccttatcggtggaatacagcctgactgcatgatgactggacaatactgccagtgccagataccgttccctgccagtgatctcacacgccatcatatattccagttccgcttttgtaacagccacctctccattagatgctttctgatagcacgcatttaattcctgcaaaagcgcatcatctagcaggtctcccagaaaatatccgccatacaccttcatctgcgcctggaggattccatcgagatatcctctctgataagtatttagcggccccatataatactggtactcggtctgatagagttttccgaccagagatatatccgtctgatcatcacactttgccgtataacgtgaaaacgtctccacatctgctgcaagcggcatatgataagctgcgatcccctgttttttatatttctccgcctggatccggtcaaaaaagaagatccggttacaggaatttttcatcgtttcgatattgcggatatggatcggtgcatcatacacccacgatacataacgaacctgctccctctcacacaccatggacaccaatggtgcataattgatagaaaacaccatatcatattttttctgttttaacttcttttccagaagatccacgatcccatcatccacttcccagtcactctgctggtaaaatagggtatcatattctattcccaactgtttccatgcacgttccaccccttcattcataaaggaatgccactgatagaacaatattttcatcgatttgtgctctcttcctcaattatttgcattaactgctctgcacgcacttcccagcttgccatcgcacttgccttattttttgccgcttttgcaatctctaagcgtttcttttcgtccgtaagcagtccatttaacagcccaggcaatttttctaactcccgtaactcaaaccttaccgtttcgtctctgtaaaattcctccagctgactgctgttatcactgacaactacggctccggcaagcatactgtctgcgatccgctccgtaaacccatccttatgccatgccatcacatttaaagacagctttgtcttttgcagcaccgctgccgcctcgtcgccaaagaccgcttcgtgcatacagagcagaggattttgtgcaaacgggctattcttccatgtatctccaaatacatgcagttttatccctgcctgcaggatcgtttctaccaccttttcacggtaataaaacatgatacactggatcacttctttgaactcaccgaaccgttccagaaacgcctcctgatccagtgttatcttataatgatccagtgttttttgaaatgccagttccgctgtgatgtccggattttttctcataacagataaaaaccgtgctgcaagaaactttatttccctcgcactactcgttatcgcggcaagtttgttccggtaatccgtataagttcccagaaatgccacatcatagatccgttcgtcatcgttaccgccctctgccatccgcctgcctcccggtggcagtaaatacgcatctgcaacgcctttgtcatattttcggataaacgcctgataatttctgtcatgcgtgaggatgtaatagcgtttcggcgcacactgcagctgcttttgcatccagatgggatgatccagtacaaaattatatttcggtcccccgatcagatcctgaaaatagctctctccatctttccgctgtaccgaaaagatccatgcctgaaatccgatggatgccttatatctctctccaagcagcctcggaagtccctgcacatcctccgctgcaacatcataaaaccggatggcgtttcctttcgcatacaacgcctttgccagttcatttgccagaatgtttaatatgttatagcagcaactgtccccgaggtaaatcaggatcggctgtgtcgcatcatagtaataaaaatacgcttccgtccgcgtgatcatctgctgtaaaaaagcctctactttcggcgcactctcgactgcaagcccctcggtcaaaaccgcctctacgactgcctcaaacagccctctctcctgcaaaaattcacggtatcttccggcaatgtaggcatcggtacaaaactcgcaccagatctcctgcactccattttctacgtctcctgcccccgctttttctgtctctcctgccaggaataaagccggcagcaaatgcaccgtttcacgctctgccacgcgaagagccagctcatattctcttttggccggaagtcttgtatttttcccgcctgcctcagacaaaagttctttttcaagcaaaataccatttgctacgatacgctcatctaacagcagctcttccatgtcaagctccctgctctcgtcctgctcccacagacatgccgcccgtataccttttttctccaatgccagtttaatcgtctgttgtgtcacaggaacttcttttccccggcacaaccacagatattctttcatataccgctgctattattcctctctcttatattaatttttatcggcaattttccgatatataattagataaaatacatatggtggcttagatggaaaaaaatacagtaaacacatcactgattgacagtacagcaataaaaattataaaaaaccattacaatttttgctatttacatgcaatgctggaaaaaattcaacacatttccgttgagaacctgattgttggttcttcttacggattatatggcattatagagtctttatttcaaaatggtgcgctgaatttatctatgcataatcaggatatttattatgattttcttgctgtcaaacaggccgtaaaaaatgcttataccaaaccaaaacgctgttttattctgctcggttactatgctctgggacaagatttgtcttctcaatcgcgtctcggtcatactttaataaaacaaatctattatccactatatcgtgactcacacaacttggatctttctgaatacttcgatatttggaaatgggctgatgtttaccagacatttgattgtccagataatgctatattagagctcaaagaaaccatagattattttatctggcaacagggttcttattttaattcccattgtgagcggggcacctctatgtcagaaaaattaaatggtatcctctgggacaaatgccaaccctctttacgaacccagcttgctcaagaacgtgcggattctcataataaactaatacattatgaaacatccatttgtgaaaataaacagcttctggataagcttatgttatatttatcttcacaagaaattcaacctattattgtaatccctccattttcagatgaatataaccatttcatactccctgcttaccatgaacagattttaaatgtacttgagaaaatgccctacgatattcactatattgattttaaccactataagatctggtcatcccttgacttttttgatgcagatcatctgagccaacaaggggctatacgattatccgctcttttaaatgacacatttattttaaatcagtaatcactatttttataataatctttataccggaggatttttaatcatgacacactatgaaaaaccatatattatcgcagaagccggatgcaaccacaaaggcgacatggagatcgccaaagaactgatcaatgttgcagccatgttctgccatgcagatgcgattaaatttcaaaaacgctgcccgaaagaacttctgaccccggagcagtacaacgcaccgcatccaaacccttgtaatgcttacggtgacacctatggtgcccatcgggagtttttagagttcactgtcgaccagcacgcccagttaaaagaatggtgtgaagaagccggcatcacctattccacatccgtctgggatatgacttccgcaaaggagatcgcctctttgaaaccaaaattcatcaagatcccatctgcatgcaatacacatttcgaaatgctgcagtggctctgtgacaactatcagggcgagatccagttatctttcggaatgacaacacatgcggaagaggaacagattgtgacactgtttgaaaacaacggacgtgcaaaagatcttgtgcttttcaactgcacctccggttatccggtaccattctctgatatctgtctgttggagatcgagcgcatgaaaaaaagctacggctcccgcgtaaagaagatcggcttctccggtcatcacctcggtattgccgttgatgttgccgcttacaccctaggcgcaaacgtgattgaacgtcattatacgttagaccgtacctggaaaggcaccgaccatgccgcatcgttagagccggatggcgtgcgtaagcttgtccgaaacttaaacgctgtctatgactctttaacctacaagtccgaagaaatccttccgatcgaacaggtacagcgcgagaagctgaaataccgcaaacactaaacaggagcagcacatgaatatactattttatcaatatggcagcatttgtgaaccggatatcatggaaggatttgaggaattaggctttcatgtggactccatttcagaagagattaaaaacaagtccctgactggcaaagagcagatacagctgatcgatcaggctctttccaaaagggactatcagtttgtctttaccatcaatttttatcctgccatatccgaatgttgtaacatctatcacattccttacttatgcctgatcgtggacagccctgtattagagctctattcggatgcgatcaaaaatccgtgcaatcgtatttttctgttcgaccggacactctatgaagaatttgcaccgtcaaatccagactgcattttccacattccacttgcaacgaacgtcaatcgctgggatcgtgttctgtcacaggcatcaatgcagcagaaatcgtctttttcttccgacgtttcttttattggttctctttattctgagaagtgcccctattatgagttaaagtttccctccacttacagcaaaggctatattgagggacttttacaggcgcagaaaaaagtatatggctatttctttctggaagaagcactggatccagctctggtaaacgatattgtatctcatacaccgaccttctatcagttcccggaacgctcacggaaagactaccgcgccgcattagcgcagttttaccttggcccgaggatcaccgaattggaacgcgttgaaatgcttaccgcacttggctctcatttctctgtggatctgtattccaatagcaatgcttcaagccttccggtgcattttcgtggacgtgtcaaaacgcatactgaaatgccgcttgttttccatgaaagctgcatcaatctgaatatgactgcaaagtccattcgttccggtatcccactgcgcatctgggatgtgctgggttgtcagggctttttaatttcgaactatcaggcagagatcccggattattttgttccaggggaagacatcgtcctttattcctccaaagaggaacttctggatctgaccgcatattacctttcccaccccgctgaacggaaagagatcgcgcataatgcctatgaaaaggttaaagcgcaccacacttacctgacccgtattacacaaatgttagaaacagctttccatctttaa

SEQ ID NO: 471 - DNA, 9751 bp, unidentified
  source 1..9751: mol_type = unassigned DNA
ttaaatgctcgtatcctcatatttatatagctcccactctccgcgatgtctgcggaaatagaagatattggtatatccatttccaatcccgttcactttcaggattttcgtatttgagttatcactattcttctgtccataattgatattggacaatttatccacaggcaatatagggcggaaggcataccactggttcaaatcaagcgtagtctccagaatagaaaactcatcatccggatctatcgtgatatattccaaaggttcccggatatgtcgactctgataaatgctgtcggttacaaagcgagagtaaaacgtaacgaagtcttcattttcgccctgttctatctggcggagattgatagcttccagcatccatacccccttagtacgttcaaaatagtatttcttcaccatgcggttttccagaaaaatccattccacctgtacagaagtgagtgcagtatctcctaccaattccagatcatcttcatcatcaaagagcaatgtataataactctgctgggtaaacagataatcatgtccccagtcctccttctctattttcgaaggtgtatcgacgttgtaaaaaggcaacggaaatttggtccgctgccgttgcagggcgtcatccgaagcataactatagataaaatcatcaaatgattcatccgcttctatgggcttaggatcgttatcctcttcaacctccggcacagtatcagccttatgtgaagctgaatccaccaaattggtgattgtcgcaaaagggtccatcttcgttttcttgttgccgcatgacatcaagaaaacgagaagaaagaaccccaatcctatttttctcattctttaccgagacctcatcaggtcacttatttagtttagctcttaacttttcaagcatatccactgtcatggactctaaatcatactgcggtttccaatcccactcttcacgagcacaggtatcatccagactatcaggccaactgtctgcaatagattgcttcaatggatcaatttcatataccatttcaaagtcgggcacatgcttcttgatagcctgacagatctcttccggatcaaagctcatggcagcgatattgaaagcattccgatgcttcagacgtgccggagcagcctccatcaatgaaatagctgcattcagcgcatcaggcatatacatcatatccatataagtaccaggcttcaaaggacatacgaacctttcacctttcactgcggagtaaaatatatcgactgcatagtcggtagtacctccacccggaggggtcacattggagataatacccggaaaacgaaccgcacgggtatctacaccgtatttagtataataataatcgctcaataattcagtagttactttggttacaccatacatggtacgggggcgctgaatcgtatcttgcggagtcttcacatgaggtgtagcttctccgaacgaaccgatggagctcggggtaaagactgcgcaaccatactcgcgcgctacttccagtacattccataatccgtcgataccgattttccaagccatggccggacgactttcagcaacaaccgaaagcaaagctgccagattataaatcgtatcaatcttgaattggcgggccaccacttcaatagactgacggtcggtcacgtcggcaatagctgaaggacctgatgcctttaattcccctttaggcatagcactcggaatgtatccagcgataacatggtcatccccataacgtttacgcaattccaatgtgagttccgaacctatctgtccggttgctccaattaccaaaatattcttcatacgacttatttataaggtactccttacttagagacgcgcaaatatacatacttttttttcattattctatcattttgctattgtttatttgaagaaaaatcgtgtcctttgtatcgtttagtattaagatgacaaacttttaatttataaagctatgtacgggaaaatgaaagaacatctcagcaatacacttgctgaaattaaagaggccggactctataaagaagaacgcctgatcgagagtgcgcaacaagccgccatcaccgtaaaagggaaggaagtgctgaatttctgcgccaacaactacttgggtttgtccaaccatccgcgactaattgccgctgcccaaaagatgatggatcaccgtggctacggcatgtcttccgtacgcttcatctgcggaacacaagacattcacaaagaactggaagctgctatctctgactatttcaagacggaagacaccatactatatgctgcttgttttgatgctaacggtggtgtattcgagccgctatttacggaagaagacgccatcatctccgattctctgaaccatgcctccatcatcgacggtgtccgcctatgcaaagccaaacgctaccgctacgccaatgccgatatgaccgaactggaaaaatgcctacaggaagcccagacacagcgtttccgcatcatagtcaccgacggtgtattttctatggacggcaatgttgccccaatggacaaaatttgcgatctggctgagaaatacgatgcactagtgatggtagacgaatcgcactctgcaggcgtagtaggtcctacgggacatggtgtaagcgaactgtatcaaacttacggacgcgtagatatctatactggaacattaggtaaagccttcggcggtgctatgggcggattcacgaccggaccgaaagaaatcattgacctgttgcgtcagcgcagccgtccgtatctgttctctaattcagtagctccggctgtgataggtgcaagtatcgaagtattcaagatgctgaaagaaagtaatgcgctacatgacaagttagtaaacaatgtgagctatttccgcgataagatgactgctgccggtttcgacatcaaacccactcaaagcgccatttgcgccgtgatgttgtatgacgccaaattgtctcagatatatgccgcacgcatgcaggaagagggtatctacgtaaccgggttctactatcccgtagtaccgaaagagcaagcccgtatccgcgtacagatttcggcaggacacgagaaagaacatctagataaatgtatcgaggcatttattaaggtaggaaaagaacttggagtattagcgcactaaagtgcgctaagttacaggctacgagttacgagctacaagtcactcgtagcttgtagcttttagtatcaccgcaaatctgctccctttcccctgttccgagtgcagttcaatccttccctgcaatttctctataataatctggcagatagaaagccccaagcccgttccttgcgaaaattcattctgcttgtagaaccgattaaaaatcatcttctgctcggcgcgaggaatgccacagcctgtatcttccacataaatttccacttccgaagtctcaggtaaataacgatatcccagcttgatataccctgaagctgtaaatttagaagcgttattcaggaaattagtgaccacttgcgccaaccgtcctttatccacatttatccttaccggcactgtatccttatccttaataaattccaactgttccggtattaacatctgatgggtctgatagatttcatccaccaattcctccactccgcatggagcaaattcaaaggacatatagcccgactcaagccgtgaaagttccaagatatcatttatcagcagcagcagcaaatcactattcttgttgatcgtcttgatatactcacagcgctcatctggttccagttcttcatccgctgccaatatattggaaaagccgacaatcgcattcagcggagtgcgtatctcgtggctcatattcgctaggaacgactgtttcagctcagctttttccgccagcagacgcgcctcttccagttcatgttcatgatctttaatgtcctgtatattcagcaacagtccggcagccttatagccgccatccggcaatgcaatggtcttataccggaattcccaccattgatatccttttccgttaaagtcgcaacgcacctgcaccgccaccttacggattaaggatatcttcctccagttttcctccacctcatcccggcattccggatgaataaacttaatgagtttatcaaacgtaagtaccttcgacatcattccctgcgacttccagaaatcactctcaaatataaaataatcattctccaacttccacgcgtacgtatcactcccctcaatagccagcgccaacgtttctttttcatcctccagcgcattgagagctttctttttcctcccctgctcccgacgataaaggaaaaacaacaagacaaacagcgtaatcaatagaactgtaattgagaaaataattcctccccacagccaaggatatgcctcactgaacggaatatggataatagaatacttctctggaatatccgccttcgaaagccccctctgctccatcacctcccaatctaccacatactctttagcactgtttgcgatgggcatatccaaaggcttctcaccatgcaaaatcctgaccgccgcatccaccatttcccctacctgtattgggatcgtcgtcatatatccccccaacagtttctcgccatagccaaaaccttcattaatggctgtcagactggggctggaacagatatttccgatattgacagtcgtaaagtcccttttcaattgaagataacacctatctcttgtgtattggctcaaactccaaagtagtccggcatccgaacgatccttctgaagccggacagtaagcccggcaaaatacgtataactcttgtcttttacaaactccttccattccctggaattgaattcttttgagttcatgaaaccttccaccttctcgtctttcaactgttcccaagcatccttccttatttgtttatccagataagtggagtctataatagtgaagagatgcatccccttcccgaatatctctttcgcagccttgatattcgccataaaatctattttatcacgaaatccggtcacgttgggatattgctttataagaggccagttagggtaattcactccaccaaaaacaacggggagttgcttcgccagcggatgtccgcacttcagcagtgaataagttgcctggtcatcattaaccaatataatttccggttcccagttttcggaaacttcatccaacagagagtgcagatacaaagattctaagttatcccgataagcctcgcaatctaaatacactgtacggagttcgacatcaatccctctcttccggaaagtttcggcaatcattttattaaaatcaggataagcagcataagttttctcataagagtgcaccaccagcactttccgtttttccatctccgaacaagcgctcaagacatggcaactcaacattatccaaaggaggaatttaaaatttattttgcccatacgcatagtaattcacagtacgtgttaaaaagagtaacaaaggtagattaaaatactgaaacagcaaaaataaaagagctgcttaaaaaatcaagcagctctttttttgacttatcaattctatatcaaaagattattaacgttcgcccaattttacgtctacaaagaagatacccgttgcaccggctttcttaatcatatcaacaatgcctgcagcagttgcttcttcttctacttgttcacgcacaaatccccacaggaagtcctgcgttgctttatctttctcagcagcagctacatctaccaacttgtcaatcatttcggatacacgacattcgtgtttgtaaacctgttcaaatacttccagcggagtaccaaaatcattaggaactacatccagcttatcgactttggccttaccaccacgcttaattacgtaatcggccagtgaacaagcatgttcattctcttctgcccactgtttcttcaaccaatgtgccataccacaaaatccttctttttccatatagaaagacatagccaaatacatgttagccgaccacatttcagccgtaatctgctcgttaattgcattctgtaatttttcagtaatcataatcgtattttttaattaaattgaaatcattacaaaagtaacaatgatacacaacatttgttcatttgataacattttttaaataaataaaatcagaagtacatttgaagctagtatatatatgtccggcgtataactcctccattgcttttccatttccaatcacatcatacaaatatagatattgaaaataaaaaaacaattttcatatttcaaatacaaataaattaaatacaaaatgacaaaaagcgtgcaagacttaaatgatagtcttacacgcttcctacaatatattcaattctttcacaccagttcgtccgaagtgtacccctgtggcaactcacgacagttatagctcgaagccattatctcaccataagcacctgcagaacgtaatgcaatcagatctccacgcttcaccttattcaaatctatcgctttcccgaaaacatccgacgattcacagataggacctaccacatcatacgcctcaactgcatcctcggaagtaatattctctatcttatgataagcctgatacaatgcaggacgaatcaaatccgtcataccagcatcaaggatggcaaatttcttatttgctccctgttttacataaagcacctgtgagataagtgaaccgcactgccccgttatggcacgtcccaattcaaaatgaagtgtttgataagagcgcagtttcagatgttcggcataagtagagaaataatctttgaaatcaggtattgcctgacggttgggatgcttataatcaatacccagtccaccacctacattgatatgctcgatgcggatgcgatgtgcttccagcttgtcttgcaattcatttacacgattgcacagggcaacgaaatcacccatatctaatatctgcgaaccaatgtgaaaatgcaatccgataaacttcacattcttcatctccaaagccacttctatcacatgatccatgtcttgcatactaatgccaaacttgttttccgctagtccggtagtgatattggcatgagtatgagctcctacattcggattgatacggaaagcgacattagccactttacctttagctgcagccagttcattgataatctccagctcaggaatagactctacattaaaacagaaaatattatagtccagactcagatttatttcccaatcagacttgcccactccggcaaaaacaatcttatttgtaggaaaacctgccttaacagcagcacgcacttctcctccactcacacaatcggcacccagcccgttctcacggataatagaaagcaccttcgaattagcatttgctttcacagcataatgcacctcaaaattgccatatttagcagcttctgcacgcacgcaggaaagagtgtcgcgcaacaccttcgtatcataataataaaagggggtacgcagttcacggaatttatctatgggaaatgttcctttcatacttcaaaactttgtttataaagaaaagagcgcaaattacgcgaattacacaagagcctttatcagcgagttgtgcaatttgtgtagtttgcgctccatatcattttatatctgtactttcttatttctcttattcttcgttgaacagtgcatcactaagcgactgcaatgcctgattcttatcgcactcacgaatgaggaaagaaatgttgtagttactaccaccgaacgaaatcattcgtaccggtatgtcgcgcatggcatccagtgccttcgcttcgaaaccgacattctcccattccaaatcacctaccacgcagacgatacacatatccttatctactgtaacggttccgtacttcttcaggtcgtccagaatctcgttgaggtgcttcgtattatcaatagatacagatactcctacctcagaagtacaaatcatatcgatagaagtctgatagctctcaaagatttcgaagaccttgcgcaagaaaccgtgggcaagcaacatacgactggatttaatcttgatagctgtaatgttatctttggctgcaactgccttgattttacccttctcggtatcattagaaatcatagtaccgggagcagtcgggtccatcgtattcagcagacgcaccggtatattggcatacttggcaggctgtatacaagtgggatgaagaatcttcgcaccaaaataagccagctcagcagcttcttcaaaatgaagatgacgtacaggagcagtcttgtcaacaatacgcgggtcattattgtgcataccgtcgatatcggtccatatctggatttcggaagcattgatagctgcaccgatcagagaagcggtataatcgcttccaccacgttgcagattgtctatttctccgtaagcattacgacaaatgtatccttgtgtgatgtaaatctcagcaccgggatgcaattccaactgcatctgaagtttctccttaatatatacaggatcaggctccgcattcttatcggtacgcatatattccaaagccggaagcaaaatggacttcacaccacactcttgcaggtaatagttcatcatggcagtagagatcaattctccctgtgccagaaccactttctcctcaaacagcgtgaaaagatctttggtgtaagaacggatgtagtcaaaatgagatttaatcagttcctgacctttctgtttatactcgggagtggaatacaactcattcacatgctgtttatatttagcctccagcttgttaatgatttcgttggcaccctccggatttttcttgtacagatagtccgaaatttccaccaatgtattagttgtgcccgacatagccgagagtacaactatcttttgttcaccatcagtgatcaatttggctacttcctttatccgcgatgcagaacctacggaagtacctccaaactttaaaactttcattttcgttcctgtattaaatgattatatattattatttgtttcttctacagtcggcatcatacccgaatactcggacgtcacatctgttatctgatgacctgcacagcgatatacctgtcccggaaactcgtgaagcagatggagattgtgcgtagtcatcaataccagcgagccacccgtgcggctgatgttatgtaatagtcctacaatagcacgtcccgtttccgcatccagattaccggtcggttcatccgccaggataatctccggagagttgagcatagcacgggcaataacgatgcgttgctgttcgcctcccgaaagttcgttaggaaacttatatcctttattacccattcctacctgcatcagcacttcagcaatacgatcttttatttccgatttgtttttccagcccgtagccttcaatacaaaagcaagattatcgttcaccgtgcggtccgtcaacagttggaaatcctgaaacacaatgcccaatttacgacgcaactgcggaatatgcttacgcttaatgcgactcatatcataccccagtaccattgcttcaccggcagtaatatccagttctccgtagagggtctttagcaaactggtcttacccgaacctaccttaccgatcaggtacacaaactctcccttctgcagctcaaggtttacctcattcagaacgcacaagtcctgttggtgtacttccacatctttatatcgtatcagcggttcagccattcccat

SEQ ID NO: 472 - DNA, 5955 bp, unidentified
  source 1..5955: mol_type = unassigned DNA
gtgtcgacttatattgaccagcgtgtacgggtaagtgcatttaaggccgaacaaactctaaccaaagatacggttccggtaaatgtggatgcagtcgtatattggaccgtctgggacgtggaaaaagctgcattggaagtacaggagtaccaaaaagcgatcgaacatatcacacagactggtctaagagataccatcggtaagcacgaactgtcggatctcttgcaggaacgcgataagatagctgaggatttgcaacaggtcttagacagaaatacgaatccgtggggcatcacatgccagactgtcggtatcaaagatatcgctattccgcaagacctggccgaagcaatgagcaaagaggcccaagccgaacgtgaaagaagagctcgtgtcatcttgggaacggcagaaacggaaatcgcagaaaagttcgaacaagccagtaaaaaatataccgataatcctgtggcattacatctcagagggatgaatatgctgttcgaaggcttaaaagaaaaaggatcaatggttatcgtaccgagttcggcactcgacaccatgaacttaggggctatgggaggcttggtttcattggctaagaacaacgagacaccgaaataaactattttctaataacaaaaaattaccatttatgaaaatacacaaacaagggattacttttgttctccttctattagtcttcacaagttgttcacgaaaaccatcgctgcaatggattcccttcagttgggaaggtgatacaatttcggggatatacattgaaaaagcttttctaaatgttccggtaaaaatagagaatttaccctacgaattcacaatgcagtttgatttaggaacatataattctgtcttttacgggaatacttttgctccttatctcaaagaagccccatctttaatgaacaaaaaagattcaaccgggatgtataagaatgtcaacctgcaaatagggacagtggagtttagcaatgccaatatcggattcatgcagaatttcggaaatgaaatccctaaagattcacttcattcaaatacacccaagcatattggaacgatcgcatccgacatggtgcaagataaagtcttaatcattaattacaaatcaaacaagcttgcaatcacagactttttaccggctgaatacgaaaatctgccggctgaagaatttgaatcagaatatggggtaataaaattgcctttacggattaatggaaaaacatgtaaagtattgttcgatacaggttcaagccctttccagttaataacgacacaagaaagagcttggagcgtatcagaccttactattgtcgactctctaagcggtcctttatggtggggacaagaaataacattttatggctttaatgtaaccaaaccgatcgagttcggcggaaaagccttgaacaattcgaaagtctactacgccaaagacggcctttgggatagtatttatagttccctcgatgtctggggaataaccggaaatgcttatttctttgaaaacaccgtgattatcgattacaaaaacaaactattcaggataaaataaaaattcgaccccatacttcttcattcagatgcaagcataagttattttctacattgccgtatacattcccgacaacgtcgaaaacaacttacacttgcatcaaaacaaaaacacattgccatcttacatcaaacctttgccagagcttggtctaggtcatcaatgatatcatcgatatattcagtacctatactcaggcgcacaatggaaggcgtgatatgctgtccggccagctcttccggagtcatttgagaatgggtagtcgtatacggatggatcaccaggctcttcacatcagccacattggcaagaagggagaatatttcgagcgaatcgataaacttccaggctgctacctgtccgccttcaatctcgaaagtgaaaatacttccggcacctttcgggaaatactttttataaagttcatggtctggatggtctggaagagccggatggttcactttggttactttcgggtgtttggataaatactcgacgactttcagagcattggcaacatgacgctccacgcggagagacaatgtttccagaccttgcagcaagataaaagcattgaaaggcgagatcgtagctcctgtatcacgcagaatgacagcccggatgcgggtgacgaaagctgccgaacctgccacgtcggcaaagaccgctccatgataacttgggtccggtgtgcccaaggtcgggaacttatcggaatttgctttccaatcgaaattgccactgtccacaatcactcctcccaagctcgatccatgtccgccgataaatttggtggcggaatgaacaacaatatcggccccgtgctcgatcggacggatcaggtacggtgtaccgaacgtattatccactatcaacggaatattatgacgatgggccacctccgccacagcatcgatattggtaacatcagaattgggattaccgaacgtttcgacatacaccgctttcgtattctcccgaatagccgcctccaacgcctgcaagtcattgacatttacaatcgtgtgggtaatgccctgagccgctaacgtatgcgtaatcaggttgaaggaaccgccatagagattatcggcagccacaatatggtcgcccactccaagtatattctgcaaggcatatgtcacggccgccgcaccggaagccaccgccagaccagccactcccccttcgagagcagcgacacgcgcttcgaaaactccctgtgtcgaattggtcagacgaccataaatattcccagcatcacgaaggccgaaacggtctgccgcatgttgtgaatcatgaaatacataagatgttgtctgataaatagggacggcacgagcatctgttgcgggatcggcctgttcttgccctacatgaacctgtaatgtctcgaaatgtaatttctttgttgccatagtcgtattattttaaattgttcttcttgctcattttccagcaaaactatagcagacagagatatcagacaagatatatggaaaatacagaaaataacgctatttttacggtcgtcaacagaacgcataaactgtatcaggatcgaaaaaaggattctgatagaattttattcttatgaacacacttgagaaattagacaaagtagacttgcagatcctccgtaccctgcaatcgaatgcccgactcaccacaaaagagctcgccgcgagtgtcagcctctcgtcgacacccgtattcgaacgcctgaaacgcctcgaaaacggaggatatataaagaagtacattgccgtgctggacgccgaaaagctaaaccagggcttcgtggtcttttgcagtgtcaagttgaggagactgaacaaagagattgcggcggagttcacaagaatcatacaggaaattccgcaagtcacagaatgctacaatatatcgggaagttacgactacctgctgaagatccatgcaccgaatatgaagtattaccaggagtttatcttgaacgtgttaggcacgatcgacagcctcggatcgctcgaaagcacctttgtgatggacgaggtaaagcatgaatacggaatccatatttaaacgccgccccgtccctatcttacatttattacttcaatgcataaatccgctggatgatgtccacaaccttcatgccttccaatacgttggtcgtaatacattccgaacttgcaccggaaaggacacggaccacattgcggatcacgaaattatggttctgggcggaacctttataagggccgtagtcatttcccggattcgtcggcgccagttccggcatttcataatctttgatatggcagtattcgacttcgttcatatactgtccgccgattttcacgcttccgttctccgcaacaatcagcatactgctttccatgttcctgttccagacagaagtggaatagctcaggctccccatcccgccgttcacgaagttgaaattcacaaagcccgaatcttcaaaagccgtaagtccggcatggttgaaatcggcaaagcgagcctggatattgcagatatccccgaaaagccagtacataatgtcgatgaaatgggagaactgagtaaaaagcgtccctccgtccaaagcagcatcgccatgccagccaccggatttataatagcgctcgtcacggttccaataacaattcaactggaccatatagatcttgcctaacctacccgaatccaccatctccttgatccaaacggaaggaggagaataacggttttgcatgacacagaacacttgtttacggtatttcagcgaagcatagaccaccttctcggcatcagcaagcgtcagtgccatcggtttctcgatcacgacgttgcaaccggcttcgacagtctgaatggccattgctgcatgcaagccgttcggggtacaaacatttacgacatctatggaaattccgctctgcaatagctccgtcagggatgaaaaaaacgggacatcgtatgcctcaatacccaattcctcacagggacgaatatcacaaagggccaccaattcggctcccggatcgcgtgtcaccatctcggcatgacgtttgccgatatggccacaaccgataactgcaaattttatctttttatccataagcattcgatgggggggtgtcaaaatctccttgtccccgtgcttgacgcggggccgcaaaaggacagaccttatcaatcagatttttatagggtcggttctaatgcgatcccacgtcaagcgcgggaacaggatagtttcgacacacccccttttttagagtttctgttatatattgctgttgtccgagggacatttccgtatgaataggcagggaaaggacggattcgcacaaacgggtggagacgtccaaattgccggatacacgggagatatgccggtaagcttcctgatgatgcactggtacaggataatagatcatggaagggattccctgttctttcaacaggcattgaaggacattccgcctgccgtcttttacctggaccgtatattggtgatagacatgagtcgaaaatatcgatctcgcagggagaaccaacgaatcgcaggaggacaaagcttcatcataccgagaggcaacttgccgacgggtttccgtgaactcctccagatgcttcaacttcacatccagcacagcagcttgcaacgtgtccagacgggagttgcatccgatccgcctatggtggtatttgcattcctggccatgattggcaattatgcggatacgggcagccaacgcctcgtcggaagtcatcaacgcccccccatcgccatagcaggccaacggcttggatggaaaaaaagatgtcgtcccgatatgtccgatcgtcccggcctttcgtacccgcccgtcggaaaagatataatcggcaccaacagattgagcgttatcttccactacatacagatgatagacatctgccaaagtcatgatcggctccatatcgcaggcttgtccgaacaggtggacggccacgaccgcctttgtccgttccgaaacagccgcttctattttccggggatcgatattaaaggtacagggatcgacatccaccaacacgggcgtcaaccctaacaaagcgacaacctcggctgccgctatataagtaaatgccggcagaatcacctcatcgccaggctgaagctccaatgccatcagagcaatctgcaaagcgtccgtcccgttagcacaaggaatcacgtatggaacctgaagataatcagccaaatgcccggcaaaggatttcacctgcggaccattgataaaagcacaactgtcgatcaccgcctgcatggcctcatcaatctcctctttgaaccggagatattgtccatgcaagtcgaccatctgtatctgttcttccaacat

SEQ ID NO: 473 - DNA, 8245 bp, unidentified
  source 1..8245: mol_type = unassigned DNA
ttatgtagattctctataaatagtctcagcttctaatataatggttttatcaggtagttccgggtgctctactttttgtacaattagtcttgatgcttcttccgccatttgttttactggttgttcgactgctgtaatggatggatgaactaatacgcacaaatccgttcccgaaatacaagctatggcaacctcatcaggtatttggactccatgcttttgaagattgctttttgctccgagagcagacatttccgtaaagcaaaatagtgcatcgaaagcaatgtgttgtttcaataattgttccactgcctgctcacctccagagaaatcgactccagcatcaatgacatactctggacaataaggaagatgaaatttttccaaggcatcccgatatccacgtttcctttcttgggagttttgaatatagtcgggtcctgccaagtgaacaattcttctttttcctctacgtatcatctgttcgaccaaaaagaacgattttagataatcatcgattttcactttggaaattggcaaagaagacaaggtgcggtcaaaaaagaccataggaatgccttttttcataattcgctgataagttgcaagattcttttctgtatgacagacactgatgagaatgccctctacccgatagtcttcaaacatctgtagattggccagttctgcattcggattttcatgtgactgagccaatgtaacccgatatccctgtctattcaattcctgttgggcataggtaatgaaattcatataaaaaggagtcagcatttccggaaccactataccgatagtgcgcgtgctttgttttcgcagattgacggccagttcattgcgggtgtatcccattttcttggccatcgccaagattctttcccgtgtttctttactgacattttgcttatcgccccgtaaggcacgcgacacggtcgatttggaaatacccaaagcttgggctatgtcgatgatggtagtgtatttcatggcggcattttttattaacgctacaaagatatgaaaaaaaagcaagtttttgggaacggttgcggattttgggaacggttgcgggaacggttgcgaaagataaatgtataaaatttatttttcatctgatttccagtgtatagttttgtttcagaaatcattaaaatctaataagcaatacacatgaaaaacgatttgaatcaatcgaaagttcctttcataagcaagttggcttatggcatgggagatgttggctgtaatttcagctggatgtttgtcgggaatttcctgatgatattctataccgatgtttttggaatcagtatgagtgccgtagctacattgatgttattttcccgtttctgggatgccatcaacgacccgattattggagggctaagcgataagacgcatacccgatggggacgctatcgtccttggctcttgtttgctgctccgttaaccgctttagttctgattcttactttctgggcacatccggactggagtcagacgcataaaatcatttacatggctgtgacttactgtattttggtcttaggatatacctgtgtaaatattccctatggaacgttgtgtggtgcaatgactcagaatatgaccgaacgagcacaaatcaatacttcccggtcggttagcgctatgatagctattggaattatcaacatcattacgattccattgattgaatggttgggtaatggaaatgcccggcaaggctatctgctgattgcaattctttatggaactatcttcgctgtctgtcatatcttttgttttgccaagacaaaagaggtggtagaagtgcctgttgcccagaaaattccgttacgattgcaactgcaggccgttgctaagaacaaaccttatttgttggcgttgttgggacaggtgctgtttggatttatcctttacgggcggaacgccgatttactctattattttacctatgtggagaatgatgctgtattgttcacctattattctatggccatcatcatcccatccatcattggagcagcctgctttccgaaggtatttcaattgacttccaacaagggttgggcagcctctgtgtttgcctttggtacgggtatcaccataattgcactcttctttttcagtcctgtgacctcccccatacctttctatttatttgcggcactttcccaattcttcttctccggtttcaacaccgcaatctatgcaattattcctgactgtgtggaatatggagaatggcgtacaggcatccggaatgatggtttccaatatgctttcatttctctcggtaataagattggcatggcattgggtactgcgttactggcattgtcattaggatgggccggctatgaagctaacaccacacagaatgaagccgttgtagctattatgaggcattcattcagtaccataccaggaatattatgggtagtgactgcacttgcgttgttcttttataaacttgataaaagaagctataatcgaattctggcagtaattaaatataggttcctgaaacgcaaaaagaatcagcgagaatatgatgttatcgctttaggcgaactgttggttgatttcaacgccttgcattccaatgattttgatagtgtggtgtatgaatcaaaccctggtggtgctccctgcaatgtcttggccatgttaagcaatctgcagaaacgaacagcttttataggaaaagtcggagatgactttttgggacatgctttgcaacaacgcattgttaggatgggtatttctacggaagggctgtcgaaagacaagaaaaggaatactactttggcttttttgaatgactcgaaaacttatccccaccaatatcttttttaccgcaatcgtacggccgacatgaatctggatgaaggggatgtggatgcagatatgctgtcacgcactcgtattttccattttggttccctttcgttcacacataaacgatgtagaaaagctacgcgtaaagctattaaagcagccaaatcaaaacatcggttaatatccttcgaccccaattaccgtcctgtgttatggcctggtgaagaggaagcccgcaagtggatgttgtatggatgttctgtgtgtgatattttaaaagtggaagctagtgaactggcatttattacccagcaaactactattcagaatggagtggactttttgcagaaacattattctatttctttgattcttgtgacatcaggagaagccggcagtcaggcatttatgggaaatcgaaaggtataccaggaggcatttctcaccaatcgaaccatagatacaaccggtgcaggagatacttttcttggatgctgtttggcctatattttggagcaaggcatggagctttctgaccatcagctacaggaaatgctgtttcgagctaacgcagctgcatcactggaaactactcgtaaaggagctattcgagccatgcctactcaagcggaacttgaagactatctaaaacaattgacatcattttaatttaaataataggagattacattatgaaaggtacaatgaaggtagccgttatgaacggcattggtcaaatgggttatacaaacagagatattcctcagcccaaagacaatgaagtattggttaaattggaatatgttggcatttgcggatcagacatgcattattacgaaaccggacgtatcggtgattatgtggtagaacctcccttcgtattgggacatgaaccgggtggaacagtggtcgaagtgggaaagaacgtgaaacatctgaaagtgggtgaccgggtagctttggaacctggaaaaacttgcggacattgcgagtactgtcgtgagggaaagtataatttatgtcccgatgtggtgttctttgctactcctccggtagatggcgtgtttcaggaatatgtagctcacgaagccgatctttgcttcaaactgcccgaaaatgtctctactttggaaggtgcattgatcgaacccttggctgtaggctttcatgcagccaatcaagggaatgcacatgccggacaaacagcccttgttttcggtgccggctgtatcggattggtatccatgatggctttgaaggcagaaggtgtgtctaaggtttatgtagtcgatataatgcagaaacgtttggacaaggcattggaactgggagcgactggtgtcatcaattctaaagaagaagatgtgttggaaactatggcaaaacttaccaacggaaaggggatagatttggtgattgagacagcaggaatggagataaccacccgtcaagccattcacgtgactaaaaaaggtgctaccattgtattggtgggatattccaagagtggtgaaatgactcttccgttgagcttggcattggacaaagaactcacattcaagacagtgttccgataccggcatatttatcctatggctattgaagccgtagcatcgggtaaagtcaatttaaagggaatcgtgaccaatgtcttcgatttcggtgatatccagcacgcaatggatagcagtgtacaggataaggctaatattgtaaaatcagtggtgaaattttaattgaatacacttttagagtgtgcctgtcaagtacaggcacacttgcaaaatccttaaataatcatatcatgaaaaatttagtaataggtatcggagaagctctttgggatatattgccagatggaaaaaagataggtggggcacctgctaatttttcttatcatgtatctcagtttggtttaaatagtcttgtcattagtgcagtaggccatgataagttgggtaatgaaattctcagcgatttcgatgggaagcttttgaatcatcacatttcaaaagtagaatatccaaccgggacagttcaagtagaactggataacgaaggagttccctattatgatattcgggaaaatgtggcatgggataatattccttttacagattcaatgaaggggttggctcaacgtgcaaaagctgtctgtttcggttcgctttctcagcgaaatatagtgtcgcgcactacaattcaccagtttttggatgaaatgccggatgaagggacttataagattttcgacatcaatctgcgtcaaggattctataccaaagaaatcctatgcacttctatgcaaaaatgcaatatattgaagattaatgatgaggaattgattgctgtcagtcgtatgtttggttatccaggtattgacttaaaggataagtgctggattctattagccaaatataatttgaaaatgctcatacttacttgtggagtcaatggaagttatgtctttactcctggagttgtttcttttattgagactcccaaagtaatagtggcagatactgtaggagccggagattcatttacagccagttttattgcatcaatattaaagggaaaatctgtagaggaagctcatcggttggcagtaaatgtttcggcttatgtatgtacacaaaatggggcaatgccacaattaccagattattttatcaaatgatagattatgaaaaaatacataggtttattactaatgttgttttcattggaggcaactgcacaacttcatatgaaggcgaatttacaaacgaaccatctgtggcgtggaatagaggtagcagatgggctggtcattacgggcgatgtaaattactctttatgcaatggattgtttaacttaggtttttggggtggaactaatacccagggtacatacaaggaatttaataatcacatttcatttcagtataaaggtttttctttggctttgtgggatacatataatttttcaacaggtgctacatataataataaggaattttttaattacaaagctcacagtaccggacgctttttagatgcaatattgaattactattgtggggaaagatttcctcttttaatatcttggtcaacgatagttttcggtcgtgacagaaataaagaaaacaccgccaataaatactctactttttgttatctggaataccccatctatacaaaatcccgatggcatgcagatgctggaattggcggagcatttgctttgaataaagccggtagtaaaactaatttttatggtaatacaaatgggattgtacatgttttgctaaaagtaacctttgattggacattagcaaagcatacgatgccgattcatgcttgtatggtatggaatccgcaagcagacagagccttttttcaacttggtatccaattatttaatttataaaaggaaacatatatggaaacattgattaataattactgcatggggatacaacatattggtattccaactatagatatagaaactacggttaaattttatcagcagcttggctttaatgtggtactgcgaacccaaaacaataatcaaaaggttgctttttaaagaatttgctgaaagatgccatatctacaaaattcagttcttcggatatttgccggatacttatctcataattatccaacatgtccaaagcatgataaatgatttctttgcatatcatttcgtggggtgtctgtttaaacgtttctttcgtcaatcgagtcaggtgcttggttgaaacacacaagtaatcaacatagaatgtgacactatgttctgtaacggcattttcacaaatcaatttcatgaaattcattaacaagatgtcttttttgttaagaaattcaggctttcaaaataaatctgtttaacaaagtaataatcaattcgttgtaaatttattgatttttatcgagaaacaaaacaggaacaagattacacttttaagcgattttacattttttcgttttcatataacaaaaaaaacggagtccaaggttaatcttgcgttctttagtaaaaacggattttgagcttcctacgtcgtttcattagccggaccaagtgttttcgtccttctgattatgcctgtctgtccgtcaaattactacagtctccggcggcggactgtatagtccgttgcagtggaccgtacagtctgctacagtggactgtacagtccattaccgcagactgtaataatcttccgtttaaaaggccttgaccgacccctgggaacggcttattcttccctttgtttgtaatatgatatttaaatccccaagaataacaagtgacacaataagggtttttaaaagagtgaaaaagatctatcttctaaattttaacattgttttctattgtttttcaatgaaataggtgtatctttgcactatgttaaaaactcgtatatcggatttggtgtcgtaaacaatctgttctcataaatagattgtttattcgtgtattctcgggatattttttcgagagcaatttcatattactataattttattttttaattacacagggagtatggctatgctttcagtgtatgtttaatatattacgataatgaataatgacaacaatacaattctaggattcgatgtaaatttgatttgtgattttttcttaaatacggagcgacaaggacccggaagtcccgaagtaactcttaaagcattaagctttatagataatcttaccgacaaatcccttattgccgatctcggttgtggaacagggggccagacaatgatcttggcacaacatgtaccggggaagattacaggcatcgactttttcccgggattcattgaacgtttcaacaagaatgccgagaaactgaatctccagaatagggtgaaaggcatagtcggttcgatggatgacctttcttttgaaaaggactctttggacttgatctggtcggaaggagccatttataatatcggctttgaacgaggcttgaaagagtggcgcaactatttgaaaccgggaggataccttgccgtttctgaaagtgtctggtttaccgatcaacgcccggcagaaattcatgatttctggatgagtgcttatacggaaatagatacggttcccaacaaagtagcccagatacaaaaagcaggatatattccggttgcgacattcattcttccggagaattgctggatagaacattattttgctcctcaagctaaagccgaggaaatattcagaagaaaacatgcaggaagcagaatcgtagaagaattgataacatccaatcatcgtgaggctgagctatatagtaagtataaagcatattatggctatgcattctttatctgcaaaaaaaggattctcactgagaaggtgagcgaatga
